United States Patent Application Publication US 2022/0290142 A1 - sequence listing, part 12

SEQ ID NO: 14111 - DNA, 99932 bp, Homo sapiens
aggcagcttgtggcggcgaagccatcggtgttcgctgatgtccagtctatggagtcagttggtaccggtggcggcgcggaggcagaaggcggtgtccgagtaggggcctctgccccaccaggatgttacccggcttggccgccgccgcggcccacagatgtagctggtcctccctgtgccggctccgtctgcgatgcagggcggcggcctgtaatcccagcgaccgccagggtgagtgtcccgcgctggccgctggctccgtagaagccgaactggagggccaggctgggctcggcgcctcgcctggggcaattcgcccacttgcctttcgccaacctcagaaccttcctttctggcctccgcctttccagttcagcctgcgcagcccgcgggggtcctgacaggtctctgactctgatgccttctgcagccctagcatggcccccgcgggaacttgtgggcacctcgcgggccggattgcacctctgaagcctaccgctttgtaccaaacaaaatgttacgtgcgcatcgcggtgtcccgcggttactcacctccgcggttggaaattgcggactccgcaaagttccagggtctttggagctttccagcgcaccttcatttagcacttggttgagattttcttggccttctttttcttactctcccaacttattttcttaaattttctaaaaggaaggaggggtgctactcactacggatcttttggaagaagtacgaaagtatccgacaatcattgaatgaacccagtttgggtccgaaaaacaaagaaactcttcagttcggctgagcagtctttttggtgaaaaggtggcagttgtagtggtaacccagaaaaaaaggtggttgaagagaattttcgtctctctcaacattcttttctgactcaaatttaaatggtttgagagtttccaaaataacattgaactaatcaggcttaccttcgtttttgccgtagcttgacacacattgcttgacactgagaactgataggatctctgagggagaagacagaactaagtccacccttaacctaatccctccattcttgggatgcagagagtatttaccgaaacattcatgttcgaagccaggtgtggtggtgcgctcctgtagtccagctactcgggagactgaggcaggcagatcttttgagcccaatagttctaggctagccttggcaacatagtgagctgtctgtaaaaacataggtttgaaaaaacctgtaacatgttcgtgacctcctgaaagaagtcggaagttgcagtcattcgagattttatgtaatataagctatagtaactatgctgtggatataaattagaatatattcgtatcttttatttgcaataaatgtaaagctgaatcttagaatttcaaacggataaattttaacagcactattcccagggcttttttggtagtgatagaaaagtgtaactgttgagtttttccatattggcaatatactgccaggttcccttatggacagaatgaatcatcggctgggtgcagtggctcatgctgctaatcctcaggaagattgtaaaccttaggacgctgaggtgggtggatcgcttcagcccaggagttccaagaccagcccgggcaacatggcaaaactgcctctctacaaaaaattagcctggtttggtgacgcgcgcctgtaatcctagcctgtactcaggaggctgaggtgggaggatcgcttgagcccaggaaattgaggctgcagtgagccttgagcatgccagtgcactccagcctgggtgacagagtgagacctgtctcaaaaaaaaaaaaagaaaagaaaaagaaaaatgaatcatacgtttatactgtactccagaatccccaagtaagtttctaacacaattgtttctattgaccaagcaattttggcattttacactgaaattacagtggctgttaaatttagtctaaactgccctttaagtgttggcaaaaaggagaagaaacagtgtaatttgtaatccctcttctgtgtagctgtcattatgttgaaaattatgtattctttgtctcatctgtctgtgaaacacagataattattacctaccttagtggtcaaaatgactttgcaaagttgtttggaatgtttattactacaaaaaattaaaattttttttacacttaaaaatgcttagtaggtttttaaaaataactttgtgaaaatttagtttcagtaatgaagcatttcttaaaagggcaaccattattatggcaaaatttaaaaatcatttagaaaaagagtactatttaaattggatgcatgtgagaagactatttgaagaacttttggagaaagaaaatctaaaaacagttgtttttatttgtctagaagtaaggtttagtttatgcttctaaaatgcctgtggctgggaaaagcttataaagcataaggagaggaggaaaccttgagggattgcttgaatacttaaaaatgaggaatgcctttaaaggcaaaatagaaactgtctaaaagaaatatgagagccctgtttgtaattttgagttgtctgatagccacattaaaaaaagtaaaattaaagatgaattaattttaatatatcctagaattaattttaataacgaaatttatatattttaataataaaatatataaaatttaatactattttattaagtatattcaaaatatttcaacatgtaatcaatatcaaaattattgaagtattttacatcatctttttgtactgtctttaaaacccagtgagtattttacactttcagcacatcacagttcagactaaccacgttttaagtgctcagtaaacagtgactactcaattagatagtgtagttagagttagtatctaagttataaagaatttttacaaaccagtatacattccagtaggaaaatggacaaaggaattgaatacaaagttcataaagttgttcaagtggccaataaaaatgcaaaaatgttccatactgaaaaacagagactttaaagggttttacttctcactgcctatttcattttggccgaatttttcataatgataataccccatattgagggtgtgggaaaacaggaactctcttaactactgattgaaaacataaacggtttatgccctctgacctaacagtttttactcaaaaggatttactttaaagaaataatcaaaatacatattaaaatgtttgcagaagtttattatagtaataaattggtagttcatagttatggagagtgggaaactgaaatatattatgatacctttattatgggctggtgatgtatacaaccatttttttaaaaaattataattcagggctgggtgtgttggctcatgtctgtaatcccaacactttgggaggccgaggtagggggatcacctgaggtcaggagttcgagaccagcctggccaacatggtgaaaccccatctctaccaaaaatacaaaaactagctgggcatggtggcgggcgcctgtaatcccagctacttgggagactgaggcaggagaatcacttgaacccaggaggtggaggttgcagtgagctgagattgcgccactgcactccagcctgggcgacgagcgaaactccatctcaaaagaaaaaaaaaagttataatttagaagaatagtgacatggaaaatactcttgtgttattaggtaaaaactgtagaaaaatacagtgaaaatatatactgtgatattaacagtgagtttgtctaaaaatttttttatttgtgttttacaaatgatctacagtacacatatacttctaaagaataaaaatgttacttagtttctgtagtaagtatatccttttttataaaaagttctttgggttaggatagagcacatatttctttttttcatgtatttataccttgcctcatttggcaaaaatttgagaggggaagacacttaagtatactagatgaacactgaaattaataaaagtgtaatttttaaatagaaaatagaaatcaaacatactatgttattattgtctccaatctgctagtatttattgtcataagaaaagtaggctgagaatttaacttttatccccagcagaggtccctcctcctcctcaacctctttaaataactaagagtattgacagttacaaaagaccagtctggccaacatcgtgaaacctcatctctactaaaaatacaaaaattagctaggcatggtggtgggcgcctgtaatgacagctactcaggaggctgaggcaggagaattgcttgaacccgtcagatgtggtctcaaaaaaaaaaaaaaaaaaagaccatttagactgtcaatgctcttagttgtttaaagaggttggggaggaggagggacctctgctggggataaaagttaaattcttagtctgattaagagagcattgacagttataaaagaccatttagggctgggtgtggtggctcacacctgtaatcccagcactttgggaggccaaggtgggcggatcacctgaggtcaggagttctagaccagcctggccaacatggcaaaaacctgtctctactaaaaacacaaaaaaattagctgggcatggtggcaggcgcctgtaatcccagctacttgggaggctgaggtgggagaattgcttgaacccaggaggcagaggctgcagtgagccgagatcgtgccattgcactccagcctgggcaacaagagcaaaactccgtccccccaccaaaaaaaagaccatttaggcaggcagacaggaagattctatgcagatcaagttcatgatagaatttattgtacttaagtataaaatgaagctaactgtagtatgtgcctcctagagtttttgtgaatgagaatcattcagcattggatgccaggcattatagttgctgatagtgtagtgctgaacgaggtggatggtttccacctttcttccaccagaaataaatatatttaaagtgccatagaagagataggcaggatgatgggctagaaagtagccaggatgggctatttcattcgataagatggcctaggactccagcttttctgaggtaatgactgagcctaggcatgaaagatgaaaatgagcaagccacgtgaaggtctgggagaaagagcaatttgggaagagtaaagaggaactgtaaagatcagactagtatgtatatatgtatgtatttttgagaaagggtcttgctctgtcacccaggctagagtgcactgacaggatcacagctcaccgcagccttgacttcctgggctccagtgatcctcccacttcagccttctgagtagctgggaccacaggctagcgccaccatgcccagctaatttttatatttttgttagagactgggtttcaccatgttatccaggctggtctcaaactcctgagctcaagcattccacccatctcggcctcccaaagtgctgggattttaggtgtgagccactgcgcctggcccagacaaatagttttaaggagcagaaagaaacctgttgtgtctagggtatggtggggtggtatgaaaataaatttgagtttttttattttttgtggttttttttgagatggagttttgctcttgtttcccaggctgaaatgcaatggtggatctcggcagactgcaccctccacctcctgggttcaagcaattctcctgcctcagcctcccaagtagctgggattacaggtgttagccaccacgcctggctgatttttgtgtttttagtagagatggggtttttccatgttggtcaggctggtctcaaactcctgacctcaggtgatccacctgccttggcctcccaaagtcccattacaggcgtgagccactgcacctggccgaaatttgagtattttaagccataggcttagaaaaagaggagtgttttaaaatatcactctggcccagtcgtagtggctcatgcctgtaatcccagcaaaatttgggaggccaaggtaggtagataacttgagtccaggagtttgagaccagcctgggcaacatggcaaaatcccatctctacaaaaaaaaattaaaaaatgtagccaggtagggtggcacacgcctgcggtcccagctactcaggagtctgagatgggaaaaccacctgaggctggggaggttgaggctgcagtgaaccatgattgcaccactgccccagcctgggtgacagagcaacaccctgtctcagaaaaacacaggtgggtgcggtggctcatgcctgtagtcccagcactttgggaggccaaggagggtggattacctcaggttaggagttcaagaccagtctggcccacatggtgaaaccacatctctgctaaaaatacaaaaattagtcaggcgtggtggcacatgcctgtaatcccagctacttgggaggctgaggcaggagaatcacttgaacccgggaggtagaggttgcagtgagctgagatcacgccactgcactccagcctggatgacggagtgggactccatctcaaataaataaataaataaataaataaataaaaatgaaaaagaaaaatagaattaagcaaggcagtagagaggtatgtcaagatgcagtctaggaagttgtcatcatctcctattgtttcctaactcaaaaaaaaaaaagattctctgttttttactctgctctggcgaaaagttacatcagcagtggtcttctagactgagctactccatccaggtcacacttttgcttgctacatgattaaggataaaaaggattttcctgtagttttggctagctgaaaggattaaagtaaaccagagatagtcaatctgttaatggtagactatattacaaattgtgataatgatgttaataagaccttgatgaagttccagataatttagctatggacacattcttaggttttttttttattattatgggcattttttttaatacagggaaagtataaggtataaagtaaaaactatgcataattcagatatttcaccacatttttagtagttgaaatcatactgtataagtcttccgctttttttatgcaacattataacatgagtgtttttccttgttattaaaagtttttaatgaatacataataaaagtatagttacctgccgtaatttaatcattcttctattagggaacatttgagttgtttgttttttcctgtgataaataataccatgaggaatcatctttgcattctatattatgtattttaaattcacacttaataacctctttaaaaggttatataacctcttagtaacctctttaacagttatttagctttcatatattactgccttagaaattttggaaaagaattattgaaatagtctcttaagtaaggagactgaaatctagaagacaggctgcaagcttgactctggctctgaaattagccggaaataaactcacgttgcaagaaatctttttgtttatttttagttgttgttgcggaagcaacgtatacagtagactgagttgtcagtttgtgtgagagaaaaagagtgtctttttgttgttattcgtagcctaaaaatgatggccagattttctctggaagccagagtagtggtaggtgacaaaccagattggagagagagaggacaagtagtgatcactggcagtggccattaggtcactagctacagaggccatgagagtaaaataaagacggagaagtgtggctgttctgagtagactgctgataggataccagtaactctgcagtcttgaagacacagcccttatatacacagccataaggaagttcttgtccaggccagtagaatagtaagtgccagagtaaagacttcgatatgtagcttgtttagaagtcaccttgaaaaaagaatattaatggtgggtaatatttttcactatctctttgcttactggaattaatgaattcagtaattctttttttttgtttgtttttgagatggagttttacaccgtcaccctggctggaatgcaatggcgcgatcttggttcactgcaacctccgcctcccgggttcaagcgattctcctgcctcagcctcccgcatagctaggattataggcgcccaccgccacgtctggctgatttttttgtatttttagtagagatggggtttcactatgttggccaggctgatctcgaactcctgacctcgtgacctgcccagcttggcctcctaaagtgttgggattacaggcatgagccatgcaccctgcggaattcagtaattctttaaccagtggttgtgtttctattgctatgtgttaggtattatatttgttttattgagttaaatgtgcttcagtatagtttttataatatacaatattaggtggtaaatgtatgtgccattttctgtctcgtatgaatgccaaatgtgtacttttaaagttgctgttacctgaatttctactggtgttaaaaattaaggacttttcaaaacagccagcaagaaaaagctatcaaagattatgaagatagtgtcaaaagcacttaggagtcaattttaagaggcctctactggcccaaaatagaacagtttgagcattagtcaggataatgactaaactagattgaaaaatgccaagtaatgtttaaatttatgaagttgtaatgatatacacacaaattaaaaatgtgtcactattacaggaccttgggtaattaacgtattattttgagaactggtaaataaagggaaagaagcatttagtctgactttcctatatgaactacttttctgaataaccaataaatgatggatattttctctttgtagaaatattctgagtagtaaatgaaggagtaataaaattggtatcatcactttgtaaccacctaatgaataaatgattctaagcattgaagaacagtagacactatgatcacaaataaatcaaccagttactgtgtggttcctgatgaaagaactcatcaccacttaacaaagtagtgttgacctaataaaaatagcctgaagttagataaagcctttacagccattgatttatagaacatacagaagaatgggctaaacaataccataggaattcagtcagcaaaattcagcctgggaaactaccaggacaaaaattcaggacaaacaacctggctttttcaacataaaaattgcagttaaaaaaaaaaaagacattctgtagcttaaaagagacttaaaagacatctcaattagtcccaatatgtggactttatctggatctattcacatagaaactggaaaaaaattgtaacatttgtaacaactggaaatttgaaattgagaatatttgatattaaggtttttttttaatttctggtaatggtgttatggttgtgttaaagtttttgtctcttataaatacatactgaaatatttatggatgaaattatatctgagatttgcttcaaattaatattggtgcaggtagagatgagatgaaattgtccatgagttgatcattgttgaaagtaggcaatgggtacgtggcagtttattgtgctggtttttctacctttgcatacgtttgagattttctgtagcattttaaaaacaaaagagaacactgaaaaaaatctagcatcaagtcatggaaatgggtcgtcttccaaggaaggacttttaaactgtggagtaatccctctttaaacatcttagcacaaattctatgaaaatatttcatcagtgtatgaaaaaaaagttagtggcatattgtctttgtcaggtaataattacagaagatattttgaatagggctgaacagtcagaacaccagtggccaggatgaagaagatgcttttctggagtgtgtttcctatgaaaatctgctttagcccatatttactaattatttttgctagtaggcagcatattttaatgtgtaggaatcttctgctgttatatttgctttactgaccctttaaaaaatagacacaaatgaccaaaaacattataggccttcaacagtttctcaaataagtaaaagaatcagttcacatcagaaagtttttcaagaaaataagttctaggccggaaacttgagtgaatacttatgttcccttatgtcctttgtgctcttcatattattttcaacattcataataatttatgttcctgatgaattctctgagccattaagaaatggcttttctttcagaatgcatatatctgcacacacaatccatgaattaacatttttggaagatcattattaagcacttacaaaagtttcaactcttaaatgcttaaccctccatccttggaaaaacttgactatctgtaatgatgtaatttgatttcacctaaaactttacaaaatatatgaatgatatctatatagggtttttgggttctttcaaaaagaggaattatcagtactcatggtaaaaaaagagaaggagggtcacaggaaaataggaacaaatttggttttctagtacttgggtaaattgtggaatatactttccttctgtatttgagcccttcaaagctcacagtcaacccagatgaagcagctgaagtgctttgtaattagtcttctattcttcactcaattaaaattccccatttactgaggcatctcaccaaatgttgatctaattatctgattaaaaaatcggtgacagtatgaatgaatgattaatataattcacttgattgtgaaatgaaagaggaataaatctttagctagtggaagaaggacacaggataattttgtgtaggaagtcttcctgaccttccctcccagagtcctttattctgaaaagtaattatgccaacatttttttagcttgcaaccaacatgcaaaataaagagtatctattatgtactatatacctttcaaaatagctgaatagcataaatattttatttgattttttatatttttaaaaatttccaaataagtttacaagttagagaaaattagaatgttgtcactaatttttctttacaaaatggtatttcatgtgtacctagaagcagtgaaacacctctggagagggtggcttggcaattaattatgcagctaggacttggtttgaaattaaagtatatatattttttcttttagagtggcagaatttagtgacatttggaagcttttcaaacatggttccctgtagtcatccatatattggtaccctgagtcaagtaaagttgtactccacaaatgttcagaaagaaggacagggatcacaaacactcagagtggaaaaagtaccatcatttgaaacaggtatgtgtaatttttttaatgtacttttttctgtatactggaatagtttgtgtaaaattatttgttccctggatgtttgatagaacttacttataatactgtctggactgatgttttctttgtgggaactattaaagcacttatttaatttctttattttttctatttctttttgactcagttttctacgaaaaactatctacttatctacttaaactaaaattttaatttattggtataaagtgtataataatgttccctgtttactcccaatagcatatgtagttatgtccttttttcattcctaatatttgtcttattttcttggctagtcttcccagaggtttgtgttttattatttttccaagtaatttttttttactttgaaccattatatgtttgtatcctatttcgtcaatttttactttttaattatagcctcctttctgcctttttttgggtttgttcagtcattattttttgttttgttttataacttcaacttttgtttagattcaggagggtacatgtgagggtttgttacatggtattttgtgtgatgatgaggtatgaggtacacgtgatctcatcacccagatagtcagcatagtaccaaatagtttttcaaccattgctgccctctctctctctccctcatctagtagtccccattgcctatttttgctatctttatgttcatgtgtacctagtgtttagctcctagttataagtgagaatatgtggtacttggttttttgttttctgtgttaatttgcttaggataatggcctctagctacatccatgttgttgcaaaggacataattcattcctttttgtggctgcatggtattccatggtgtatatgtaccatatttactttatccagtaccccattgatggacacctaggttgattctaagtctttgctattgtgaatagtgctgcaatgaacatatgagtgcatgtgtctttttggtagaataatttatttctttttgatatacactccctgatgggattggctggagttctttgagaaatctccaaactgctttccacagtggctgaactaacttacattcccaccagcagtgtattaagtattgacttttctctgcagtctcactagcatctcttgttttctggttctgtcattctgttattaattgtcagttagacacttagtttattaacccttccttcctttctgaagtagacatttaagccatgataacacatcccacagttttgatatataatatttttattatttgtaaatctaaatgtattcttatttctattgtgattcttctatgactttttagttgttaaagcatcattgtaaatttacagatagatggaatttttgtttatctttttgtatttaatgtatttcacaaaatgtggtctgtattgattcagtcttgaaatttgttgagtgtaacattttagtttagcaattggtcagtttttctaaatggttttcctgtgcttgaaaataatgtgtatttttaattgctggtgtggtgtttatacacatcaattcttatttttagttgttcagtacagatctttgtcctgttttaaaaattcattattaccaagggagatgttggagtatcacactctgatggtagatttgatggtctttttttatggttctgtaaatttttgctttttataatttgaggctgtcattagatacatacatatttagaattattacctaacactgatgaattattccctctatcattgtgcagctactgtttttctttagtgagctctccactacatttcttttggttactattttcccatcctttgattttaacttaattttgtcttaatatgatcatctctgtcttttaactggaagtttaggcagtgtgcatttactgtaatcactgatatagttaaacatatttctaccattttatcatgtttccttgtcctgttttcttaaattccttttttgcctttaattttttttctcattccgtcatcctttctcctctattctctttctctcatttgaaagttttagactctgtgtctgtacttcaaagcctaaagttaattgataaatttactttccttctgaaaaacacaaaagctttagagtgctttaattctgatcaccgcctccaacttatgtgctatttgttggctaatattttctgtctattctgctctttctctgctataaagtatgcattgttgcttgcttagatttattcagaatctttgttagccaccttttcttatgtctgatctttctgtctgatgtacatcctatacaagttcgtttagctgaggatcttttgtgggaaaggcacatttaagatgttactcgattgttttttggcttccactaattgttgagaagtcagatattatgcctttgtttgtatattttttctatttgacagcattttaaatttgattagctttaatttgaaagtctttttctttggtataaatggcagttttattatgaagtaactaggtatgtatttctttgtatttattctacttgagatttgttgggcttcctggatctgaggattgatatttttctacagttctggaattctacaattctcttattatcccttcatatattacatcttcccatttctgtattatctccttctggaacttcaattagaaatatgttacatcatcttatgtttttcatgtctttaaacctctctatcgtattttctatttctttacctttctggcctgcattctgtattatttcctcaggtctaccaggatcactaatttcctctttagttgcctctaatatgctggttgattatgtatgttgggtttttaacttaaatgattatattttccttttttttttctttttctttttttttttttgagaccaagtctcattctgttgcccaggctagaatgcagtggtgtgatcatggttcactgcagccttgacctccggggctcgacctaccttagccccctaagtagctgagaaaacaggtgtgtgctgccacgcccagctaatttatttttatattttgtagagacaaggtctccctgtgttgcccaggctggtcttgaactcctgggctcaagcaatcctcctgcctcagccttccaaagtgctgggattacaggggtgagccactataccggccatatttttcatttctagaaattgttttttaccttgcttggttggtctttaattccttggttgtattttcagacttaccttttattacattagatacgttaaacatagctattttatatttttaacagaaaattctgctatatgaaatctttttgtttctcactatatgagacttttcttcccttttttgctcttattcatgatgtcgtacctgtgttttataactgtgagttcttcattttccatgatgtttttgtatcttgaaagtatttgatgtttatctggactgaaaatgactttctgcctggaagggtttgtttttgcttttgtgtgctactctccagtagcattattgggaccacattaaattcagttctctgctttagatttacattgtgaattcagactgtaacttgtgttagggttcacttgtctgtaggattttcagaggagtatttttttcttccccactatttaacaccaaaatacagataggccagcttacttgctgttcccttctatgtgtattatttatttctagttcatagtgatcccatggctgtggctttttacctcagtgtcccctgttagactccttatcttggcagaacctagtcttattctctggtcttccatgcccgttgtagctctggaggtagaaataagctcaaagaatccaagcttcaatagaaatccggggaaagctggctttgatatgttcatttgttctgtagagattctgctttcacttcatttttggccttttcgtatcattttttgctagactaacaatgcatttaaaaagattttgcttggggtacaataaaaggaagcattaaaggaagtcctttattcatttattcattaatttactcaagaaatatttattgagcactttttatatggcagcaaatgagaatgactcagagttgattactaaagcagaaaattaagcaaacaaatattgtattgtaacatttagccctgtattcatgtgttcagcatctgtggattcaaccaaacaaggattaaaagatttggggggaaaatggatggctgcatctgtactgaacatatacagacatttttttcttgtcattatttcctaaacaatacagtgtaacaacggtttacttagcatttgcattgaattcggtattataagtaatctagagatgatttaaagtacatgggaggatgtgcataggttatatgcaaatactgcaccattttataagatggacttgagcatccatggattttggtatctacagggaggtcctggaaccaatccccaacaaatactgagggataaccatactgtgataggggaaattcattaatggtgctgcaggggcacataggagaggcacttaactgagtcttgagtggttaggaaagatttccataaggaaatgatacctccttggagacatgaaagaaaagtaggtattggccaggtgtggtggctcacacctgaaattctagcactttgggagaccaagtgtgtggatcacttgagcccaggagttcgagaccagcctgagcaacgtggtgaaactctgtctctacaaaagatacaaaaattagctgggcatagtggtgtgcacctatagtcccagctactcaagatgttgaggtaggagggtcaccttagcctgagaagtcaaggttgcagtgagccatgatagtgccactgcactctagcctgggcaacagagtgagaccctgtctcaaaaaaaaaaaaaaaaaagtaggtatggatgtgtggtgaatggtggaaaaaggaggtaaaattcctggaatagtgagtagaggatttggcggtggggttggtagtgttgaaagtacaagagacggtgatccagcttccatattccttttaatttttttctactgctctcttgcttgctcactatgtttcagccaaagcagtctccctttttctcagccatgttctgagaaaatggcaagagttaagcactagtcagatcggggtcttgtttgggagtttggactttgttttgtaggtagtgggaataacagagtattattaatacaagtaggggaggtacttgatcagatttaaggttttagaaagataactagttgcaaaatgtcaaacaggttgcaaaggagggagattgaaagtagtagtacaaatgaaggtctggagtagggtaataataatgcttttttttaaaggagtagatgaccttaagagatctaggagctgaataattaggacttagtaattgaatctgggggatgaagaagagggtcaagccaagggcaatgcttggttactgtttggccagctgtctagatgatttcattgatttctaaaattaggagtaccagagctggagtatattttaatgagatgatggcttggtttgcacatctgaattataggtgcctatggaaggtcttaacagatgatgcagtgaccaataggcagttggttatccagtgaatctactagtcactgcatcgtctgttaaaatgtcacacatcaggtcgggtgcagtggctcatgcctgtaatctcagcactttgggaggccgaggcaggctgatcacgaggtcatgagatcaagaccatcctggctaacccggtgaaaccccatctctactaaaaatacaaaaaattagccggagccgggcatggtggcacgcacctgtagtcccagctactcgggaggctgaggcaggagaatcgctcgaacccaggagggagaggttgcagtgagctgagatcgcgccactgcactccagcctgggcgacagagcaagactccatctcaaaaaacaaaagatgtcacacatcttaacacaactactatcctacttcaagatatcattatctcttgtctgatttactgtggtagtattctccctgggatctctgcttccattcttgtccttctgtagttcatttttcacgtaacaagtgtggtctttttaaaaacagatcatgtcacttttttaattaaaactctccattggcttctagttacccatagaacaaagccaagactgctagaataaaattaaaatttactattctgactctcaaagttctttctagctgatctggcttccgtattcctctttattttcttctgctactctcttgcttgttcattatgtttcagccaaagcactctccttttggttcggagaaaatggcaagcttgttgttatagggcctttgctctagttgcgttctctttccaaggtgcccttctccacatggctcagcctcttctggtcattcatatctcagtttaaatgtcagctctgcatagagacattttaaaatcactcaacctaaagtagccacccagtaagtctttaatactaccctaatttaatttttggcataggtagcacttactcctgattgatgttttccatattttatttcctcatcacctacatgtttgcaagctccatgacagcatgaacctcagtgtcttgctgatagtagggacataataaatatttataagtgagtgaatgcttagagttctaacctggaactaaagatttaggagtttttacctatacatagatggaactgaagccatgggtctgtttgggacagtgcagggacagtgtttagagtgaggagagatcttctagtacaaaatcccccacatgggtgagggacaggtagaagaggagcctgcaaagcagacttgagaaggagtggctggagaaaatccagactatctggtgtcaggagaagacagtgtttgaagaataataaacatttcaagaccatttttcctttagttagatgtctttcacaggggaagattttacagattccttgagaaacctgtatacatttaatggctccttgttttcattctttttcctaagcctcatcctccctttgggtttacctgtgcaatttcttctctttcttttgtggtgatggagaactgctggggtaaatattgattgagagtttgattttatgcaatgaaagaatgcagagtgtaatgagtccctaagttccagaaataagcatgtttattagaacacagttaagggaaaagaaatagtgatgaaataatataattaagggtaaaatatgttacaatgctctgcagaggtgaacacagactcaggggaaaatatttaatatggttccaccattcagaatctttcaaattgaaatccatgattaagtttcttttttctctgctgactggaataaaaatgttagtttattttcttatattagaaatacattgtttattgacagttttattttgggctcaatttttcagtacttgcttaggccacattagaccttgttagccatcagacagagtgcaagtaattgcttgattgaaagataatttgtatatttaaagatttgagattgagttttgaataattcaaatcacatgataaagtcaggaacagctcattaagaagcagagacttgctaaggaatccttaagtttttaaggagcattcagatttgttaaattttagtaaaattagttttaattttgctaatgacagcagatgtgtggcaaacagccagggtttgagcttaaaacaaatgtctagcgatattcatggatagaatgtttggttactgattgaaatcataaagattctactgcagtgatgcagtgtgagtttattaagttggtgctatgtaaaataagtattcatacatgtgtttaagccatttactagcattcttgtttgtgctgtataacactatatatttagtaacatctagacagtttgtagtgagaagaatatccagaaatatacagcttaaagcaactcattttatgtgattaagttcaataatgttgagcattgtagaaactagggttgtttctgaaacttttgacagtagatatcagttgtttggacattaggtaagttttgaaaatgtattattccacctttttcccttcactcctctctgccctgctctctgtttcccaaagctaaattgtaagaaatggatgtgtaggttctatagataaagatactttagaatttgcttgctgtgtagcgagacaaaaataaaatcataataatttaattttttaaggtcaaatgtagttactaaatagaagtgtttttaagcttatcttcaatttactagtatgacatcataacctacttaggatttggcaaacacttaaagcctttttagattttctgtacatgctttaggtatcaaaacgtactgtattttggtcaagtgaagtggctcacacctgtaatctagcactttgggaggccaaggtgaaggatcccttgaggtcaggagtttgagaccagcctgggtaacatggggagggagaccctgtctctacaaaaaataaaagaattatccaggtgtggtggcatgtgcttgtagtcccagctacttgggaggccgagacgggaggatcacttgagcccaacaggttgaggctgcagtgagccctgattgtgccactacactccagcctgggcgacacagcaagatcctgtctcaaaataaaataaaataaaataaaataaacacacacacagtatttggtcattttcctagtggttttcactgaaaaacaattgccaagaaatatactaaaaattacctgtaaaatattttgcttttatttcaaatagggctttgcttttgttagtgcttaatatattggcatttaattgcttcatataagctttgaaagaggtaactcaatggataggcagaacttctgatcacagtggtattgtgaatacatactttgaggcatgtgttctactaaccactcattggaataatagataaagtataaaaagagaaaattgaagacatagttggactaaaaaaagacatgttatatcaaagaaatggaacagaagcatctggactctgggtctgtaatctgggagtggcagctaggagtttggcttgtttggagtaatatgctacatgtgctatttgaatagcaaggtactggagtcagactcactatttgaacttatccacccacccccacagaaggagactgaaaatagctaattccagttgctacctgaggctgtgtcttacaggaagctgtaggcctagggaggcaaggagaagaccagtgtactagtccattttcatgctgctatgaggaaatacctgagcctgggtaatttatgaagaaaagaggtttaattgactcacagttccatatgactggagaggcctcatgtggcagaaggcacctcttcacagggtggcaggagagagaataagtgcaaacaggggaaatgcaagacacttataaaaccatcagatctggtgagattcactcactatcatgagaacagcatgggggaaactgctgcgtgatctgattacctcctcctggtcctgcccttgacacatggggattatggggattataattcaaggtgagatttggatggggacacagagccaaaccatatcaaccaggaactgaaacttgctgtttcctggcttagagactggattgaggggaaggaatttcaaactggcaatatgagatcaaactggcaatatgagttttgcatagaggtattagaatgaactctgagcacaagaatgtgaagaggagaatgaaaggatataccctattcagggtaagatggtgaactctaaaatttcaaaatacatgaagaatcctaatgctacgaaagccaatagaatcaataaatgtgaattaattccagttgaagctaaaataacagcttcaattgctttaaaataagtttaatgttctcaaaaggttaaatgaaggactcatattcattaaaaatgacagggaattttgaaacacaaacttgcagaaataaaaccagagcaaataattaggaaaaggagacaattagaaatcttagaaatgaaagtgtagccactaaagtaaaaatgtagtagactaaatagtcattgtcagtaggagagttagtaaattcaaattcagtctgaaggcacataggaaggcaaaaagatattccaaaaattgaaagcatttaagaacttgcagctctagcctacatttaataggtagagaaatggtgaggaatcaatatataaagagagatgagaatttttcagaatttgagaaaaacaggacttctcagatcagaaatatgttttgagtaccaagcaggataaataaaaagaaatctacccctgacactttgtagagacaccacagatttaaaaaccaaaacacgaaacaacccaacttaaaagctgacaaagagaaaaatcagaatactatcagcctaattgttgttctactgaagtagactttttacctgcaaaaatatgcagaaagcaaagatgggggagtgatttggaataatatccaggaaagagtaagaggaaaaataaatgctactctggaatttcatagtgatctaaataatcattgtagagtgaaggcaaaaataggaatgttatcatacatataaagatgaatgtcattttaaaaaaagcttattttctaaaattttgggaggtacatagtaggtgtatatatggagtacatgagatgttgtgatacgggcatgcaatgtgaaataagcgcgtgatggagaatggggtatccatcccctcaagtatttatcctttggtttataaaccaattacattctgtaagttattttaaaatatacaattaagttattactgactatagtcaccctattgtgctatcaaatagtagatctttttctatttttttaatccattaaccatcttcatctctcaaagatgagagtcattttactaaacaacccctccacattaaaaaacaaacaaacaaaaaaaactattaaagcatgtacttctgcaagatgcagaagaaacctggagttacagaagggaaaggatgaaatatccaagagacaacaaagaacaagaaatggataaaatgtcctggtaaaactattgataataaaacagtaaacttttttttaatattaaatgctaaaactataatcaaccaggctcagtggctgaggcctgatactataaccaggctcagtgactcaggcctgtactctgagcactttgagaagctgaggtgggaggatcacttgagcccaggagtttgagaccagtctgggcaacatagtgagacttcatctctacaaaaaatttaaaaattaactttgatgtgatagtgttcacctctggtcccagctactagagaagctgaggtgggatcacttgagcccaggagttggaggtggcagtgagctatgatctcaccactgcactacagcctgggtgacatagcaagatcctgactcctaaaaaaataataataatagtatgatggaagacatttagatcactatgaaattctagagtaacatttatttttcgtcttactctttctcagatactactgcaaatcaccccctacccacctttgctttctgggcaacaagaaaaaaactgtggaggaatattaccagatttcaaattatactacagggctttaataatctaaacagcataggtttaggttactaaacctaaatcctttatgctgttttactgttataaagacagacacataaaccaatggaacagaatacagagcccataagtgaatccatagatatacagtgagctcattttcaacagatgtgccaaaaacatacattggggaaaggactgtctattcagtaaatggtgctggggaaaactggatatccatatgcagaagcatgaaactagaccccttctctcgccatttacaaaaatcaaatcaaaatggagtaaagactgaaatctaagacctcaaatgatgaaactatttaaagaaaacattggggaaactctccaggatattggactgggcagatttcttgagttagatcccacaagcacaggcaaccagagcaaaaatggacaaatgggatcacattaagttaaaaggcttctgcacaacaaaggaaacagtcaacaaaatgaagagacaacccataaaatgggagaaagtatttgcaaactattgatctcaccagaatatataagaagcttaaataactctatgggggaaaaatctaataatctgattaaaatgtggacaaaatatctcaagagacgttttcaaaagaagacatgcaagtggcaaaaaaaggtgtatgaaaaagtgcttaacatcattgatcatcagagaagtgcaaatcaaaactataataagatatcatctcactccagttcaaaaggcttttatccaaaagacaggcaataacaaatgctagtgaacatgtggagaaaagggaacccttgtacattgttggtgggaatgtaaattagtgcagctactatgaagaacaatttggaggaccctcaaaaaaccaaaaatagaactaccagcaatcccactgctaggtatattcccaaaagaaaggaaaacatacaaaaaaattagctgggtgtggtggcatgtgcctgtagtcccagctactcgggaggctgaggcaggagaattgcttgaacccaggaggcggaggttgcagtgagctgagatcgtgctgctgcactccagcctggcgacagagcgagactccgtcgcaaaaaaaaaaaaaaggaaatcggtatatcagaagagctatctgcattcccatgtttattgcagcactgttcacaatagccaaggtttggaagcaagctaagtgtccatcagcaaatgaatggataaagaagatatggtctatatatacaatggagtattatttaagcataaaaaagaatgagatcctgtcatttgcagcaatacggatggaactggaggttgttacgttaagtgaaataaggcaggcacagaaagaaaaacagcacgttctcacttatttatggagctaaaattaaaacaagtaaattcatggagagagagagagtagaatgatggttactaggggctgggaagaatagtgggaggtggagagtgaggatggttaatgggtacaaaactgcagttagatagaatgaataagagctagtatttgatagcacaacagggtgactacagtcagcgataatttattgtacatttaaaaataactaaaagagtataattgggttctttgtaacacaaacgataaatatttgagatgatcgatgctccatttaccctgatatgattattacactttgtatgcctgtttcaaaatacctcatgtaccccataaatgtttaatgtgtacccataaaaaattaaaatataaaagcaaatttaaacaaaaacccaaaaaataataaaaagttttttttaaagaaaaataatgttaaacaatagaaatacagtcttataaattccaaatagcaattgggggattggatgggaggcgaatatagaaaactttttcaatctaagagatggagacggcaggaaaagcgaaataaaaataaaagcaaagaaaacaagatggtaaactgaaaacaataagatggcagaagtacaaatgtaccacagttaagtagtcagacttagtggtgttccatatcatttaaatgaactcataatctaaatatgtggaattagttaatttctgtttcattccatgttttcagagacttatattctggatcccctactaccccatctgctcaaggactttgcttttgggattatcctgttagcctactttatattttcttcgtggttattgcatcattcctatctctatgtaaaatgcagtcaacctttccttgattcattctcttcagctcctgctgaaagtccaaataccgcttccatttaatctcctattttctcctcaactattgtgtccattcccattcttgtccagaaactgctgttttcaggaggttccagtgatcttcatgttggtaatctagtatctattcttttttttaccacctagaaaaatacacaaatacctacacataaaattaaatattgttctaaacacaggcaatacaggaaggtggttaagagtgtagagtaatcaaaataactgtgcctccatgtttaaaatactagctgcgtgactttgggagaatttacaaaacctttctatgccccagtttcctcataacaaggaaaactggctctgtgactttgggggaagttataataatctctgtgcctcagttttctcataagatgaagataatagtattttcctcagagcaattttgtgacaattaaatgaaataatttgtaaagtgcataggacagtacatggcacatgttaaatgcttagtatatatagccattcttcataaactctgaaatgttattgaatgaggatataaatataatggaaaatgttttaagggtgagatttttacaatatatttgatacatacaaaaggatattataatacatatgtaagttaacaacataataaaatcaaaccttggaatttactactcaagctaagaacttcactgtcttgatcacatcctcctatctccatttgtcctatgtatccatgtgaaaaaaaagaggaaatagctttatacatttgtatatagccctgattatttacttttgcttgtttgtgaacttcgttgtgatagcttattgtatatattcttttgtgatttacttttttcattaaatttagttgctaagatttatcttattgattggtgtgtgtgtctggttcattaatgttcttggagataattatagcacatactgttcagggatgttgtatgagttaaatgagttgatacatgcttagagtagtacttagcacacagtaaaagctcaaagaaagatggccattattatgtttgttactatgcactgctgtatgaaatgttgtgtgaatataacatggtctatctatctatctatctatctatctatctatctgttctcttgctaatgggcatttgggttgttgccagtttacaacaacagaacagagtcctgctctgaacactcatgtacctctgtccttgtgccctcgtgcaagagtttcttgaagccaaatatattgacctagaagaattgctgggtcataaattatgcttgtgttcaactatagtagataatgccaacttgtttaccaaggtattgtgcccatttatatttccaccagcagtgtatgcattttcattgttccatacccttgccaacattaggtattctcatattttcctttttcttgatctgatggttataaaatagcatcttatgatttcatttggattctattaataatggggcagacattttttcaaatgtttattggttatttgtatatccttttctgtgcaagattgtccttcctattttttctaatggattgtcatttttttgatctagaggacttatttaaatattcttgattacttttgttgattctatttgttggaaatatcttctctcagtttgcggcctttcttttttctctgtttttttttttttatgggattacttgatgaacagtttttctgagttttaatttggcagaaatttatccagtttttcttgtgttgtttatatcttgtttaagaaatctttctgtaccataaaagtattctgtattatctactataaggcatgtaaataccttaacatttaaataattaattaatctacctgtaattgttttttctttatggtgggaggtagattcaaattttttaaatttaatgtgttttttggtaggtgtagggttgtacagttgtcccagtcccacttaataatcattctttattgattgaatggtatctctggtacagttttaaatagaagaactgtgcattcttttgttccttaatttaaaaatgcatttaaacattcaccattaaagacaatgtttgttgtaggtttgttttaccctttaaagaaattcctatttgtcctaattttctaaaagggtttgagatttgcatggatgttgaattgtattaaatgctttttctttagcttctgaaatgattgtatagtttctcttctttaatctgttaatgagataaatagcttttgtaatgtttaactactcttacattcttaagatgaatccaacatggtctgatacattgtcgtttttatgcattgctatattacattggctaatattaattaagtttatagatttatgaaagcagttgtttaatgtaaacttcttttaataaactttacagcagaaggtataggcacagaactcaaagctccacttaagcaagaacctctccaagtaagaggtaaatatattttatcctatttttgtattataaagatgttttgaattaaatatataacattggtttatgtagagctctttatagttatattattctaagagtatagtttattttttacttttatttaaatagattgaccataaggatttattctcttacatataaactaattttctattaaatttattttgcatttttgtcacaaattttttcaaaagcccaagaaaggaataatggcaaataagaatcatcaattgcattatcatttttagaagagtaaggcaattaaagaacaagaggcccacacttttcagctactgcttattcaaatccaggtagagtttggccgttattgtctgactttattttctaggagaaattgaaggaattcctgtttgtagctctcttctgtataacaagctgtggttcccatctccaaagcagctgtttcatggaggcagcaactctatgattaacagcactgtggctttggcatcagataaaactggattaaatttgtggctccagtgcttaccagctggctgaccttgggcaatttacttgacttctctgaggcttagttttctcccctataacgtggtgctgaaaatgagacttcttttctagggtaactttgattaacacatggtagacaattaataacaattaatgttgttatagcagccatcattatcattatcatcctcaccttcatcattaataacctgggccagggttttttagctatttggaagaaatttttttaaaaattttttaaaaatttaaaaggcggtttagagacatgaaactcacgcaaaaaaaaaatctgtatttccttatattttttttcagataaggttttgattttttaattgaactttatttttcaaatattcttattacataatatttgtgcatttaatgtaagtatgtattattttaggaatctttttacccactgtagtgataggtaatcttaggctgaatttgctctttcaacttggaagtagaacagaaaattgtgaaataataaatatgagaatagaacatgaagtgaatagatgacaattcgaaatagaacacataagtttgttattttgctcttgcacttcaggtatttgcttatttatctctatcatatgaccaaaagtctcaccttataatgatttattaacatagaccaatgttctgtaatttttaactcacagactataattgatgccaaattggtattggtattggtgtcgctggcctttttatgagcagtttgatacttgacaatagaaaaacaatttattagaaggcaatatttaacctataatctataataattttttttgtaatttttaactgatgaaattattctgtacttttcttcagttttattacattatgtgaaatggtctagtggctttaaacttttttgactgtaacccacataagaaatactaattagcaactagtatacacatagattagtatatgtaaatgaaacaaaggttttcacaaaaaaataattatatgtagtagtctttgattactttatatttctactttgtatgaaatgctgatttcacctcacagtttgaaaagcactcaactactctgttattttatttatttatttatttattattttttttggacagagtctgactttgtagcccaggctggagtgcagtggcatgatctggctcactgcaacctctgcctcccaagttcaagtggttctcatgcctcagcctcctgagaagctgggattacaggcacccaccaccacacctggccaattttttgtattttttttttagtagagacagggtttcaccatgttggccaggctggtctcaaactcttgacctcaagtgatccacctgccttggcctcccaatactctgtaattttttatcaaaacttcagttcattttcatttagaccctaagcaatttaaattataccaatatgatttagacagaccagtaatacctgttcaaggtgttcattagacaaaggttgacattttgggatcagttatagatgacatatagagacaaaagctagatggctacaaatgcaatttcatcctattctgcacttggataattttttctctgatgtcattcagtgaaaaagatcagttttctgtgaaattcattagtgaagcctcttaagtatcagcctatattcatcttcacatgtgactttcaatgtgcatatttattatgttttcctgttttttgtttagttaaagcagtccttaagaaaagggagtatggctcaaagtacactcagaataatttcatcactggagtcagagcgataaatgagttctgcctcaaatccaggtaatttttttaaaaaatgtagccgtgtgtcatatctaaataatctaaataactattcctttcttagagtgtgttacctgctaccatccatatatggaaaatttgctactggctccttaaaatgaagagatatttttattcagtcaaaaatgttaaaaattgttagcaaactaaactgaatcctgccccagcattagcaattctagtctttcttagtttcttaaacccacaatggtaaattcttcaaaagctttccatcacacaagaatcttaggagttaaattgttaagtcattggtatgtgacagaattctcaataagattatttgcgtatttgtatgtttgactgttttggttttttggccagcagagttgagtacttaatttagtgagttaaatttatgttcatgctcccaactgtgatttctgttgagtataaattatttttactactttccaatatctgttattattaattttctcatatttatatttattgaaattatgttagtcacagatttaaacttttctccctcctttgtgcacgaattagagaaatcagatgatctatctttttttcagtcttcctcattgtcacagccactttggtatatatcaagaaataggtattcctataatttttaacttttataactattacatcaacaaccaattataatattgatttagttctgacacaaattttgtgaattaagtggattaggcattgctgtctccactttaatagaccaggatgagcataatacaagatgttagtgattgacccagctcatttaagtgagtcagtgacagggagaactagaatatatatcttttgaaagctgatccatacatttttactaacatgtgatggttattgatgttttttaaatctaggtttaatttctagaacttgataacattacatagtcacagactttttatttatagattgtttcattgctttaacaaaatttccataggaagatccatgattaaatatagaatgactatttagcagtgacttgatgaatatataagcctttcagaatttaagagaaaggaaaataaataacatgtaattgacacaaactctttatgacatcattcctttgaatggatattaccacttagtattaatctacatataaacaaataatgactgtaaatttttaacttaaattcttaagtagagggatgatattctaatccatgttctttcttcttttcgttttttttgtttgtttttttttgagacagggtctcactctgctgcccaggctggagtgcagtggcacaatcatggcttactgcagcctctacctccctaggctccagtgattcttccacctcagcctcctgagtaactgggactatggctgtgcgccaccacgcctggctaatttttttttttttttttttttttttttttgagacggagtctcgctctgttgcccaggccggactgcggactgcagtggcacaatctcggctcactgcaagctccgcttcccgggttcacgccattctcctgcctcagcctcccgagtagctgggactacaggcgcccgccaccacgcccggctaatttttgtatttttagtagagacagggttttgcaggttgcacagtctagtctcgaactcctgacatcaagtgatccacccacctcagcctcccaaagtgctgggattacaggtgtgagctaccgcaccttgcttatttttcacttttttttttttttgctttatctcctaggccgaagtacagtggcgtgatcttggctcactgtaacctctgcctcccgggttcaagtgattcttctgcctcagcctcctgagtagctgggattacaggcaggcaccaccaaacccagctaatttttgtatttttttttagtagagacggggtttcaccatgttgaccaggctggtctcgaactcctgaccacccacctcggcctctcaaagcgctgggagtgagccaccacgcattacctaacttttcacttttttccccatatattagagatggcagtggtgtgcccatagcagatacaaatacaagtactggtgagggaagtgaatctctacatattatattgtggtgtctacactgagcatcaagagtaattttttttcactgtctctattttttgtatacaaaatgtcatctttaaactgatctttaaaagccattcacatcaatatttctctaagatggggatcagtgttgttgcttttatctgcccttagtaatcctctttaagtatataaactatatgcactttgtctgaataaattcaacatgtttctttctctagtgatctagaacaacttcgaaaaatcagacgacgaagtccccatgaagatactgagtcttttactgtatacttgagatcagatgtggaagcaaagtaagaacatagttctttcagaataaaagtgcaaaccaaattttggattaataaaaatacattttagacagagtcagaattttttaaatgactttttaaaaacaatatttttgtatttgcaaatctgtttatttgtgagttactaatatgtactccttaactaaatatatgtcataatgtgtaagaaaatttgctgttgaatttactctagttgtttagatttcatttggaaaagttcctaagtcctttatgtttctccaaaagcaccttacactttgttgtaagattctcattagagaatttagatttaaatgtgatgtcaataaagtcattaaaattgttcattgtggtgaccatgtgtgtatgcacagatctttggaagtttggggaagccctgaagctcttgccagagagaaaaaattgcgtaaggaagcagaaatagaatacagagaaagtaagtatattcaatttaaagtcaagttaattgaaaaataacttgtagatgagaactgtatctgtaagaactctctagtgctagcatacctgttggcctaggctctgttgcttccagcaaatgctagtttccgttttgggattcaattatttcacaaaaacaggaactgtatttttgttttctcctgtatagctttttgaagatgatgagaggaagagaagctacagtttatcatttttataagacatataactatcaaaacttatctgatttaaagattatacttgttataaaagtgatagaataggaagtaattgctgtattagtctgttttcacactgctataaagatactacccaagactgggtagtttataaacaaaggagatttaactgactcacagttccgcatggctggagaggcctcaggaagcatacaatcatggcgcaaggggaagcaggcgcatcttaacatggtgtcaggcgagagacagcgtgtgtgtaggaggaactgtcaaacacttataaaaccatcagatctcgagaactcagtatcatgagaacagtatgggggagaccatccccatgatccagtcacctcccaccatggcctgtcctcggcacatggggattatggctattataattcgagatgagatttgggtggggacacagagccaaatcatatcaattacttttttacagaagggtctattaactcagctacattaattaattcagcagatatttatccaatacccgctatgaacaagaagctgtgcttggtgtttgaaatgtatatgcaagtaagactcttaggagccaggtgtggtggcacatgtctatagtcccagctacttgcctgtaatcccagctactcaggaggctgaggtgggaggatcacttgagcccaggagtttgagaccaccctgggcaacatagacataaatggggtgataccatacatattgtacatcttgctctttatagatagtggtataatcataaccgttttccatatctacatatagaaatctacctcattctttttaacagttgtatagtaccccattgtatggatgtagcaagatttatgttcttcagtttttcactgttagaaagaatacatcaataaatatttttatttttttaacgtgagataattgtgaatatttacataggattgagtgttaataatacaattttaggatcaaatggcataggcatttaaaaatttgatagatcctaaagaattactctctgaaggaaatatggtaccaatttacatttacaatcacagtgtatgagggagactattttttcatacccttgcccatgctggatattaacaagattttaacttttttgtgtatttgatgggcaacagatggtacctcgtttaattttgaatatctctgactactactgaggttatcttctatgtatagtggtttttcttagttcttctgtaataatttttatatgttttgttcacttttctattagattgtgtgtctcttaaaattgatttaaataagtttttggtggattttaaccaaaatctaaccaagttagtttcatatgttctaaatattttctaacagtctatcttgaaatttggtttctcctctttttagtagggaaatttcaaacatattcagaagtgcagagaaaaacataataaccttttaatgcccatcatctggctttacagctaccaacaacatggccagccttgtttaatgtatatccctctcactaaccttcactctactggattactttgaaaccaggtccagacattatatcattttatttataaatattccagtatatattaaaaggtcaggatgtttgttttagtcagttcatgtgatggtgatggttgaactgttttagaaaagttaactatccattgcctgtagtaagctgtcagtcttagtaatcctctcatttgccctttggttgaaggtctaggatgttctcaaatagctttaattctgacaaagaaagtgattgaccttctgttgatgattccttttcttgacaaaactgaaaatagtatgtctcttttcagctaacctagtcaggaggaataaggagtatatttgtgtgacctggaatatataatattaaatcatctagttgttgaataagtatagttttccttgtaaaatccaagttctttaaatcattggtttggcattttcaaaagtttgaaggagacagtgaatcctagtatcaaaggatttttggcctcagaaaaagttgttgattatttttattttattttatttttcgagacagagtcttgctgtgtcacccaggctggagtgcagtggcgcaatctcagctcactgtaagctctgccttccgggttcatgccattctcctgcctcagcctcccaagtagctaggactacaggcacccgccaccgcgcccaactaattttttgtatttttagtagagacagggtttcaccgtggtctcgatctcctgacctcgtcatccgcccacctcagcctcccaaagtgctgggattacaggcgtgagccaccgcacctggcgattatctgtttttttttaagagatgaggtctcactatgttgcccaggctggaatacagtggctattctcaggtgcaatcatagtgaattatagccttgaactcctgggctcaagtgatcctcctgcctcagcttcctgagtagccaggactacaggtgtgtgccaccgtgtctagctgacaatccacagatattataaagaggactgcacttaaattaacagaagtgaagtatttactttcaatggaagaaatacatactggggacagatagtcctggaaattctggtgtactattcagttaatggtttccattgagtttctttataggtaatacaggtactaacacaggatgcaatcagatagggcatattccattggggaattagatattgccagtgcagttatatagttcttttactcttgggcacttatatatggtaatgtatcaggattaaagtagagatcgatgtactagtatttatgaaaaatgtatacatatttttctttgataatcaggctgactttattgttatctgttaaacgactaacagattttattaagcatcgtgaggtttctcagaagaatatcattgctgctattccctttctggtttgatagaacaatttattttttagtgttcctacttcttatcaatgacactgatttttattagtattagaaagggactgcacttgcttagggtttgagaagttaataaattttgccttgtatggctgttaaaagccctaagtttgttcctttttttttttcttttcatcttctcttttggtttcttgacagtgcattgcaatttagtttttccaacgtgaactaactgccagttcattttaatctttcttaccaccctatttttaatttaaggccctttaaccaaagagagcataaagggtcccttggcattctacatcagggtcagtgtccacaaattgtttatttctagaagtctaattctaaatttacctattaattctgtggggttttttttgtttatagttttggatcttagtgtaatcaattttaatagaggatggcttcctggatagcttacaacaacctatgtccctggctcttaataaataacttttgccggtgttacggcatctgtcttcagtagccagagttggctaactatggcccgtggaacaaattggtctgctgcctgtttttgtatagtttataagccaagagtggttttcatatttttaatgactgacaaaaaagcaaaagagtaacaatattttgtgacagatgaaaattaaatgaaatttaaatttcagagtccacaaataaaattttattgggacgtagccatgatcttttatttacatattgtctgtggctgcctttgcactaccaacagcagagttgagtagctccgacagagactgcgtgtggtgctcctgtcactttgcactgctactcagttacaattcagtaacagttataattcaacagtatttcaaatgtcataggtatccttgtacatgaccttttttttttttagtatgagtgcatacctgtctggtgagtaagaaaagtagacatctagtgttgtgcttttaagtcacagttgagcatggattattttttattgaattagatggcaaagtactgtgtctactatgcagtgacaccatagctgagttaaaggaatacaatatatgttgacattactagattaatcaatcatcacagtattcccaactcacaggagtgtaacaatcagaaaaactagagaatttaagatggaatatattacagcagaatttgttcacaaaaatagaaaatgaaaatgaggctgcaaccaaagtttggtttctgagtggcttattagtcaagcaaagaaagtgggtttctaatggcaagtaaattaagtcctgtttaatttaagcagctgaagaaatgtatccaggactagtagtctttaggcaagactagttgcttcaagagttgaggacactgaggacagacatcagtagtcaattaaaaagcaaggcaaattattttgaatgatgttccttggctcttgataagttgacctgtgtaccaatactatttgaggagtgagtgctgagtttgaagagactggagaattaccctttgtgaatagtgtatgtggagcaaccacaggcaagaatttattttattttattttatttttgagacggagtctcactctgtcaccaggctggagtgcagtggcatgatctcagcacactgcaacctccgcctcctgggttcaagtgattctcctgcctcagcctcccgagtagttgggattacaggtgcgtgctaccatgcccggctaattttttttgtatttttagtagagatggggtttcaccatgttagccaggatggtctccatctcctgatcttgtgatcctccctccttgtcctctcaaagtgctgggattataggcatgagccactgcgcccagccacgtgagaatattttcaaagaagatgtgaaaatactaattcagtaaacctgatgtggaatctgctaagatgtcttatatagatgatggtggtaaaaatacatgtggagcagaaaaagccttagttggacaaatttataaagtttgtgaaaacataagatatttaaagccttttcatcagtagatacttcccagaaaatatttgtcatgagtaggaactttgtggaaaatgcttaaatcttgtttgctgttgaaccaatagtatcacctttgaacttgtggacttaaccactgaaagaaatagaagctgataatcctgacttgtccttctacactgcatttcagtggtttagcagttttactgccattttttgagctcaggattgaaaaattcaaaatggaaatttttctgaataagaagacccacctgtcaaccactattatcaaacactgagtggcttagaaaattaggttttgctgcagacgttatttttcttaatgcattcagtgtaaaattacaggggaaaacagtgcttaaatacaaaacttactctgctgtgaagtcatttcaacagtagatacattatttgaatcaaagtaatgtcagtcagctttatgtacttcccatgctgttaaaagtttaacacaagcactcagatccgcagtggcagtggtgtgtcctgtctgcggagagccaggccagagacaatgagcaacacctcagagaacacgagggcgtgccccgaagccacccacccttccgactgcggcagctgctgacccgctgttgccatgacctgcaggaaagccaatgaggagggcagttggaagaaattcttctggaactcagagaagaaggagtttttaggcaggactggtggcagttggtttaagatcattctattctacataatattttatggctgcctgactggcatcttcatcggaatgatccaagtggtgctgctcaccatcagtgaatttaaacccacatatcagaaccacatatcaggacccccaccaggattaacacagatttctcagatccagcagactgaaattgcctttcatcctaatgatcccaagcactgtgaggcatatgtgctgaacgtagttaggttcctggaaaagtacaaagattcagcccagaaggatgacatgatttttgaaaattgtgacaatgtgcccagtgaacccaaagaacgaggagactttaatcaagaatgaggtgagcgaaagtctgcagattcaagcttgagtggctgggaaattgctctggattaaatgacaaaacttacagctacgaagagggcaaaccacatgttattataaagctcaagtgagttctaggcttcaaacctaagtctcccgagaatgagtccttggagacttacccagtgatgaagtataacgcatctgtgtttcctgttcagtgcactggctagcaagatgaagataaggataaaaatagaaatgtggagtattttggactgggcacctaccttggttttcctctgcagaattatccctactatggcaaactcctgcagcccaaatacctgcagcctctgcttgttgtacagttcaccaaccttaccatggacactgaaattcgcctagtgtaaagcagatggtgagaacattgggcacagtgagaaagatggttttcagggatcctttgatgtaaaaattgaagttaagagctgatcacaagcacaaatctttcccgctagccatttaataagtttaaaaaaagatacaaaagcctgttagtcttgaacaaactgtcatatgtatgggacctacacttaaagcataatctatatgctttacacttgctttctgcatttaattggttagaatgtaattaatgtaaactaaagtgtagcaatagcaacaaaatattctactgtaaatgacaaaagaaaaattgagccttgggatgtgctcatttttactgtaaattatgattccataagtgacttgtaagcagtgtttctggcccctaagtattgcctcctatattttatttaatgtatagtactataggtgcatactctggtcctttttcaagccatgtgttatcgtatctgttttgtactttatgtgagcaggttttgctgtccaaggtgtaaatattcaatgggaatgaaactggcatggtcttttttttttttttttttgggctctttcaaagataatggcccatcaatgagcatctttaacatattctatagtcttttcctgtggtgttaggtcttactttattattattttttctcctgggaatgggacagggatttgtcatgggggaactgccctttaaattttaagtgacactacagaaaaacacaaaaaggtgatgggttgtgttgtgcttgttttgaatgctgtcttgacatctcttcccttgtcctctagtatgttctaaagctgtgtctgagatctggatttgcccatcactttggctagtgacaggcctaataaatttgctttgtacattttcttttactttccttttttcctttctgggggcatcatgctgatggtgtgtctttatgagtgttttaaccattttcatggtggaagaattttttatttatgcagttgtacagttttatttttttctgcaagaaaaagtgtagtgtatgaaataaaccacagtcacttgtttgaaaataaatctttattttgaactttatacaaagcaatgcagtactccatagactggtgtaaaatgttttctactatgcaaagtccatgttctaataattgccaggagtacagtgctcttgttgatcatgtattcagtcaagttaaaacaatggacaataaaagaatgaatacatgaaaaaaaaaaaacagaagacatctgcagcagatatattttccaagcccaacctatagttccagaagtgtttttcagatttccatgcaagtgcagaggaaatttacatatttcaaaatccattaaatagtgcagttgagcagctttctcctgacttcaattggaagtgattagtcgtcaatgtaagaagatgctaaaaggcaaatatcaacaagaatttcatagaattctataaatgctttcaaagcaatgaatatagttatttaaaattatgtttatagatttatatcagcatttggcagtacctatctataagattttgaatatgaaatagtaacatatcagatcatcatcaatagatgaacatttacaattaattttgatgataaggaatactaactgaatcccaattaagtgaaatattttatcctatccccccaaaaagaattctgttcttctcattagtagacctgtattacaaagaattgcactcacatatttttattatattttaaattttgtcaaaaaatttcatggaaatttgtagttatttcttgctataccttcatcatgtcctttatattacctcttggcctccaaagcatgaaatatttgctatctagctgtttagtcagttctcgtattgctataaagaaatacctgagactgggtgatttataaagaaaagaggtttaattagctcacagttctgcaggctgtatagaaagcatagaagcttctggggagcctcaggaagcttccagtcttggcggaaggcaaagatggaacaggtatcttacatagcaggagcaagagagagatgggggaggtgcctcacacttttaaatgaccagatctcatgagaacgaactcaccagtcgtgaggacagtaccaagagggatattgctaaatcattcatgagaattcacccccatgacccagttacccccccaccaggccccacctccaacaattggatttcaatttgacatgagatttggatggggacacaggtccaaaccatgtcaccagccctcttcgaaaaaagtttgccaaccctatttcaatggtttcgttaggattccaccccattttatttatttttgttattagtaacctggaaagaagctatgaaactggaaggatgtaactagaagccttggagtataaatatttaggaggattctaaattatttgactatctcagttctgcacaggaccaaggcttagaaatgacaatatttccttctccagatgagttggcaaaatttcaaagtggaaattgtgagacaattatggtcaataacccaggaagaaaagggatggagggagtttcttgagagtataggagttcattaccaggaggggagcagtgggataggaagatcaaggaagagggaagagggagaagaagatatgcaaggaaagaacaaagtagcagtgctcaaactgtcctaatgttggtcaatggaagcacctcagttggctcctaagtccctttgtcataactctagtatcatggcgtccttactttcaggaataatatgtttcagattcatcttgtacgtttcctgtcctgggttggtaatcaactatttctaaaaggagccacttttctttttactggaaaataaaatcaagttaaagtaattacatacttgatttattctatgtctctacacacatagagaataaagtgtagtttcaaatagcagtattaatactaacaatgtaatttaagatttctttgcttttctttgtatctttagtatatatatcccactagagatgtatagttcaatttctgtgtgttaaagtcacttaaaatttttctatatagaaatatcatcagtagatatacagttaggctcatttgtttcattttgcttctgatttttaaaaataattttgtttttattttataattgcctaaaaatttacatgatttcttagtcaaacctacagaacagatatttcagagaactctagcttccatctctgtcctttccactctaagtcctctctcttgtataagtaactgttttaaagtttttgggttttttttttaatacttaaaatataagaaaataaagccaggctccatggctcatgcctataatcccgggactttgggaggctgaggtgggaggatcacttgagaccaggagtttgagaccagcctgggcaacattagcgagaccattttccttaccaaaaatttaaaaataaaaataatattttttaaaaaaacgtacacatttgtattaaacgccatacccttcataaataaggcatactatacatactttctggtcttgctttttttttgaggcggagtctcgctctgtggcccaggctggagtgcagtggcacgatcttggctcactgcaacctccgcctcctgggttcaagcaattctcctgcctcaacttctcaagtagctgggactataggcacatgccaccatgcctggctaattttttgtatttttagtagagacggggtttcaccatgttagccaggatggtctcgatgatctgaccttgtgatccacccgccttggcctcccaaagtgctgggattacaggcatgagccaccgtgcccggctgctcttgctttttttacttaactctgtcatgaggactatgctatagcggtaaatagagacatttcttcatttattttataatactctgttttttgatataccgtaatgtattcaatcattcccccataggacgtttctagtgttttgctattaaaacgataccatgagaagccttgtaaataaaagttaaaagaattttttgtaatacaaaaatttgagaaaacacagtaatagaaaaatactctctcatatttttcaactttgaggtaaaaatgaaggacttgtttttgtatcaggcttagttaacttttataaaggtaatattgagaaaagaatcttaccaaactgtctttatctcattgcaaatccagattttcctgcctccttttttattgtaaaaaacacatagcccaaaatttaccatcttaaccatttttaaaggtacagttcataagtgtgtaagtatattcacattgttgtgaaacagatcttcagaggtttttcatattgcaaaactgaaacactatacccattaaataactaccccccatttccctgccaccccccggtccctggcaaccaccattctgctttttgtttctattaatttgaatactttagatacctcatataagtggagtcatacagtgtatgtccttttgagatgggcttatttcacttagcatagtgtcgtcaaggtttatccatgttgttgcatgtgacaggatttcctttttcaaggctaaataatactccatcatcatatgtatataccacattttgtttatccattcattcatccatccatggacatttgggttgcttcacctcttgactgttgtgagtactgctgctatgaacatgggcatgtaaatagctttttgaggccccacttgctattctttggacgtatgtccagaagtaggattgctggattatatggtaattctatgttacagttttttttaggaaccttcatatttttttccataacaattgcaccattttacattcctaccatcagtgcaaaaaggttccagttttgacacattgccaatccttgttattttctgtttcttgtttttttaatagtagccatcctaatggatgtgaggtgatatctcattgtggttttcatatgtatttctctgatgattagtgatgttgagtatctttccatatgcttgttggtggtttctatataatctttggagaaatgtctattgaaatcctctccccattttttaatcagtttacaaatccaaattttttataacttaatatttttgctgttagctagtagcgcatatttaacatagtcctgaagagaatatcatgttcatctaaactgtgactggtaagaatatctatgacctaaatttattttgttattcttacagggctatttagaaaccaaaaaatattaagagaatacagagatttcttgggaaataccaaggtatggatatctttgtaataatgtgtgtgtttgtgttgcacagcaaaattctaatatcagtccattgtaaaattctagcatgtctgtgatctcaatctaagattttcttgagtacattgtagttcactgaattatagtcaattcattcatttccgtctgattttcctttttttttttttttgagacagagttttgctcttgttgcccaggctggagtgcagtagtgtaatctcggctcactgcaatctccgcctcccgggtttgagcaattctcctgcctcagcctcccgagcagctgggaccacaggcatgccaccatgcccagttaatttttgtgtttttagtagagacagagtttcaccatgttggctaggtgggtcttgaactcctgacctcaggtgatgcgcctgcctcggcctcccaaagtgttgggattacaagcgtgcccggcctgattttcttgaaatttaaaacatttgtacataagttttctttaaagtcataaccatgttatgaaccttaagcatgtagatatagatgaggaagactttattttcttaggttttagtgagatttatatccgtcatacacactcttaattttctttagcctctctctttctgctcctaactctggttcaacattcagactgccaactctgtgcttgtatccaagaagcttagcccttggagaagaaaattacacagccagtgtgattgttctttcttccttatatgactatacaaaatcaatggatactcaatattatttgacagtcttactaaacttccagagtatgttcaccttcccactctttgaaatagctattgcatatctttttctttcttgccaacagcctcactctttactcttcagctgttgactttgcttcatattttattgaaaaaataggtgtaatttcataaaagtacctcatctttttcatcacctcatcttttcatcaccaaatttactaactcatctacacatgtgacaaaatactctgctttccttcctactagaaggaaattaatattgggacacatgtagaaagtttgcctctactgttctacctcttattttctcctgaacctaatccaattgggctttcaaccccaccaccccactgaaatgacttaccaaagtccccagcacctttaagatgccaagcagtctgtggccaagttgactttccatttaaacttggctgggaggaatctcctatcaagaagttaatgtcatatttggataaaaggctacctatgcacattttcttctctctggtggcatttgagacattgcacccattttgcaaagtttagacattggcagtgatgataattttagccaaatcttatttgatatgctttccttttccatttattatcttcaagacctcttaatttccatttcccctttgatcactgcatttctggcaccccagtactgccctgaagatgtggactctcctctggtagagccttcatatgtcttatgagccagcattttcactctcatgcctcaagggctattgccattgcctcttgtgctgggataacttaggctggtgagacctgcctcctgggaagattcactcctcgccttcacatctgtttcacatggagaatcatcctcaccagattttctaatagtagctgttgacttatgaaatctttgttacttcagaagattaatactggtcaacttttgaatattccatgttttgaaatgatttttttttgctattacaacgtttttttgctgggacattaggataaaactagtatttcatttccctctactgtacccctattccctttaggaatggttgttctctcactgaagatggttgctttccttctctaaaacatagggctaatcctgtttgcaaaaattaaatgccttcttttttttttttttttttttttttttttttttttgttatttctgacccagacacttgtttttccaatatattcttatctcatgagaactccaataatgagatatatgaaatcacagtgttctgggtctgctcctctggtatttaatttcttatataataatttcccctttaatacctttctactttcccatgccttcccttctatttctaattcatgggtttcttgatatagtacttcagagaattggaagtacctttatctctgcttaatatatttaactccacaatagtatcaccttgaaatgcaccaataatgctttgaacaatttatgctccttttcctggtagttctctctgaaatctatccaaattttctgcacttgtcccaatattaaagaaccttgtttattgtgaatgttctcaaagatatataaaaatagaaaaatagatattggctatccagtttcattaatttctaacattttgctgtcctggtcttcaaaaaggggcagttctccaattgctctgattatggaattttttaatattttattttattttatttttgagacagagtattgctgtgttgcccacgatctcagctcactgcaacctccgcctcccgggttcaagagattctcatgcctcagcctcctgagtagctgggattacgggcacccactaccacagccggctgatttttttgtattttagtagagacggggttttaccatgttgtccacactggtctcaaactcctgagctcaagcagtctgcccatcttggcctcccaaagtgctaggattacaagcgtgagccactgcgcccgacctgattatggaatttttgagtagcttttacaggaagcttcccaagcaggttgtggatcctggctccttgtgatctcttgtttttctagatttttattctcttgttagagttccttggaccttatcattatttctagtttctaccaacacatcttcccgttttctacagccttctttattagagtggtttgggccgagtgaatctttttccttatttttcttattatttcttattctgatcttaaagatctcatttcctttccctgttttgcccctcccatgagttcccaaacctttcttctaaagaaatcttatttttcaccgtaagcagcattctattgttcccataataatttcattgagttttttctctattcatccaaataatacaatatattcttattttaataaaacatacattctgtttgttatcaataaacagtataattcagaaatctagacccatagtcagagtttatggcttacaaatcgaagtaaaagttgagatcacatggacaaggtttatccctgtgtagttccttctcttagctctgaaggcaggtcaatacagaattttgggtgtctgatttcacacattcttagagcatatgaatttcagcacagtgcatttttctactttattactagtttttatgtagccagctcagatcctttctggaagtaggcaggacatgaattacaaggaaacaaaacaaacaagtttctggaaagagacccagatatgctttcggttttaatctttccactttctaaacaagaacttctagagaaaaataagtaaatctaattcagaagttttgatagaggaaaatgttctggtctgtcaaagccaccagttacagtgcttctctgcaaaattttggaggtattaaaaaaagtttttgtttttttacagccacgctccagaacagcatcagtgttttttaagggaccaggaaaagtggtgatggttgcaatttgcatgtaagtactgaaaaataagctttgtgaaatagaatatattcttttaaatatgtatatccttaaatatgtaaatttattacatggtagctagctatagagtttgaggtttattttgttttaggaggaaattgaataagtctttattattgtcagtaaagtggtggggaaagagcatgaattcatatagataaccatgctcattctctgtatatttttgatgtagttagatctaagaatagttgctacctgaaaatcctttcttgtttttattggagttgatagaagtcttttttaaagaagttagctaaaccaacctgggttacagctactgaagaatatctttgtgcttattatctttattccacttatcttggaagaacataattatttgttcttgttatttttgcctcctctttttttttttttttgagacagagtcttgctctgtcgccaggctggagtgcagtggctcaatctcagctcactgcaatctctgcctcccgggttcaagccattctcctgcaacagcctcccaagtagctaggattataggtgcgcgccatcatgcccagctaatttttgtatttttagtagagatggggtttcactacgttggccaggatggtctcaatctcctgacctcgtgatctgcccacctcggcctcccaaagtgctgggattacaggtgtgagccactgagcccggccttgccttcccctttttccctctatcttcttgattcctattgttttgttcaccttttgtctgtttttctgactaatctattttaggatggatgaaatcattcaataattcattagttcttttattcttaaatatatatatgtaaaatatgtatcagtgtgataggatatgaaaatataaagatataatacataattctttaaggattggagggacactaaactagaggaagacatttataatacagacaaggaataatgctgtcataactacaatagtggtggtacagatagacgtagacagtttcaacttcttagaaggtatgttcaaggatagtgaccaggtttctggctgtacaattgtgtaaataatgtaccattcactgaggagagtactggaaggaggagcagggtgggagcagagaaaatgatgagttcatttttgagctggtggtatgtttagggcacccaggtggagataagtcaacagggttctttccaccagtaatacagggatagtgattatagcttttctcattggagggatgtatgtgtgaaaagtgcttaacatagtacctgctctaagatatgtacttaagaagtattattgttaatatatattggtctgaagctcaggagagaaatctgagttagaggtttgatagtttttagtatatagatgataactaaagccataaaagtaaagatcacctgaggaatgtatgtatatatagtatcaggaataaaaagtcctcaggaaaaattccttgaagaatgttaacattaagaaaaaggtggaggctttgggagacctcgtgatccgaggtcaggagattgagaccatcctggctaacacggtgaaaccccgtctctactaaaaatacaaaaattagctgggcgtagtggtgggcgcctgtagtcccagctacttgagaggctgaggcaggagaatggtgtgaacccgggaggtggagcttgcagtgagccaagattgcgccactgcactccagtctgggcgacagagccagactctgtctcaaaaaaaaaaaaaaagaaaaagaaaaaggtggaggaaaaagtgcctgcagaggagattgaggaggagtaaggagaaaagtagaaagaaaaccaggagtgtattagtccattttcacgctgctgataaagacatacccaagactgggcaatttacaaaagaaagaggtttaattggacttacagttcccgtggctagggaagcctcacaatcatggtggaaggcaaggaggagcaagttatgtcttacatggatggcagcaggcaaatagagcttgtgcagggtaactcccatttttaaaaaccatcacatctcatgagctcattcactatcacaagaacaacatgggaaagacccaccctcatgcttcagtcatctcccactgcgtccctcccaaaacatgtgggaattataggagctacaagatgagattttgtgggagacacagagccaaaccatatcaaggagtgtcaagaaagccaagggaagaagcgtttgttttttttttgtgagacggaatctcactctgtcgccaggctggagtgcagtggtgcaatctcggctcactgcaacctccgcctcccaggttcaagcgattctccttgcctcagcctcctgagtagctgggactacaggcacacatgttttaaggaaatagcaggcctggtacaggcacacacctggaatctcagcactttgggaggctgaagcaggaggattacttgagctcaggaatttcagaccaccttgggcaacatagtgagaccttgtacctacaaaaaaatttttttaattagctgggcatggtgggtgatgtgcgcctgtagacctactcaggaagctgaggcaggagaatcatttgagcccaggagtttaaggctacagtaagctgtgattataccactgcactccaacgtgggcaagaacaagaccctgtctttaaaaaataaatagccagctagggggtggcgggcaagatggctggataggaacagatcctgtctgcagctcccagtgagatccatgcagaaggtggataacttctgcatttccagctgaggtacctggctcatctcattgggactggtcagacagtgggtgcagcccatggagggtgacccgaagcagggtggggcattgcctcaccggggtagtgcaaggggtcggggaactccctcccctagccaagggaagccatgagggactgtgctgtgaggaacggtgcattccagcccagatactacgcttttcccatggtcttcacaacccacagaccaggagattccctcgggtgcctacaccgccagggccttgggtttcaagcacaaaactgggcggccatttgggcagacaccaagctagctagactagttttttttcatactccagtggtgcctcgaatgccagtgagacagaaccttttaatcccttggaaagggggctgaaaccagggagctaagtggtctagctcagcagatcccacctccagagagcccagaaagctaagatccactggcttgaaattctggctgccagcacagctgtctgaagttgacatgggatgcttgagtttggtgtgtgttggggagttgggggttggggaccaccattactgaggcttgagtaggcagttttcccctcacagtgtaaacaaagccatcaggaagttcgaactggacagaacccaccgtagctcagcaaagccactgtagccagactgcctctctagatttcttctctctgggcagggcatctctgaaagaaaggcccagcagtcccggtcaggggcttatagataaaactctcatctctctgggacagaaaacttgggggtaggggcggctgtgggcgcagcttcagcagacttaaacgttcctgtctgctggctctgaagagagcagcggatctcccagcacagcgctcgaggtctgctaagggacagactgcctcctcaagtgggtccttgacccccatgcctcctgatggggagatacctcccagcagggatcaacagacacctcatacaggagagctccagctgacatctggcaggtgctcctctgggatgaagcttccagaggaaggaacaggcagcaatgtttgctgttctgcagcccctgctgttgatacccaggtaaacagggtctggagtggacctccagcaaactccagcagacctgcagcagagaggcctgactgttagaaagaaaactaacaaacagaaaggaatagcatcaacatcaacaaaaaggatgtccacacaaaaaccccatccaaaagtcaccaacatcaaagaccaaaggtagataaatccatgaagatgaggaaaaaccagtgcaaaaaggctgaaaattccaaaaaccagaacacctcttctcctccaaaggatcacaactcctcgccagcaagggaacaaaactggacggagaatgagtttgacgaagtaggcttcagaaagtgggtaataacaaactcctccaagctaaaggagcatgttccaacccaacgcaagaaagctaagaaccttgaaaaaaggtaagagaaattgctaactagaataaccagtttagagaagaacataaatgacctgatggagctgaaaaacacagcatgagaactttgtgaagcatacacaagtatcaatagccaaatcaatcaagtggaagaaaggatataagagattgaagatcaacttaatgaaataaagcataaaggtaagattagagaaaaaaatgaaaaagaatgaacaaagcctgcaagaaagatgggactatgtgaaaagaccaaacccacatttggttggtgtacctgaaagtgactgggagaatggaaccaagttggaaaacactcttcaggagattatccaggagaacttccccaacctagcaagacaggctaatattcaaattcaggaaatacagagaacaccacaaagacagtcctcgagaagagcaacctcaagtcacataatcatcagattcaccaaggttgaaatgaaggaaaaaatgttaagggcagccagagagaaaggtcgggttacccacaaagggaagcccaccagactaacagcagatctctctgcagaaaccctacaagccagaagagagtgggggccaatattcaacattcttaaagaaaagaatttttaacccagaatttcatatccagccaaactaagcttcataagcgaaggagaagaaaagacaagcaaatattgagagattttataaccaccagtcctgccttacaagagctcctgaaggaagtactaaatatggaaaggaaaaactggtaccagccactgcaaaaacataccaaattgtaaagaccattgacactataaagaaactgcatcaactaatgagcaaaataaccaactagcatcataatgacaggatcagattcacacataacaatattaaccttaaatagaaacaggctaaatgcccctgttaaaagacacagactggcaaattggataaagagtcaagacccattggtgtgctgcatgcaggagacccatctgacgtgcaaagacacacataggctcaaaataaaggaatggaggaatatttaccaagtaaatggaaagcaaaaaaaaaaaaaaaaaagcagggttgcaatcctagtctctgacaaaaaagattttaaaccgacaaagatcaaaaaagacaaaggtcattacatagtggtaaagggatcaatgcaacaagaagagctaactgtcctaaatatatatgcacccaatagaggagcacccagattcataaagcaagttcttagagacctacaaagagacttagactcccacacaggaatagtgggacactttaacccctcattgtcaatattagacagatcaacaagacagaaaattaacaaggatattcaggacttgaactcagctctggaccaagcagactaatagacatctacagaactctcaaccccaagtcaacagaatttacattcttctcagcaccctgtcactcttattctaatattgaccacataattggatgtaaaacactcctcagcaaatgcagaagaacagaaatcaaaacagtctctcagaccacagtgcaatcaaatgagaactcaagattaagaaactcactcaaaaccgcgcaactacatggaaactgaacaacctgcttctgagtgactactgggtaaataactaaattaaggcagaaataaataagttccttgacaccaatgagaacaaagacacagtgtaccagaatctctggaacatagctaaagcagtgtttagagggaaatttatagcactaaatacccacaggagaaagtcggaaagatctaaaatcgataccctaacatcacaatgaaaagaactagagaaacaagagtaaacaaattcaaatgctagcagaagacaagaaataactaagatcagagcagaactgaaagagatagagacaccaaaaacccttcaaaaaaccagtgaatccaggagctggtttttttaaaagattcacaaaatacatagaccactagccagactaataaaaaagaaaagagaggagaatcaaatagacaacaatgaaaaatgataaaggggatgtcaccactgatcccacagaaatacaaagtaccatcagagaataatataaacacctctacgcaaataaactagaagatctagaagaaatggataaattcctggacacacacaccctcccaagactaaaccaggaagaagttgaattcctgagtagaccaataacaagttctgaaattgaggcagtaattaatagcctatcaactaaaaaaaaaaaaaaaagcccaggactagacggattcacagccaaattctaccagaggtgcaaagaggagctggtaccatttcttctgaaactattccaaacaataggaaaagaaggactcctcctcaactcgttttatgaggccagcatcatcctgataccaaaacctggcagagacacacaaaaaaaagaaaatttcagaccaaaatccttgatgaacatcgatgcagaaatcctcaataaaatactggcaaagcaaatccagcagcatgtcaaaaagcttatcaccaccatcaagttggtttcatccctgggatgcaaggctggttcaacatatgcatcaacatatgcaaaataataaatgtaatccattaaataaacagaaccaatacaaaaaccaaatgattatctcagtagttgcagaaaagcccttcaataaaattcaacaccgcctcatgctaaaaactctcaccttaaactaggtattggcagaacgtatctcaaaataaaaagagctatttatgacaaacccacagccaatatcatactgaatgggcagtagctggaagcattccctttgaaaaccagcacaagacaaggatgctgtctctcaccactcctattcaacatagtattggaagctctggccagggcaatcaggcaagagaaagaaataaagggtattcaaataggaagagaggaagtcaagttgtctctgtttgcagatgacatgattgtatatttagaaaaccccataatctcagcccaaaatctccttaagctgataagcaacttgagcaaagtctcaggatacaaaatcaatgtacaaaaatcacaagcattcttacataccaataatagacaaacagccaaatcatgagtgaactcccattcacagttgctacaaagagaataaaatacctaggaatacaacttacaagggatgtgaaggacctcttcaaggagaactacaaaccactgctcaaggaaataagagaggacacaaagaaatggaaaaacattccatgctcgtggataggaataatcaatatcatgaaaatggccgtactgcgcaaagtaattaatggaatcaatgatatccccatcaagctaccattgactttcttcacagaattagaaaaaaaacttctttaaatttcatatggaaccaaaaaagagcctgtatagccaagataatcctaagcaaaaagaacaaagctggaggcatcatgctgcctgacttcaaactatactacaaggctgcggtaaccaaaacagcatggtactggtaccaaaacagatatatagaccaatgtaacagaactgaggccttagaaataacaccaaacatctacaaccatctgatctttgacaaacctgacaaaagcaatggggaaaggattcccgatttaataaatggtgctgggaaaactggcaagccatatgcagaaaactgaaactggaccctgtctttataccttatacaaaaattaactcaagatggattaaagacttaaacgtaagacctaaaaccataaaaaccctagaagaaaacctaggcaataccattcaggacataggcatgggcaaagacttcatgactttcacaccaaaagcaatgggaacaaaagccaaaattgacaaatgggatctaattaagctaaagaacttctgcacagcaaaataaactattatccgagtgaacaggtaatctatagaatgggagaaaatttttgcaatctatccatctgacaaagggctaatatccagaatctacaaggaacttaaacaaatttacaagaaaaacaaacaactgcatcaaaaagtgggtgaaggatatgaacagacacttctcaaaagaagatatttatgcagccaacaaacatatggaaaaaagctcatcatcactggtcattagagaaatgcaaatcgaaaccacaatgagattctatctcacgccagttagattggcgatcatttaaaagtcaggaaacagcagatgctggagaggatgtggagaaataggaacacttttacactgttggtgagagtgtaaattagttcaaccattgtggaagacagtgtggcgattcctccaggatctagaaccggaaataccatttgatccagcagtcccattactgtgtatatatccaatagattataaatcattctactataaagacacatgcacgtgtatgttttttgtagcactattcatattagcagacttggagccaacccagatgcccatcaatgatagactggataaagaaaatgtggcacatatacaccatgggataatatgcagccataaaaaaggatgagttcatgtcctttgcagggacatggatgaagctggaaaccatcattctcagcagactagcacaagaacagaaaatcaaacaccacatgttctcactcataagtgagagctgaacaatgaaaacacatggacacagagaggggaatatcacacactggggcctattggggggtgggtggctaggggagggatagcattaggagaaatacctaatgtagatgacgggttgatgggtgcagcaaaccaccatggcacatgtatacctatgtaacaaacctgcacattctgcacatatatcccaaaacttaaattataaatttaaaaaataaataaacattgtttaaaaaaagaagaaaatagtgtcagatgctcccaggaggttaagagaaatgctaaaatatttccaggaatttagtagtatggaatggtaggtggtattgataagatgaaaactgtgacagacagaataaatatgatgtttttaagaagttatctgaggtggaggagatgggaaaagggtagctaaaaggggacatacagttctctcatttataaaatgggggtgttaatatttgtataacagacttgtaatataacatggtaactcactagcataacgtctgagataaatcatattagtcattactgttagtatctgagcagctagtttcctcagagttaactgtttattttggcatctagctgcttctagtatgactctgagactgcttagagtcacctctggcatctgcctccttaagtaaacagattttcactgaagtcttgcctttgacactggcccaatggacagtatcaggtgcagatctgcttttatctacctaaaacacataattttcttttacattttatcttgtccacatatagaagaccatcttttctcaccagttttcaaaatatacttaagtaatttgcttacacatagcatgcctcttaacagtacataatctatattttttcaaatttttactcttgttacctaaacaaagttttttaaggctagggattcttttaattgtacttgttttttttgttattgttgttgttgttttagcgatggggtctcactctcttgcctaggctggagtgcagtggcacgatcatagctcacttcggcctcaaactcctgggctcagatgatcttcccacctcagcctctcagtagctgggactaaaggcgtgcactaccacaccagactaagtttttaaaaaattttttgtagagatggggtcttactttgttgcccagactggtcttgaactcctgtcctcaagccatcctcccacctcagcctcccaaaatgttggcattataggtgtgagccattgtgcttagcctaattttactttcaacagaatctagtgtagagatatacagctgattgagtatgcttttggcttaaatttttgtccaaacctatgctaaattgttttctctttctcttctagcaatggattaaactgcttctttaaatttcttgcctggatttataccggttcagcaagtatgttctcagaagctatacactcattatctgatacttgtaatcaggtgaggactaaagctttttttataagtcaattttaaagtaatagttgtaggctttaatctaaaagttgatctattttaaaactgaatgattccagtagttggcttgtgggataaaataaaagtttacttttcagcaatgaagtgcatagaaatttaatcatagtattttaaagcagattgttatgctttaagaacctctgacaatggaatgtgaagtataacattgtcagtcactgagcagaaatctggtctctgaatatgaattctcaatgactgtaatagtcaatgaatttaaacttttggaataaagatgtaaaatcatatgtaattggttaaaatgctttcacattagattcataatttgaattactttccttggctttgcaaatggagaaaaatttttgtattaatacaattaaaagaccttctaaaccccctgtggcccaaattgtgaaaactagaaacccaaaacttttctaagaatataataaaaatttctgtgtgtgcatcctattacattttaaagagtgtggtatattaagaggataccttttcaatatttacttatttttagtcctgttatgtaaaaactgatttgggagaacttcaatgagagacacaggtaaaataagaatatttaagacaaggataaaaataacgtgaagataaggagcaaggagagcaatattaattaaaaattaagcctgtgaacttgtctcactcactgtcaaatcagatggattaaaacccttcataaaagtaaggaaagaagacaagcgtttgccattagtactaagtatttaccttgaacttaatttttatactcaatatatacttaaatactgtctctataaaattttaccattcaactgtggtatgcagtgggaggagaggggatagggagagatatataacttataatctctattttcttgtaagcttatcgaggaaagttgaaatacagaaatatttgtccatatggcaaggagatatgtatgatgttattagtttcaatattagtttttatttcaaacattgaagacagtgtttaagtgttcattctctatgctattcaggcatttaaaaagaatgtagtagatatctgtgtactgacctggaatgataaccatgataaattgagtaaaaaatcaagttgcaaaatactatgttcagaacttctgctttcacccatgacagactaacagggattgagtttaatcttttgccatagacaactaaaagctagacagtatattggataatagcagcataagaccatgatctctgagagataagaaacaaattatttgaactctctgatctctctggctttttgcttgaacacatatttgggatagtggagcaggatgggaaataacagtctcattgagttgagaagacagaaatcagtgttcagggtgtctgaggtggctagaacttacaaggaagagttccacagaggaaggagctacaaggacaaaaagctatagaagtctacatagggatttccttgaattgaatgtttgctgaatgttaagttacacatgtgtaagatgtgagcatcaatctgggcagagaaccagcagggagcagtaactgactaattcccactgctcacacaaagctaggttacattcaggttctgactagctgacgtaagagagttctcattgattatcgaggccaatggaaggctcaccttaggagtagggctaaattattcttaacgtaaaggctgttctagaaccctccctaacaaatcttcctaaaagttctaaaggatcaagctgatcttcaaataatttaatcacttgccagaacaaagcctcacattctttaataaaggcagcaaaatccaaacactcagtataacattcacagtgtttagcatccaataaaaaagactaatcgccagtataagaagcaggaaaatttgactcataaccaggagaaaaatcagtcggaagcagactaaacagatgatagaattagcagacaaggatattaaacagctatttcaagtacagtcatgtattgaaaggaaaatatgaacataagaagataaatcaaaggtataaaaaataaaccaaatgaaacttttagagctaaaaaaatatatctggtgtgaaaaattcactgtatagaattaacagcacattagacactgcaggtaaaacagtcagtgaacctgaatatgtaacagcagaaaatattcttactaaagccacagacaaaaaagattgaaaaaaatggaggaagccttggtaacctatggaacaatatcaagagtattctgtcaagcatttagggaagaaacaatgctgagtacacagactttcagaaatagagaatgaaatgtttttctactgctttaatgaggctagtataaccctgatgccaaaattttacgaagtcattatgagagggaaaaaaccctacagaccagttattcctcatgaacacagatataaaactccttaaaatataatcagattttattatataaatatataaatatgatatatataaaaatgatattatatcataagtgagtaagatttcaggagtgtaaagttggtttaacattcaaaatcagtaagtatagaaggttaatatgaagaaattaattgcatttctactatcagcaaataaatggggaaggaaattttaataaattccataagtagtatcacaaaatattaaatacttagagataaatctagcaaaagacatacaagacctttacgctgaaaatcataaaatgttgctgagagaaatcaaagaagacctaaagaaatggagagatacaataccgcgttcatagattggatgtcatagatctgtcaaatctccctaaattgatttacagatataatggagttccattcataatatgaacagacttctctgtacaattgacaaaccgaataaattccaaaattcatacggacatgcaaagaacctggaatattcaaagcaatcttgaaacaagaaatttggagaacttcaagacattataaacttatatagaaattaggacagtgagttactggcataaggattgacaaatcaatggaacaaaattgaggatccaacaacagagccacatttacatggcccgtgcctttcggcaaaggtatcaaagcaattgagtgaggaaatgaaactttttaaaacaaataatgttggaaaaattggatccatatggggagaaaaaggaccttgactcctacttcacacactgtatacaagtttgaaatggatcatagtccaaatataaaagttaaaactatgaagattctagaagaaaacctaggagaatatcttttagacctggtaggcaaagatttcataaataggacacagaaacaatatcataaaataagatttacaaattcaacttcatcaaaattaaaaacttttgctcattgaaagacatccttaaggaaataaatacgcatagattgggagaaaatagtcacaaagcattctgacaagggactggtatccaggattaagaaattccacgattcagtaataaaatgagaaccagttttttccccccaaggataaagatttgggcaggtacttcacaaataaggaaacatgaatggtggccagtggacacctgaaaatgtgctaacaccgttaatgatcaggaaatgtatattaataccacaagacatctctgcatatccactataatggctacaagtaaaaacctgacagccaaatgttggtgaagatgtggagcagccagatctcccagtcattgctggtgtattactaaaatggtacaaccactctggaaaatatttggcagcctcctataaacatatacttatcctgtgacccaccaattccacttctaagtatttacccaagggaagtgggaatgaatggtcccaaaagatttgtataagaatgttggctgggcgcggtggctcacgtctgtaatccgagcactttgggaggccaaggcaggcagatcatctgaggtcaggaattcgagaccagcctggccaagatggtgaaattccatctctgctaaaagtacaaaatagctgggcatggtgatgggcccatgtaatcccagctactcgggaggctaaggcaggagaatcgcttgaacccgggaggcgggggttacagtgagccaagatccgagattgcaccactgcactccagcctggatgacaagagtgactcggtctccaaaaaaaaaaaaaaaaaaaaaaaaaaaaaggaatgttatagcagctttacttataatggctgaaaaaattggaatcaacccaaatgtttatcagcagtacagcagataaacaaattgtggtatactcatacaatggaatattatctggcaataaaagggaatgaagtacttttctgactggcaacatagatgtatctccagcaaggaactttaatttttaatagtttaaaaaaattgggaaaaatggttgcgtctgatgtcggggaggaaagaggcacagggagctttttgggaatgatggaaaggttctgtgtcttcataggaatatatgtttcaagggtatgtgtatttgttaacaaccagaactgtacattctgggccaggtacggtggctcatgcctgtaattccagcacattgggaggccgaggtgggcggatcactggaggtcaggagttcgaggccagcctggccaatacggtgaaacccgcatctctactaaaaatacaaaaacattagctgagcgtggtggtacatgcctgtaatcccagctactcaggagatggagacaggagaatcacttgaacccgggaggcagaggttgcagtgagtcaagatggcaccactgtactccagcctgggcgacagaactagacatctcaaaacaaaaacaaaaacaaaactgtacattcaggatttgtgcatttcattgtatgtgaattttacctcaaaaaaattctccctatgtggaaatgtgattacttagtagatatttgataatagtaaggaattagtattgatttttttttttttttgagacagagtctcgctctgtcacccaggctggagtgcaatggcatgatctcagctcactgcaagctccgcctcccaggttcacaccattctcctgcctcagcctcccgagtagctgggactacaggtgcctgccatcacgcccagctaattttttgtatttttagtagagacggggtttcaccgtgttagccaggatggtttcgatatggtcttgatctcctgaccttgtgatccacctgcctcggcctcccaaagtgctgggattacagacatgagccaccgcacccggccaggaattagtatcgatttttaaaagtctgataatagtcttgtggctgtattttctaaaaagcctagtttttaaagagattcatccaaaatatttaaagatgaaatggtacgatgcttggaatttacttcaaaatattcatgagggagtagatatggatgaaataaaacatatttggttacatatttataattgttaaagcttaatgatggatgatttgagtttttaaaaatgttctatcagggccgggcatggtggctcatgcctgtaatcccagcactttgggaggccgaagcaggcagatcacctgaggtcaggagttcaagaccagcctgaccaacatggcaaaaccccgtctcttagagttttcaaaaagacttcagttaaaaatatttcaactggacctttctgaatagatggaaattgtatttcagaaagttgtttctttcgagacctataatatttttaaaattttaattcattgtaatatttttatgccatatgttttccctcacttcttgagagacttaagtacctccaacttttaaattagacctgtgtctctaattataatgtagttttttatttatttattacttattttttgagacagagtctcgctgtcttgcccaggctggaatgcagtggcacaatctcggcttactgcaagctccatctcccaggttcacgccattctcctgcctcagcttcccgaatagctgggactacaggcgcccgccaccacgcccggctagttttttgtatttgcagtacagacagggtttcaccatgttagccttacaatttctgttacagttcatgttggaaaacttttctgttaaatattgcacatcgtatcatttaatatcaactgagatgaatttattgagcacctgagtttgcaatgtagcaagtgtttagaagaagacatggttctttctctgtcttctttaaacaggttatatgcggttatatgcacataaaacaactagaaagatcttctaaggtaccatttatgcaggtgctggatagtatgatacttaaggaacaccagaaacgtgaagggtgatcatggagtagagagcatttacagtacttcttagccactagatgttaatgttcgttatgctgcaaactaaacaaatgctctgtaggttatatatacgtactgatagagatttatgttgtaaatgtgtagaaaaaggtctggaaggatacatatcaaatataactgtgattctgtcttacctctgaggagagctggttggggtggtctcatttttgttagaactaataaatatggtccatattcattttataaaatagttgacggtatctcacacttcattgcacagccaactgaatattaaggatttttaaatagttgaatgtttattgaatattttaaaaataatataaatacatatatatgtatacatatatacacataatgtgaataatgactgtcacttttaatgtacaggtgtgtattattccattttcacactgctgataaaaacatacccaagactgggcaatttacaaaaaaaagaggtttaattgtgactagggcaggctcacaatcatggtggaaggtgaaaggcatgtctcacatggcagcagacaagagaagagggcttgtgcagggaaactcccctttttaaaaccatcagatcttgtgagacttattcactatcacgagaacagccgaggaaagacttgcctccatgattcagttacctcccactaggtccctcccacaacatgtgggaattcaagatgagatttgggtggggacacagccaaaccatatcttcccgccccagcccctcccgaatctcatgtcctcacatttcaaaaccagtcatgccttcccaacagtcccccaaagtcttaactcatttcagcattaactcaaaagtccatccaaggtgtcatctaagacaaggcaagtcccttctgcctatgaacctgtaaaatcaaaagcaggttagttatttcctggatacaatgagggtacaggcattgggtaaatacagacattgggtaaataccatgtctccatttggcgacattgggtaaatgtctccaaaagggagacattggccaaaacaaaggggctacaggccccatgcaagtccagaatccagcggggcagtcaattcgtaaagctccaaaatgatctcctttcgctccatgtctcacctccaggtcacgctgatgcaaaaggtgggctcccacagccatgggcaactccacctctttagctctgcaggatatagcccacttttggctgctttcaggggctggcattgagtgtctgtggcttttccaggtgcactgtgcaagctgtcagtggatctatcattctgggatatggagggcaatggccgccctctgctcacagctccactaggtggtgtcccagtaggttttctgtgtgggggctcccaccccacatttcccttaagcactgccctagcagaggttgtccatgagagccccgcctgtgcagcaaacttctacctgggcatccaggtgtttcccatacatcctctgaaatctaggcagagatttccaaacctcagttcttgacttctgtgcacccacaggcccaacaccacgtggaagctgccaaggcttggggcttccacctactgaagcaatagctggagctgtaccttggccccttttaatcacagctggagcagctgggatgcaaggcactaagctcccagactgcacacagcagagggaccctaggcccagcccacaaaaccacttttcttcctaaacctccaggcctgtgattcaaggggctgccacaaaggtctttgacatgccctagagacattttcccccttttcttggtgattaacattcagttcctcattacttatgcaaatttctgcagctggcttgaatttctcctcagaaaatggaattttcttttctattgcattgtaaggctgcaaatttttgaaacttttatgctctgtttcccttttaaaactgaatgccggggctgggcacagtggctcatgcctgtaatcccagcactttgggaggctgaggcgggcggatcacgaggtgaagaaatcgagaccatcctggccaacatggtgaaaccccatctctactaaaaatacaaaaattagctgggtgtggtggcacttgcctgtagtcccagctactcgggaggctgaggcaggataatcgcttgaacctgggaagcagaggttacagtaagccaagatcgtgccactgcattccagcctggcgacagagtgagactttgtctcaaaaaaaaaaaaaaaaaaaaactgaattcctttaatagcacccaaatcacctcttgaatgctttgctgcttagaaatttctccagccagacactctaaatcatctctctcaagttcaaagttcacaaatctctagggcaggggcaaaatgctaccagtctctttgcttaaaacataacaagagtcacctttgccccagtttccaacaagttcctcatttccatctgagaccacctcagcctggactttattgtccgtattgctgtcagcattttgggcaaagccattcaacaagtctctaggaaattccaaactttctcacattttcctatctttttctgagccctccaaactgttccaacccctgcctgttacccagttccaaagttgcttccacattttcgggtatctagagcagcaccccactctactggtaccaatttactgtattattctgttttcatgctgctgataaagacatgcccaagactgggcaatttacagaaaaaggaggtttaatggacttacaatttcacatggctagggaagcctcacaatcatggcagaaggtgaaaggcacgtctcacatggtggcaacacaagagaagagagcttgtgcggggaaactcccctttttaaaacaatcagatctcataagacgtattcactagcacaagaacagcatgggaaagacctgccctgattattcagttacctcccaccagatcccacaacacttgggaattcaaaatgagatttgggtggggacacagtcaaaccatatcagggtgtaaaagagttatatcttcctttgaatttcctgtcattctcttagtttaattccctgaaaaatcatgtatattttaggtggtttgctcccttttcccatggaatccagtggtaaaagcttataatattctgtgtatttagggtagggtttccaatattaagacctaaaaatatatttgtattaagtattttcaagtttctttaatctctattttttattagaaaaaatgtgtctattaaatttcttgtaacctaagggaaacctcatctgtgaagaagtcattatctagaaacttcacttatctgattatttgatatgatgctggaaaaaggaaaagcctcagattaatcaactaaaattacatagggaattcactcagaggctttatatttttatcaaatagttctaataaggtagtcttatgatgtgatttctagattcacatcaaattaggatggaaaggacttactagggacaagcatactactattgagaagttccagtggataactctttaacaaagggcaaaactttaaaaaccacctaagtggaaatgaaagaaagaaggaagaaatgatgaaggcaagtgagacagaggagaggcagtcagaaaggaaggaaagaaaagaatatgatatataattcctgtgcatggttttgcagttttaatagaaatgtgtgtgcccatacacaatatatatatattgtttaaagttgttattatcttttacttgtaaagctatacaagttattcttcctgtaaaaagtcaaatattagactaccttaattctgcctctcttcagagatacaaacatagttacttgcatgttcttttaaaccttttctgtgctttacattatatgtagtttataaaactacaaagcataagttctgtactgtacatactgttcctaacttgcttttttctcttcttccacttaatggtatgtctaggagctttatccatgtcagtatagaaagctctactctaaccctatttttttaacctactgtagaagtaatttatggtttatcatttattttgtcattcccaattgatggattttttttaggttgctttcatgtttctcatctttataaacaatggtgttttgaacccctttgagttcatctttattttttaaggtaagtactagaaaccagaattgctgggtcattggacatgcatatgttgagtgtttctttgtcattgttagcctgcaccctccacattggctttaccatattatactctccatcttgctaatgattattcacctttttttcttcttcttcatagggtttactagcattgggcatcagtaagtctgttcaaacaccagatccttctcatccgtaaggacattgccttattttgtttttgtttgttttggcgataagtcattgaaataactaaatatcagaaatctcctgcaatttatgtacctgcagtttgttcaagatttggtcatttcttccactgtagtatctaaaatgcagaacttcccactgtgtcaaagtaaattcaaggtataatttgaaaatggagttcaagttatttttatgctttgtagcacggcatggagatcttgttttctccatatttgataataataaagcacatattttgatcttagaggtctgttttatttggtccaaggaaacatatattctagatttagactcataggctgcccaatctaaaattttgatgataacttctattagatacacacttattttaatcctcctgttgtgatttggaaatgtattttgttaatatttcagaattatttatttgtaaaatgagtatactttttagaatgtattattttgaatcatagccattatttgatacagagatttttttctattgcttctattaacataaccatctaacacttttgaattccacaaacatcattttaagactagcttcagtaatataatttgataaatcttaagaccaaaaaaagtgcacttttatttctgtaaaggagtctacctctattctttagaaatgcctttctttacttgaaagcaatactactgttttcccataaataacatatttgaatgttttgtaactgtcaagctagtatagagaatagctctctagtgtgttaattacccatcattacagtgttttaccatcttaagaaaaatttttttttcatggccagttttatgtacaaaagatttaaaaacagaaggtacaaattttaaattttaggttgtgaagatttcttctcaaggtatttttatagtctactttagtgctgcccaacagaattttctgcaatgatggaaatattttatatctgtccagtatggtagtagctaactacatgtagctattgagcacttgaaatgtggccagtgcaactgaagaactagattttaaactatatttagttttaatttatttaaatttaaattgccacatgtggctagtggctcatcatattgggcagtttagacctacataatcaaaattttcaataagttaataattccttgaaatcacctgaagtaataccatttattttagatcttaatttactttaacgtgaatatatattcatgttactttagaagaaagtaaatttttctgagtgagctgattgtcacattgtcacatctataaactgggaattccccatggcaggattactctttgcaaaaaggaattccaagagcagcttgattaagaattcttgttgaaagccgggtgcagtggctcatgcctgtaatcccagcactttgggaggctgaggcaggtggatcacctaaggtcgggagttcgagaccagcctgaccaacatggagaaaccccatctctactgacaaaacaaaaaaattagccgggtgtggtggcgcatgcctgtaatcccagctactcgggaagctgaggcaggagagtcgcttgaactcaggaggcggaggttgtggtgagccaagatcacgccattgcactccagcctgttcaacaagagcgaaactccgtttcaaaaaaaaaaaatgtcgggcgcggtggcccacgcctgtaatcccagcactttgggaggccgaggaaggcagatcacctgaggttgagagttcgagaccagcctgaccaacgtggagaagccccgtctctactaaaaatacaaaattagctgggtgtggtggtgcatgcctataatcctagctacttgggaggctgaggcaggagaatcatttgtactcgggaggtggaggttgcagtgagccaagatcctgccattgcactccagcctgagcaacgagcaaaactccgtctcaaaaaaaaaaaaaaagaattcttgtttaaatttgtatttctcagaagagtgccactgagtttgggtttgggactaaattttccaggaaatatttttattaatgagtgattcttttcctcctctagtatgttattaatatatttttgagcacctttaatactaagtattgtgtcagtactaacaataatacaaaataatgtacatattgatgaagcatgcttgaaaaataattgagattttagcaccatgaaaacacccagaaaactgaaggtcttagttctagtaatagttgaaagttgctgtgtgctaacctattcagaaccagcaataaattatgtgttgtaaacttctgtatccagcatcaaattataggtattataaataatagactggctgcacacaaagatgaaaatattcaattagaagctgcattacaaggaaatttaaatgttatcctgttcattaaacatctgaatgcattttttaaaagattaattttaccaggatctgtggtacataatagtaaagtagctctctaaatcaaaataggctatttggaaaagagatcagaaaatacctgaattaaatggtattcactttatgtattttcaaaattcttacagttttttccactttacatattgcttttcaagtttggcacttaacatcttacttaaatataaaattataacatcttgatattgttagtctttttcattgacctattaagcacatatattttaaaagaaaccatttgtatttcttgcgaactatattcttttctatttttcaggtacggattttcaaatatgcgctatatttcttcgctaattagtggtgttggtattttcatgatgggtgcaggactatcttggtaccatggagtcatgggattgcttcatcctcaaccaatagaatcccttctatgggtaatcctctttttttctcctcagttttgatgtcttatgacatagtgattgtgtacagtagaaggcctttgtcatattggtgttaaaggagaatgacatacaccttcttgactgtgtattgtagggttatatatctatagtttaatttttagaacgtgactggacataacctctaaatccataagattcaatgatgttgaacaagatctctgtaggtaccaattatcaagccctgctccttggttaaaatcttgggcagttccactaatttctccagttactgttgaagaacaagaaaacctctgttcacttttggtcccaagaatagtctcatttcagtaattaaaatattcagacccatgtaatagtcataagttggaactatatttgaagttaaagcttctcttttcccgcatcctgggcttccttcaggtaggaagcctgcactgggggaatgggaggatagcaggatgatcacccgtatgatcccctctggggcttctgcccctctctcctattccctggaaagtgttgagggtttggataagggataaaaacataccactttactgactacagtgttattttgcattggtttcctctggcctttgtagatgtttaaaactgtctttttttttctcatgggcacttcttggagattaccctgcttggctgctctggctatggctgcccaaattgatcacatagcctaccctctcagcttctgcatctcatggtgtggtttccagacagtgctgaagttgtcttgcatttggaaagaatgccctttgagcagctgatctccttataaaagactcctagggacctgtgtgttaaaacagacatctttaacacactttctgtgggagtgcaggtttttctctcaagcccaatgatctactctgctgatacagccaatatcagttagtaggcttgcgtatggatgtatcactcaggtatgcatcagacagtttgctgtgatatccaatatcccgggggacacacatcaaggctactgaacaatcttagtagctcaacagctttcaccaaagaaatcttcatttttggcctcctcaatttcagctcttcttatgtggtctagaggatgtggagctagcatgtagtctagtgggtagaggccccaggtttgggctaccttctgtgcaaggcctgaatagatggtataacacctccttttggaatgtggggatacttgtacctattttcttctctattttgagttgtagtcagaactagacagaatcaatctgtctacttttttaatatcctgttatatcatgcaaatctacttaataacaagcacattaaactaggcttatttgttattctctagttttctatagttttgattgactagtttcttaccataatacatttcatataattaaaacaaacaaatgtgtttcctccattctgaaaagatttggccactttatgggtacttcattgttctagcgttcttctaatttgtatagtgtcactttataggggcaaagcactctctgtagttagagattaggtaattagttaaattttcagttgtgtataagttttaaaacttctaaaagctcttgtgtctttcagtaactaaatgggtttccattagactatggccctttttaaaatagtgttggactaggttcaaagttttcagacctctattttaggaaagcctagggttctaaacattgttgaaaattctgtagatgtttggtttgaatttcattaaaataaaaaaaatgtgttgctaggttaactttttttttttgatacacccctgtctaaagctttttttaccatctttaattgaagagtgtcctgggattgcagggaatgtggtattaccaaaaaacaaacattggttactgtttgtaactacttatctttctgaatcaggattttcttggtattaggcatggaagcaaaatccagaagttacttgagtttgggtgtggatcttactgtatctggtgtctaccactcctgatatcaaatattgtattcatatctcattgtcctcctcatttgagttgtttcccattagtaaccttactgtctggcttaaatttgaattcgtgtttttgttttagacattacggactttatatatgaacaattgtgattggaagtacttaatttatgctttattttaatatttcttttctaggcatattgtattttagcaggatcattagtatctgaaggaggtatgtactgtcacaaagtatgtctctattcttaatttagtaatatatattcagctgtccattattatagtttgctaagttctgttgattaaagaaaagcaagtgtgggaataggcatctaagctttctctacttttagggagtaaagtctttgcataatgtactgtggttgttctgtaatggatagctgtgggggggtgtgtaactgcgccctgccatgggatggcatcctggcaaggcctcatttctctttgtgtcctgagctgctaggataggctcaagtaggtgactatcagatagatggaagacagtaactgatgtggcatgaaagcgcttagcaagcccaccatatttgtggttatttttaaactatgtggtggtaagaggtgttccttacagttttcactttgcaagcattattccttgattgaacccaccaccactactatcgctgttacttgccgattcactaaaaattggataaataattattttacttatttaaaagggaaagtatgtttcatttttgagtatcataccataatactcaaaacatttgaaatggagtataaaaaacataattaaactgaacttttaaaattagagtttaataatattcaccagaagaatattatttactggctcttgtgagacaaatatttcaaagtttttgaaatacacagctatagcagtatgatgacagagaactgctaatatcagtataaaactgcctgattcactgctgtgctcatgtttacttctgaaacattgtaactttctatgtataatgttcccttcatctatttttaaaattaacattttttattgacagatcctaattgtatatgtttatggggcccctcatctttgaaagtctatgaaatggttataacacaacctgcttcaaaagattgggaggctcagaaatgaatgtggttagtgtggtgctgccaaatagcagctcttcaataaactaaagctgttgttattagtaattatatttaattattatggtttagaactatggggttcattttattataatgattaattgataacaactaattaacatagaacttgtccttattgccaaccctagttttaaaatgttgtgcttatttgtttatcttttgagatgccatctttaaagtttggaggcatgaagtttctgtcttgctgatatgaatgcttttcttttagcaacacttcttgttgctgtaaatgaacttcgtaggaatgctcgggctaaaggaatgtcattttacaagtatggtatgtattttagaaaccaagtgtttgtttcacctcccttatttgcttaaaattacttagtactgttattgctttgttcctaatagaaatgtacaaaatatatctgaatatcatccctgtgtggctcttacatatccttcagcccttattaaaaagaaatgtagtatagaaatttgaacatggatactttatatttggatttgacttaagtgaactaaggtatttctttatatggttatataacttgagaaagtaatttgactttatgtatcagttattgttgacatttaagccaagaaattatgtttgcattgagcaaggtttttaaaatcataatctctcatacacttttttatcttaacttatatcttgattttaaatggatacttattaaaatgttacctgatagtatcaagttaagattttagaaattttcttgtcttgtctcttccccaatgactagtaatggaaagtcgtgatcctagtacaaatgtgatattattggaggatactgctgcagtcttgggagttataatagcagccacttgcatgggccttacttctataacaggtaaatattccttaaattacaggtgatttatttgtcctacttaaataattctctaatatgtgggaattttctcttatatcattgaataatattaaaccaacaaattgttaaatgttaattcctactaatcattgacttatgtaagacatttggtcagcagaagtattcaggtttatttgaattaaaaatgtctctaaattagaaataaggaaggctatttgtaaaggatttctgtaatgctgtacgtctttctagctgtgacttaaaaaattgtgcaatcactctgaactttttatttacctataaaagtgtggataatatttaccttggtaacctcttaggtttattaagaaaatatgagagttttaataaactctaaagttccaaataaatatacataggtcctcaaataacattgttttgttcaacttgattttgttataacattgttgcgaaaaatatcaattcctaactggagctaccatctctgtggagtttgctcattctccttttatctacataggttttctttgggcaccccaacttcctcccacatcacaatgccgtacatggtcagtgaattggggtgtctaaatagtcccaatctgagtgagtgtgggggtgtgtgtaagtgtgccctgccatgggatggcatcctggccaggtctggttccttcctgtgtcctgaactgctaggataggctcaagtagatgataatcagacaaatgcaggacaataactgatgtatgaaagcgctcagcaagcctacatatttgtggttgtttatttttgaattatgtggtgataggtgttccttacaattttcactttgcaaacatttattctttgatttaactcaccacccctactattgctgatactcactgattcaccaaaaattgggtaaataattattttacatagtttttattaatttttaaaaatgtatatgtagcccacatttatttcagtgttcaatattagacatgttttgggtcttagaagttgagtgatgtttttgtgaccagaaatatgccataggaacttaactctttttttttttttttgagacagagttttgctcttgttgcccaggctggaatgcaatggtgccatgtcggctcactgcaacctccacctcccaggttcaagcaattctcctgcctcagcctcccgagtagctgggattacaggcatgcgccaccacgcccggctagttttgtattttcattagagacggggtttctccatattggtcaggctgatctcaaactcccgacctcgggggtgatcctcccaccttggcctcccaaagtgctgggattacaggcatgagccaccacgcccggccggaacttaactcttgtttgtatcagttagcttatggtaaaattggttttgttatatgttgttccctataaagtcgcagtttctaagaacctattgacaacatgaatgaggacttaaccgtatattgtggctcttgttcatttgtctttttccacacttaatgccaataataactactgttgccttcctatttctttaattctaagttgtttgtgtccttattttggtagctaattaagtgttttgagggccaataaaatacaagtaaatgaaaagacaattctattttatttttattttcgaaaacaaccatttagcatgaaaagactcaatttatgaagttggaattctcttggaaaggaacttcttccatacttctctatttgtccttacatatttaaaataattttaggtgacgagcttccacagttctgcagtgtttcttcaaatagtctgaaatatgaatacttctttctcattctgagtgtgcattttaataccaaactagcattctctgatgtttattgtgatccaaaatatttgtaaaaatgttgattgtttttctggttgaccatatagttttagactgtttttgaacataaattactagcaaaattttaggcttaagaaaagtgtgacttgatgcagatgtcaactttgaataatttattttcttttacataataatagaaaccaatcaaatcaaatttacaaaaatatgtaatgtgttttacatgaattaaatttttcttaattagctaatttattcaaattaaattaaataacatgccaagaaataaaagttttcttaaaaaaggtattttctttcagctaatattcctgtaatttctttaagagtacatgaatgtatatatttaaataaaaataactcttcacatttggatttctaaagagcagtatttgattttgagctctataattacaaaacttctaatggataatgttttacaagcggatcatttttaacacttagtatagattaacaagtttgctttttagtgttacagcttagcaaaatatatgttttatcaagcattaagaagagttaaatatattgatgacatttcatctttgggataaaaagacttgtagtcataaaagccatgtgtaaaatttattataaagatttaaaacgtatttattggtgtctattatataaatattacctatacattcatagatgataaatcagcctttctcattggttctgggagagaagccctgacaacctaaggcaaatattagaatcagaatcacctgaagggcttggggaaacacagaatgctgaaacccacatccagaattttttattcaggggcctgaaatgaggtctgagaatttgcttttctaccaagttttcaagtgatggctgctggtccaggaaccacactttgagaagcaccaccttgaggcacctatggcatgtaatgaattaagttctctcctttttatctagaatgatactagctatatatcatccttggttggatgagaagagagtcacccatattattttctgtagggcttaattctcttacagaacattagtaggaagaagatacggaaaaaggtttctttcagcttttgattccactgttattttgtctatctggtgtaggaaaagtgctatggatatatctaaaagaaatggactcttcattatgtcatttttttgtattggtgtctctaatctaaatgtgctcagaaacttcacatatgtaatgacaggtacaagtaagagatcttaattatgtcacatagtactcttatgaaagcaagttgtagcatcctcattttgtggtatattaaaactattaggagttgttaaaggaagtaattaaagaaattaggaataaatttcaagtgccttgatttactcgttctggttctttgctctctataaagttcactgaaataatataaactgttaatttactgatttttttatgtgcttcatttaggcaatccactgtatgacagcctaggttctttgggtgtgggcaccttattaggcatggtctcagcattcctcatctacactaacacagaagcactcttagggcggtccatccagccagaacaagtacaacggctcactgaactcctggagaatgacccatcagtaaggtcagccttattccagtaatcctgttaaggcttacaaaaacatattaaaaaacagaaatgcctggtttgtaaatacttccagaggaagttttggattcctcgtcttcagaacgttttagtctgtaacttttcagaattataatcctggaagtaagaaagaatacacttaggaaactccttctaagtttccttttaaattttctatacttctaatttttagagtaaggaagagtcaagttgatataatgagaatggaagtttgcaaagtagttgtcttcttagtggaaatacttaatatggaacctgtagagttgccttatattcgcattgcaattacaaattgaatatattaaatttaaaaagatttttgttcattgggcaatgattaccaaattaaatataatttatatttactttgaaaatagactttgttttagcttattttaagtatttttcttataatctttatcttttaaattatgtaaaactaaagaactggagacttaggagataatcagcagaagagatacagaattctaatagtgcttttcagtgaaattctagcagcattgtggttttataatgaaataaaagaacaaacctttaaaaacccagttttctactaactcgctctatattttttcaaactttaaaataagatttttttgtgtattgtacttgaaatctttaagttaaatctttttaaaatgacccgtatatctgaattagtaaaatatattaatgattactagatttatattctatgccctatatgtttaatcttgaaaagtaactatcttattggaacaagattagaaaatgagagatgggcacagtggcacatgcctatagttccagctacttgggaagctgaggcaggaggatcacttgaggccacgagtttgaggctagtgtgcaatgatcatgtctgtgaatagccactcactgtactatattctgggcagcatagcaaaaccctgtctcaaaaaaaaaaaaaaaaagattagaagttgagcattatgaaagtcagtattagagttattaacataatgtgagataatccaaattaatatcctttctttgtgatgtttttgtctggttttggtattaagataatactggcttcagagaatgagttgggaaatgttctctcctatttttttggaagagtttgtgaataattggtgttagcttctttaaatggtagaattcaagtatctggatatgagctttgctgtgtgggtagttttttgattagtaattatatctcttgttatggatctgttcagattgtctgtttcttcttgacttagtttaagtagcttgtattctaggaatttgtcttttacttctaatttacctaatttgttggtatacagctatttataatattcctttgtaatccattttatttctttagtgttggtacaaatgtctcatctttcatttctgtaatttgaatctctccttttcttggtcagtgtagctaaaggtttgttcattttcttgatctttctaaagaaccagcttttggtttaattgactttctctgttgtttttctattttctttttcatgactttctcctttaatctttattatttttttccttctgcgtgctttcagtttagtttgctctttttccactgtcttaaggttaagcttttaatttgatgtttcttcttttttaaaatagacaattacagctacaaattttcctttaagtattgctttctctgcattccacacatttccatatattgtgccattttcattatctaatagtattttctaatttctttttttattcttttcagttatttaggggagtatgtcacttaatttttacgtatttgtgagttgcacagatttctttccattattgatttattattttgttctattgtggtcaaagaatatgttttatattagttctgtccttttaaatttaccaaggtttgttttatggccttacatatagtcttggataatattcatgtgcacttgagaagaatgtatattctgctgttgttgtagagtgttctgtagatgtttgttaggtttaattggtttatagtgacttcaatttccctaattatcttcttgctctattgttctatcctttttttttttttttttttagatggagttttgttcttgttgcccaggctggagtgcagtggcacgatcttggctcactggaacctccgcctcccagattcaagtgattctcctgccttaccctcccaagtagctgggattacaggtgctcaccaccatgaccagctaatttttgtatttttagtagagacgaggtttcaccactggccatgttggccaggctggtctcaaactcctgagagacgaggtttcatcactggccatgttggccaggctggtctcaaactcctgacctcaggtgatccacccgcctcggtctcccaaagtgctaggtgtgagcaccgtgcccggcctctgtatccgttactgaaagtatcgaagtctctagttattgttgttgtattagctcttcctcccttcatttcttcttggttttggcatcatatattttggtgctctgttgttgctacatacatgtttataattttgtatatattgtttaataagtaatgtctaaaaaagagctataaactgaaagactggcaaattcgaaattttgtggaagagtgaatatctgtggattcaattattggaaaaaatacgttagtaatccagaaaattcatacaatttttttaaacagtatattagttacctactgctgtgtgacaaattggcccaaaacttagtggtttaaacaacatattaccatcttacagtttctgtgagtcaggaatcagggcacagcttatctgggtcttcgacttcagggtttctcatagactgtaatcaaggtgttgactgggattatagtcatctcctggggaaggggctgcttctaaccttactcacatgattgttcgcaagatttagctccttgccaaatgggcctcttcaacatggcagcttgcttaatcaaagcgtgcaaattgataaggcaatagagagcgagtgtgaacaagacaaaagtcacaggttagtcacctggtcttggaaatgacatctcatcactttgccatatttggtagttatagcccacattcagtgagaggagatcacacaagggcttgcgtataggtggcagggattgatcatatgggagccctccaaacagttttctgtctgtagttagttatatgtaagaacataaggaaaaagtatatctaaatatatttattagttgctactcacataccagccaaataatgaaatgtgtttatactctgtgaagactaaagtagaaatgatttttgaaaatgaataaatatgttctgtgagttaccaggagagaaaaaaaaaagaataaatgatatagccttttgccaatctgaaaaagttttgttttaacttgagcacatgtaactataaatattaaaacattaattcttatttcatccttgatggttgattaaaatatagcttccttatatggataaaaaattttggactcagtgtttagtaacctgctcaggatccctcagaaattagggtctaatgttgtaagaatacttggagtcttacgtaggcttgtttttctagtaaatctccatgtcctcagaattcagagtgttttgttatttcttatatgtgctgtacagaaaagatcttacagtgatcactgtagaaagaagagaatttctcagcagtttctagggaagattgtttactgagggttagagcaggaggggtgaaaagtagttatgcttgagtatctgctttcctgtctgggaggcaaaagggtatgatgcaaataccactgggcttgcatttctgaagagctgggctggggagtcctaatctgctgtttactagctaaattaccttgagcaagtcacttatgccactctaggatggttttatcatgtataaaataaagatgtcaccctatccacttatgaaagccatccattaaatgcctgccttatagttcttactgtattaaacattttatatatgtattagctcattattcctcacatcaagtcccatgtggcagttattattaacctcattctaatagagaacttcacagcattgtatgaagacttttaaagaagctagtgaacatacaattggttaatatactctacaacaccattataaattaaaacaaatttttatatggcatttaggaaattgataagtagatatatggagacaaaggcttatgagataacatgacattttagaaaattgatttagagttaatgaatatatatatatatatatatatatatatatatatatatattttttttttttttttttttttttttttttttgagacagagtcttactctgttgcccaggctggagtgcagtggcacaatctgggttcactgcaacctctgcctcccaggttcaagcaattctcctgtctcagcctcctgagtagctgggattacaggcatgcaccaccatgcctggctaatttttgtagttttagtagagacagggtttcaccatattggccaggctggtctcaaactcctgacctcaggtgatcctccctgctcggcctccgaaagtgttgggattacaggcatgagccactgcgcccagcagagttaatgaacttttaatacatgagctttataattcataaattaccataaaataatatttgttaagtttgcacctttgtatgatatcatgccaaaaaaaaagctaaacggacaggccttggaaaatgataggtggtacttaatggtgaatactctgaagccatcttagtccattctcgtaactagtggggaaaaaaacaataattcaagcctttgtgctattaaagtatatatatgtgtatgtatgtataaataaatttgtatgcattgttattgattgcagggcaattcatgatgttaaagccacagatctgggattaggtaaagtaagatttaaggcagaagtagattttgatgggcgagttgttacaagatcatatttggaaaaacaagattttgaccaaatgttacaagtaagtttatttgttgttttcttacataactgagggttagaaaaatgcttttaaggtaaacaaaatgaaatttttttttatagatcttaaaggcactttagctctcaacttcttaggttccaaaatttaacagagacctttatatttactatggaggggttcagaggagacagcaaaagaacaaacttactatttcatgcttgctatgtgcatttaatctttttttatctaatttaccctcaacaaccctgttatttcaacaatgaaataacatttttattttaacatatatagaaattgaaagacagagattaagtaatttgccttaagttgtagtgccacagagatggagtcatatatgaatcgagatctgcctgactccagaatccatttttttattaagaatagtttaaaagagaatttataaaacagaatataatgaacagcacagatgttaccacttgcccctgtcaaatcttaacattttgctatagtgtatttgcttaaggtcttaaaaaaagaaataattacaaaaacaattcaagcccccattttctctttctatatctcattcttcttcttccatccctagaattaaacattatgctgaatttggtacctgtcttttccattcagatttttatacttttcagcattttttagtgtaatatgtaacattttgaatgtttaaaaattggtataaatggtatcctactgtatgcgtctctacaattggcataacaacatattttttagattcttccgtgttaatttatatatctctagtcagtttaccttcattgttatagagcatttcatcctatgaatatgctgtaatttatttattttgtctccagttgatggacatttatattactgttagaaacaatgccatggccgggcgcggtggctcacgtctgtaatcccagcactttgggaggccgaggtgggcggatcacgaggtcaagagatcgatcccatcctggcccacatggtgaaaacccgtatctactaaaaatacaaaaattagctgggtgtggtggtgcgtgcctgtagtcccagctactcggcaggctgaggcagtagaatcgcttgaacctgggagttggaggttgcagtgagcctagatcgtgccactgcactccagcctgggcgacagagcgagactccgtctcaaaaaaaaaaaaaaaagaaagaaacaatgccatgattgcattctcacacgtttccttgttcacatatatgaaaatttctttagtatggtgtatatatagatagctagattttaaataggtgggccattgggtgtacttaccttcagcttgcctaggtcttaccaagttattttccaaagtgtgtcaatttaacttccatcattgtatatcaaggttcttgcttcctattcttacatgattgtattaatagagttattaaatttttgccagtttgataggtgtgaaatagtatcttgttctaattttatttcttggagcattgaggttaataaacattgaagttcattgaccagtgggatttcctctacattgctccctgatttttcatgttttaagttcatttgcattacacttatagatttgaaaggtctttattttattgcattgtattattattttttgagacagagtctcgctctgtcacccaggctggagtgcagtggcgcgatcttggctcactgcaacctccgccccccaggttcaagcaattatctacctcagcctcccaagtagctaggattacaggtgcctgtgaccacacccggttaatttttctatttttagtagagatggggtttcaccatcttggccaggctggtcttgaactcctggaaaggtctttatttttaatatcctggatgctaattcttacttgtatatatgcaattatttttttctagtttataacttccttttctttttgttgttatacaaaatatttaatatgatttttaattttaatgtgagatttgtaatcttttcctctgtgctttttattcttttgcatgaaaaatccttccatatcccattatcataaaaatattctcttctcatctagtagttttgtggtttgttttttacccttatgtctttcatccactttgaattattttaatggtctgacatagggattcaatttttttttcttaagggaaaatattctaacactatttattgactatattatttccccagtaattttgtagtgctacctctgtgtagtattatactcagttttcttgatccgaattgttttggaaataggtaatccattgcctgtggcttaaagttttaaaaatgttcattaaacttaatggcgtttgttataggtttgtttttttttaaggagtcataagtgtaccactatggttttttaaaaatttattttcctgttttcattttctttataggaaattcaagaagtgaaaactcctgaagaactagagacctttatgcttaaacatggagaaaatattattgatactttaggagctgaagtagatagacttgagaaggaactgaaagtaagatgtattcataaaaataacataatgataatggcagctatttttttgagtacttactctacagcagacactaagtgcatccatcacatgcatgctttaacccactcataactccacagtgtgtaggtatttataagcaagaaaatgactgggttagataagttgaataatttacccaaggaaatagggaaattgtgatttgaaccagattctttacttttaaacactattttatgcagcctgcttagtttctaaaatagtcaaagggggtttttttgtttgttaataaataagcattttgaaagttcctagagaaagatgaaaaggaaactttagactgtggtcaaaagttagaaaaaatagaatgtatatcttgcttttagcccatttgaaattattttctgtttttgtttgtttctattcagttggatgttattgtaatttattgattatgttactgaaatattacctgatcctgatcaggttgtcttttaaaatgtctcagtgttctcaaattgccatttattgacatttgaattctgtttgcaatgaataaaaacttgtaaatgatctttaatgtatataatttgttgaaggcagtgctttttctgcagttgatattgaccattctttaattttgtaaaaaattgaagaaaaaaacttccatctctacttttcaagttttcctttgagaatctggatatccgattagattaatacaagtacttcaaataagattttgttaatattatagttcatgagctttatctgacataatttttgaattttctagatgatattttggtcttaagacgctttcattcttaaaaattattgcagacctcaaagagattttatttatttgagttatagttattgatatttaccaaatcatgcatgaaagtagataaattttaaaatatttatcatttacttttaaaaacatacacctatttaatataaataactttttttttttttttaactaagaatctcactctgttgcctaggctggagtgcagtggcacgatctgggctcactgtaacctccgtctcctgggttcaagcagttctcctgcctctgcctcctgagtagctgggactacaggtgcctgccaccatgcccagctaatttttgtatttttagcagagatgaggtttcaccatgttggccaggctggtctcgaactcctgacctcaagtgatctgcctgccttggcctcccaaagtgctgtgaagtgctgggattacaggagtgagccaccccacccagtcacatttttttttttttttaactgagacggagtctcgcactgtcacccgtgctggagtgcagtggcacgatctcagctcaccgcagcctccgccttccaggttcaagggattctcctgcctcagcctcccaagtagctgggataacaggcacccaccaccacgcctggctaatttttgttttgttttgtacttttagtagagacagggtttcactatgttggccaggctggtcttgaactcctgaccttgtgatgtgcccacctcagcctcccaaagtgctgggattacaagcgtgagccaccatgccaagcccacatttttatataaatagttatattttccaaaatgaaaaaacgtagttagaagagtgatatttcacatttttgcaaaagtctcttatgcctggcttagtagaagacagctacattcccatatctgcttctgccttcagttgtagtgatttgattgtttggccgaagaacatgaaggaaagggagaactgttcctatagccttttgagataattgtgatactctcttttggtgttataacagctggtagaaaccaaatcaatgaatgaacttctcatatgctacttgtgaaggtagggggcacagtctacaagactgtccttccttctaataccaactgtgagttcaggaggttccctagagcaccttcagatttaataactcactaggactcttagaactcaccgaatcatgttatacccatcatggtttggtttattacagggaaaggatactgcttgaaatcagccaagggcagaagaagtgcatagggcagggtccaggaaagttccaaacatgaagtttcagttgtcttttctctgtaatgcatagtattactctcctggcaatgaagtgtgacagtagcatgacgtgttgccaaccgggaagctcatctgagacttgatgaccagagattttattgaggctccatagttgactgcataagtagctgaccttttgtctctagcccttctagaggtagagcagatactgtgtggccaaaggcccccatcatatatcacattctaaagttaatgcccccagataaacaaagacactcttaggcaggacatgtcaagggcctagaaattccctcccggttatggagaacaaaagccaaacctccctttgggtaagattaattctctactatacactgttatattaaaatctgttggtctatttttatactctgaatgaatcttttacccatgcatgattctataacattatgaattagtattttggaaaatactggttcacagaagtacttagatctttcagatgttgatacatttctaaatatgggtacactctcaggctgatggggtggatatgtttttcaacttaaatttccacttaaaagcttgcattttatcattagcaacaaatactgttgttttccttgaaataagactcattttgttcattttttaggagatgcctgccaaatacccaaatttgaataaaccgagtttgttaatctttcaaataaaaatgtactctagattaaaaagcagtttattcagctcacaacttaagcaatcaaagaagtacttttacgtactttccattttgtcacagtatttttaaaagtgaactcaagggtttaggtttaataaaatggatatatttgctatttcatgaaagacttttttaaatgaaactggctttttttttaatgtcaagtgtgggacagtagagacaatgactactggtattgtttgatgccatttgtgttgaattgtgcaaaggtgcaagcagttttacccaccattgtttttatgccatcaggaaatgtcagcatagtaaaaaaagcaaagaatgtcttacagttactgtgaaaatagttgtgaccttagagtccccctaaaaaggtctcaggaccccagcagtccttgaaccgcactttgcaaacaactaatctgtataaaatgtgagacaatggttatttttgtgcaaggtagcacaagattgaataaactttgctctttattctacttgtttttattttgctggcaaggaaaataatggactaaatatttgctttacattttagtagatacaagaaatcagaagccagatttaagaataatcaccaaattggtccttgtcacctacatttactcttacaacaatcagaccttattgtttttgtttagctaactttgtactttaactagaggctattaaatcattaataatgtttttgaattatgtaagtctttcaaaccaggaaggtaagtataatccatacattcaggtggaaacgtctttggctaagataataaagcatggccgggcgcgtgcggttgctcatgcctgtaatcccagcactttgggaggccgaggcgggtggatcacgaggtcaggagatcgagaccatcctggctaaaatgacgaaaccccgtctctactaaaaatacaaaatattagccgggcgtggtggcaggcacctgtagtctcagctactccggaggctgaggcaggagaatggcatgaacccaggaggcagagcttgcagtgagccgagttcgagccactgcactccagcctgggtgacaaaccgagactccgtctcaaaaaaaaaaaaaataaataaataaaataaaataaagataataaagcataattaatcttaagtcaaaggacatgttcatagttgaggtgccaaaccaaaagggaatgcatgaatgtaattgtttttcttagtcatgaaaataaggtgatttccttttgaaaactaaaactttgttcactggcatattccttcatttttagtatctcagtttaaattgtaattattattggattattttgggaggtcacactcatttatataattctgtaccagtggagtcatctctgttgagtaatgccattgagtgttgaaatagattatatttttggcttaaaattccagaacttgtggctgggcgcagtggctcacgcctgtcatcccagcactttgggaggccaaggcgggtggatcacctgaggtcaggagttcaagaccagcctgaccaatatggtgaaaccccatctctactaaaaatagaaaaattagcttggtatggtggcgggcccttctagtcccagctacttaggagtctgagacaggagaattgcttgaacctgggaggtggaggttgcagtgagccgagattgtgccactgcacttcagcctgggtgacagagcaagactccatctcaaaaaaaaaaaaaaaaattctagaacttttgtatagttatctgtaaaggtgttaaaaataatagagactaattcatagattcccatattacaagataggaactacaaaattaatataaaatatatcttgttattattttgaagttctttgacctgttaaacattttttgtcttatctctgtatttcagagtatagataaacctttctcctatccctccattaagttttttgtttatgatgattaatggaaattagttcattgggaggctgctgtagcattcataaattccttataaataatggctgaattaaatgctctgttctttactttgcctttgtttctccagtttctcttaaagcattgtttttaatgaatctgcagcattgtaaaataaattatgtaatttgggctttaactctctgcaagtattggaataaaatcctcatggtgtgtaaaatagcctaatcggtattgagcaatgcaaggaatatagattttaaagtatttgttgaataagtgggtgaaaattttaaattggataccaattattgattttcagttctgttcaataaatattagtttctactatacacatgatatcttgttaagcagtaaacattgaattttaaggatattaatcatatttattcattcagcatatattgtgtgctttgtattgtgcacatatacttttacaaatttgattagtttactctgaaaacttgattttaaaaagcagagcaaatttttaggcttttttttaagataaagcttttattagtacacatttatttatatcatgctttttagacagaataatgtcaaacttaatgaacaggtaaatttttcaagtcatattaggataggtaagggttgattggagtaggaagatacaatttagtttcatttctgtttggagaatttttttttaattctatattgagtttaaggagttctagagacagggaatagttttaaataaggaaaaagttgggaacaaaagtgtgccctccttgttaaaaggtccctggtcattcccacattaggatctaagaggaaagtacccccaggcacacctgagcgacactagttataagaaaaatccctgtgtgcactcagtagagtgttcttgctggagcaaaactccaatattctgccagattttgtttttataactggatgcctttaatacaagtaatatgcacatggtcctaggatatttttaagctaggaatcctaactgaatcatttacaggaacttttctcccctttttatttttgcaatttttatcaataatgcacaaagtttataaagtcaaatagaactgaaaagattataacagaaataactatcactgcctcacctgcctcagtacttatattttaagagataaccatttttaatacttttagtatgtctttatttattgccatatttctgcataaaagtcttatactacttctcttgatttaacagtatttcctctacgataggtgtagatttagttcttttatacactactttctgtcctcccttctcacagtattaatatgttacattttattatatttgtaattccccttaagttgatttaggtgcccttcctttattttattttattttttatttttttatttttttgagatggagtcccgctctgtcgccaggctggagtgcagtggcacaatcccggctcactgcaacctctgcctcccgggttcaagcgattctcctgcctcagcctcccgagtagctaggattacaggcatgcgccactatgcccagctaatttttgtactttttaatagagatggggtttcatcatgttggccaggatggtcttgatctcttgaccttgtgatccgcccgcctcggcctcccagagtgctgggattacaggcgtgagccaccgcgcccggccaggtgcccttcctttgtgcactcacaggaaaaagaaacccaaaatctttactttgctctgtggtagccgagtgttgtaattgcctacttaatttacctatatcacctcactaccaaacgtaagtccactgaaggcaaatactgtttgttcccagctcattgtcatatacacttcaatgcctggcacagagtaggcatgtaatagtagacagtattggttgttattgaattgaagttccttaagctagcatataagatttttaacaacctgatttctgcctgtctttccagcctcattaccaaccctaccctttttgcagcttctgtgctagctataccatagtgccagtgcacactttgcaggctgtctgactttgctgatgttgtgttttctgtctagacactcttcattatctacctggaaggctcatcatatgcagacctaccttagatattatatcctcagtgaaattttctagatctcatgagcaaaatggctgtctcatttttgctcccagtgttattatttagtacagtgtaataggagcttgggatctggaatcaggcctggagtcaggcctggaatcaatcctggctccatcacttactagcagtgtgacttcagacaggttagttaatttcttcgtacttcagttttccctgatgtatgtataagatggaaatagtaattaggttatgaggcttttaaaacacacatacatgtgctcatgtaacacagtacttgatacatgagtgagtaagcaataaatgttaactttttattattagctctaatactttaacttgtagatgattactgctatgctggtctccctagctaaactgagtcactcagggtcaggaacagagtcttatttaataatcatagctctgttttctagcacagggcccggcccaagaatatatggattgttgctaaagtatataaaatgagtggttgtcaatttactctttttgattattattgttttgcagtgattttgttttcaccacacaaaaatgtgtatttccagtgcttcgcaatgcttggcatgtactagatccttaatgcacttttgtattaacaaacacatgaacaaacttaggaatgtgatactacttattgtactgtttatagtatgtctatttacctattgatcttactttttttcttatgcaactatttctctcattagtatgctatagtgaaatagtttgcaaatgttttcattggctctaatgaccaaaaggaataaaaagaaacaagattttattttgctacaaataatgtggtggtgatttttctttccagaaacgaaatcctgaagttcgacatgtagatttggagatactgtgagtttgatggaatgaatcacctgggtggggaccttggaaacaagtttgtccgtccactctacaaagtttcctcctctcctacactgaaagactcagtgccatgcagaagccttttttttaagatgaaggaaatattttatgtaaagagcaactcagcaggacacagaactaaaactactacttacatctaacagacacactacaagttgaatcaatttgaaaatcatgtttttatgcttccatagggaacattttggttatttaaattgttcataatgtcccatatttcacctgttcagtgtatactgtactttgcaatcatctttccttttttcacattggtaaaaataagtggcatccataggatcatgatttttaatttgttgcctctgaagatttcactccatcaagatctgccaatcttcaatattctggctaaatcttggtatgtggtttttaaacagtcactccgtttcaaagtctgtctttccttatagaatgtggaaattatttctccataccttgtgattttgacctgagtgctaagagaatcactctccttacctagttatctacaaatgttcattccagaaatgtttagttactgaattgaatgaagacatctcagtacactcttttaggtcatagtagttgccattttgtaaaatttcttttttcttctttgcttttttccccttatttggtttaatttttctaatgttaggagatatagtcctagatatttccatgggccagtgtgatgacttttttttaaatgaggttcagtaccataatgtttatttactggaagataatgcatttataagcattttaaaattctgtaaagtgggttagaaatatttataattttacaggcaggacagcatttgacttttatttaaaaggcggcactacttatgtaaatctgagctgtgggatatttcttgctttaagagagagacagaatctctcactgaaactcatggtcatgattttgtataatatagttcatactgtgtctgtgagtttcttcagttacaaatgggcatttagtatagttatattgactataacatgtaagtaaatagctttctactgaccctaagttatcaaggtggaaaaaaaacatgcaattcagtaattgaaaatgtggtgaaaagctgcagctgtcatcatcaaaacaactcataacatactttaaaatgttcaggtagcagtgagcattgttcatatgagaatggcggctgggtgatctctttgctgaattaatgagttcttaacatgtggacccaactgcctgtgtgagatctgtgtcttaaaacttactggaatggaaatctatgaattattgcaaattgtaatgctggaaacaaaaaataaatccttggttaaagggtttgtaatggtgatttttgacccagaaatctcatttactggaaaattgtgagactttacgttggtgtatttttcttttttttttttttactattacagagtattttgcatgctgtacattttaagtgaaataacattccagttttatttttaagatagaaaattgttatatatatatataatttgatactctattcttacagtttcaaattccttatcccttctttacaaaaaaaactttttttttacctgttatgatttattctatacttttttcttcttccttcccctttcccacttgccatttattacttcatgtcattgccatatgagaaagtaccaaattatatccagtttcctcctagtgatattactctgaaaaatttcacaaagccagacaagaataattactcattttttttcccaagacgaccctcaaagttaatgtgcagcaggtattccaaatggtaattttttttttttaggattccctaataaaaaaaaaaaaaattctgatatttctttttaaatctgattttggttgaggtcataccattcttaaataataattgaaggtttatgttgccatcttttctaattctgttttgcactgataaacttacataaagtttgtttatgtaaaataagacataaaggagtacaacatatcaaggaatttgagtatttatgtggaatcaggaaatttttctagagtcactgaattttcaaatcagagaatttgggctggatatggtggcttatgcctgtaatcccagcactttgggaggccgaggcaggaggattgcttgagctcaggaggtcaagaccagcctgggcaacacagcgagacctcatctctactaaaaaaagttagccgggtgtggtggtgctcacctgtgttagtccattctcacactgctataaagaaatacctgagactgagtaatcaaaaaaagagctttaattggctcatggttctgcagactgaacaggaaacatagcagcttctgcttctggggaggcctcgggaaacttcattcatggcagaatacgaaggggaagcagtcatagccagaggaagagcaagaggcggggattgggggtaggtgccacactcttgtaaacaaccagatctcatgagaactcactatacagtaccaagaggggaaggtgctaaagtattcatgagaactccacccccgtgatccagtcatctcccaccaggccctacctccaacatgggattacaattcgacatgagatttggtggggacaaagatccaaagcatatcagcatctgtagtcacagctacttgggaggccgaggtgggaggatcacttgagccccagaggtcgaggctgcaatgagctatgatcatgccactccagcctgaatgacagagtgagatcctgtctcaaaaagagaatttgggtctctttctccaaaaataaggctatatttagtttttcaggtttcttgttattttaccaaattaatgtttcttactttgtatctactttggcatatagcatttgagtattaaagcatataaatcatttttaaggaaaatattctctgcaggagaataattacaaaaataatactggacagaggaggggcagtcaagggtccatgattgattccttcttgcccaaaactaaaatctaggatttatcaaaggtgaggtatacagtggtccctgacttataatggttgcacttaagaatttttatgatgggtttattggcacataacccaataataagtaaaaagcatctgtacctacttttagctttggctgagaatggatctctaattcactgtaagtagcagtccccaaactatataaggtggcacagttttcatcatggcagtgggaggatgaggggtggagtgtttttgttttttttgtttttttttgagacagagtttcgttcttgttgcccaggctggagtgcactggcacaattgcagctcaccgcaaccttcacctcccgattcaagtgattctcctgcctcctgagtagctgggattacaggcatgcgccaccacacccggctaattttgtatttctggtttagacaaggtttctccatgttggtcaggctggtcttgaactgccgacctcaggtgatccgccctcctcggcttcccaaagtgctgggattacaggtgtgagccactgctccggtgatctgtttttaagtggagtatcctgggggcctatagtatccaactccaaagaggtaagttcctgaacatacactaaagaacctgtgagataagatcagacggaaaaattttcaaattttttcaaaagcaaaggtaatccctgcatacatcctcctacacacacacacatagtgcaaagtgaataacaaaatgtcataaggcttgagtttttggtatatggctttcagtgttaccttatctcataatttaggtaatgatttttgctaaaatgataaccatctaaagagtgcctaagttttaagtctcgtaactttttgaggaagaatgctgggaactacagaaaactgcataggcatttagaatttgtattatcttcttagactgcatttgtcaagctttggcagcatttcttttaaatgtgatgaaccccaatttgccaaactgtcagaagtcagtgaagcaaagaatcgaaggtaaaatgttgattcaaagattgtctcccctaaatccttcatttctttctctgaaatggaactttggaagccatttatatagattagtctgacagcctttatatttgcatgtaagtttacttgcatccttagacttggctttatgcaaaaagaaaatttttattcgttatattgtatttcatctgtctgatttccctggcacattaagatggtcctggtccctcaggatactttttcccttaataaatgtcatatgtaaataaaggcaactca

SEQ ID NO: 14112 - DNA, 6164 bp, Homo sapiens
aggcagcttgtggcggcgaagccatcggtgttcgctgatgtccagtctatggagtcagttggtaccggtggcggcgcggaggcagaaggcggtgtccgagtaggggcctctgccccaccaggatgttacccggcttggccgccgccgcggcccacagatgtagctggtcctccctgtgccggctccgtctgcgatgcagggcggcggcctgtaatcccagcgaccgccaggagtggcagaatttagtgacatttggaagcttttcaaacatggttccctgtagtcatccatatattggtaccctgagtcaagtaaagttgtactccacaaatgttcagaaagaaggacagggatcacaaacactcagagtggaaaaagtaccatcatttgaaacagcagaaggtataggcacagaactcaaagctccacttaagcaagaacctctccaagtaagagttaaagcagtccttaagaaaagggagtatggctcaaagtacactcagaataatttcatcactggagtcagagcgataaatgagttctgcctcaaatccagtgatctagaacaacttcgaaaaatcagacgacgaagtccccatgaagatactgagtcttttactgtatacttgagatcagatgtggaagcaaaatctttggaagtttggggaagccctgaagctcttgccagagagaaaaaattgcgtaaggaagcagaaatagaatacagagaaaggctatttagaaaccaaaaaatattaagagaatacagagatttcttgggaaataccaagccacgctccagaacagcatcagtgttttttaagggaccaggaaaagtggtgatggttgcaatttgcatcaatggattaaactgcttctttaaatttcttgcctggatttataccggttcagcaagtatgttctcagaagctatacactcattatctgatacttgtaatcagggtttactagcattgggcatcagtaagtctgttcaaacaccagatccttctcatccgtacggattttcaaatatgcgctatatttcttcgctaattagtggtgttggtattttcatgatgggtgcaggactatcttggtaccatggagtcatgggattgcttcatcctcaaccaatagaatcccttctatgggcatattgtattttagcaggatcattagtatctgaaggagcaacacttcttgttgctgtaaatgaacttcgtaggaatgctcgggctaaaggaatgtcattttacaagtatgtaatggaaagtcgtgatcctagtacaaatgtgatattattggaggatactgctgcagtcttgggagttataatagcagccacttgcatgggccttacttctataacaggcaatccactgtatgacagcctaggttctttgggtgtgggcaccttattaggcatggtctcagcattcctcatctacactaacacagaagcactcttagggcggtccatccagccagaacaagtacaacggctcactgaactcctggagaatgacccatcagtaagggcaattcatgatgttaaagccacagatctgggattaggtaaagtaagatttaaggcagaagtagattttgatgggcgagttgttacaagatcatatttggaaaaacaagattttgaccaaatgttacaagaaattcaagaagtgaaaactcctgaagaactagagacctttatgcttaaacatggagaaaatattattgatactttaggagctgaagtagatagacttgagaaggaactgaaaaaacgaaatcctgaagttcgacatgtagatttggagatactgtgagtttgatggaatgaatcacctgggtggggaccttggaaacaagtttgtccgtccactctacaaagtttcctcctctcctacactgaaagactcagtgccatgcagaagccttttttttaagatgaaggaaatattttatgtaaagagcaactcagcaggacacagaactaaaactactacttacatctaacagacacactacaagttgaatcaatttgaaaatcatgtttttatgcttccatagggaacattttggttatttaaattgttcataatgtcccatatttcacctgttcagtgtatactgtactttgcaatcatctttccttttttcacattggtaaaaataagtggcatccataggatcatgatttttaatttgttgcctctgaagatttcactccatcaagatctgccaatcttcaatattctggctaaatcttggtatgtggtttttaaacagtcactccgtttcaaagtctgtctttccttatagaatgtggaaattatttctccataccttgtgattttgacctgagtgctaagagaatcactctccttacctagttatctacaaatgttcattccagaaatgtttagttactgaattgaatgaagacatctcagtacactcttttaggtcatagtagttgccattttgtaaaatttcttttttcttctttgcttttttccccttatttggtttaatttttctaatgttaggagatatagtcctagatatttccatgggccagtgtgatgacttttttttaaatgaggttcagtaccataatgtttatttactggaagataatgcatttataagcattttaaaattctgtaaagtgggttagaaatatttataattttacaggcaggacagcatttgacttttatttaaaaggcggcactacttatgtaaatctgagctgtgggatatttcttgctttaagagagagacagaatctctcactgaaactcatggtcatgattttgtataatatagttcatactgtgtctgtgagtttcttcagttacaaatgggcatttagtatagttatattgactataacatgtaagtaaatagctttctactgaccctaagttatcaaggtggaaaaaaaacatgcaattcagtaattgaaaatgtggtgaaaagctgcagctgtcatcatcaaaacaactcataacatactttaaaatgttcaggtagcagtgagcattgttcatatgagaatggcggctgggtgatctctttgctgaattaatgagttcttaacatgtggacccaactgcctgtgtgagatctgtgtcttaaaacttactggaatggaaatctatgaattattgcaaattgtaatgctggaaacaaaaaataaatccttggttaaagggtttgtaatggtgatttttgacccagaaatctcatttactggaaaattgtgagactttacgttggtgtatttttcttttttttttttttactattacagagtattttgcatgctgtacattttaagtgaaataacattccagttttatttttaagatagaaaattgttatatatatatataatttgatactctattcttacagtttcaaattccttatcccttctttacaaaaaaaactttttttttacctgttatgatttattctatacttttttcttcttccttcccctttcccacttgccatttattacttcatgtcattgccatatgagaaagtaccaaattatatccagtttcctcctagtgatattactctgaaaaatttcacaaagccagacaagaataattactcattttttttcccaagacgaccctcaaagttaatgtgcagcaggtattccaaatggtaattttttttttttaggattccctaataaaaaaaaaaaaaattctgatatttctttttaaatctgattttggttgaggtcataccattcttaaataataattgaaggtttatgttgccatcttttctaattctgttttgcactgataaacttacataaagtttgtttatgtaaaataagacataaaggagtacaacatatcaaggaatttgagtatttatgtggaatcaggaaatttttctagagtcactgaattttcaaatcagagaatttgggctggatatggtggcttatgcctgtaatcccagcactttgggaggccgaggcaggaggattgcttgagctcaggaggtcaagaccagcctgggcaacacagcgagacctcatctctactaaaaaaagttagccgggtgtggtggtgctcacctgtgttagtccattctcacactgctataaagaaatacctgagactgagtaatcaaaaaaagagctttaattggctcatggttctgcagactgaacaggaaacatagcagcttctgcttctggggaggcctcgggaaacttcattcatggcagaatacgaaggggaagcagtcatagccagaggaagagcaagaggcggggattgggggtaggtgccacactcttgtaaacaaccagatctcatgagaactcactatacagtaccaagaggggaaggtgctaaagtattcatgagaactccacccccgtgatccagtcatctcccaccaggccctacctccaacatgggattacaattcgacatgagatttggtggggacaaagatccaaagcatatcagcatctgtagtcacagctacttgggaggccgaggtgggaggatcacttgagccccagaggtcgaggctgcaatgagctatgatcatgccactccagcctgaatgacagagtgagatcctgtctcaaaaagagaatttgggtctctttctccaaaaataaggctatatttagtttttcaggtttcttgttattttaccaaattaatgtttcttactttgtatctactttggcatatagcatttgagtattaaagcatataaatcatttttaaggaaaatattctctgcaggagaataattacaaaaataatactggacagaggaggggcagtcaagggtccatgattgattccttcttgcccaaaactaaaatctaggatttatcaaaggtgaggtatacagtggtccctgacttataatggttgcacttaagaatttttatgatgggtttattggcacataacccaataataagtaaaaagcatctgtacctacttttagctttggctgagaatggatctctaattcactgtaagtagcagtccccaaactatataaggtggcacagttttcatcatggcagtgggaggatgaggggtggagtgtttttgttttttttgtttttttttgagacagagtttcgttcttgttgcccaggctggagtgcactggcacaattgcagctcaccgcaaccttcacctcccgattcaagtgattctcctgcctcctgagtagctgggattacaggcatgcgccaccacacccggctaattttgtatttctggtttagacaaggtttctccatgttggtcaggctggtcttgaactgccgacctcaggtgatccgccctcctcggcttcccaaagtgctgggattacaggtgtgagccactgctccggtgatctgtttttaagtggagtatcctgggggcctatagtatccaactccaaagaggtaagttcctgaacatacactaaagaacctgtgagataagatcagacggaaaaattttcaaattttttcaaaagcaaaggtaatccctgcatacatcctcctacacacacacacatagtgcaaagtgaataacaaaatgtcataaggcttgagtttttggtatatggctttcagtgttaccttatctcataatttaggtaatgatttttgctaaaatgataaccatctaaagagtgcctaagttttaagtctcgtaactttttgaggaagaatgctgggaactacagaaaactgcataggcatttagaatttgtattatcttcttagactgcatttgtcaagctttggcagcatttcttttaaatgtgatgaaccccaatttgccaaactgtcagaagtcagtgaagcaaagaatcgaaggtaaaatgttgattcaaagattgtctcccctaaatccttcatttctttctctgaaatggaactttggaagccatttatatagattagtctgacagcctttatatttgcatgtaagtttacttgcatccttagacttggctttatgcaaaaagaaaatttttattcgttatattgtatttcatctgtctgatttccctggcacattaagatggtcctggtccctcaggatactttttcccttaataaatgtcatatgtaaataaaggcaactca

SEQ ID NO: 14113 - DNA, 16188 bp, Homo sapiens
tgctatggatatatctaaaagaaatggactcttcattatgtcatttttttgtattggtgtctctaatctaaatgtgctcagaaacttcacatatgtaatgacaggtacaagtaagagatcttaattatgtcacatagtactcttatgaaagcaagttgtagcatcctcattttgtggtatattaaaactattaggagttgttaaaggaagtaattaaagaaattaggaataaatttcaagtgccttgatttactcgttctggttctttgctctctataaagttcactgaaataatataaactgttaatttactgatttttttatgtgcttcatttaggcaatccactgtatgacagcctaggttctttgggtgtgggcaccttattaggcatggtctcagcattcctcatctacactaacacagaagcactcttagggcggtccatccagccagaacaagtacaacggctcactgaactcctggagaatgacccatcagtaaggtcagccttattccagtaatcctgttaaggcttacaaaaacatattaaaaaacagaaatgcctggtttgtaaatacttccagaggaagttttggattcctcgtcttcagaacgttttagtctgtaacttttcagaattataatcctggaagtaagaaagaatacacttaggaaactccttctaagtttccttttaaattttctatacttctaatttttagagtaaggaagagtcaagttgatataatgagaatggaagtttgcaaagtagttgtcttcttagtggaaatacttaatatggaacctgtagagttgccttatattcgcattgcaattacaaattgaatatattaaatttaaaaagatttttgttcattgggcaatgattaccaaattaaatataatttatatttactttgaaaatagactttgttttagcttattttaagtatttttcttataatctttatcttttaaattatgtaaaactaaagaactggagacttaggagataatcagcagaagagatacagaattctaatagtgcttttcagtgaaattctagcagcattgtggttttataatgaaataaaagaacaaacctttaaaaacccagttttctactaactcgctctatattttttcaaactttaaaataagatttttttgtgtattgtacttgaaatctttaagttaaatctttttaaaatgacccgtatatctgaattagtaaaatatattaatgattactagatttatattctatgccctatatgtttaatcttgaaaagtaactatcttattggaacaagattagaaaatgagagatgggcacagtggcacatgcctatagttccagctacttgggaagctgaggcaggaggatcacttgaggccacgagtttgaggctagtgtgcaatgatcatgtctgtgaatagccactcactgtactatattctgggcagcatagcaaaaccctgtctcaaaaaaaaaaaaaaaaagattagaagttgagcattatgaaagtcagtattagagttattaacataatgtgagataatccaaattaatatcctttctttgtgatgtttttgtctggttttggtattaagataatactggcttcagagaatgagttgggaaatgttctctcctatttttttggaagagtttgtgaataattggtgttagcttctttaaatggtagaattcaagtatctggatatgagctttgctgtgtgggtagttttttgattagtaattatatctcttgttatggatctgttcagattgtctgtttcttcttgacttagtttaagtagcttgtattctaggaatttgtcttttacttctaatttacctaatttgttggtatacagctatttataatattcctttgtaatccattttatttctttagtgttggtacaaatgtctcatctttcatttctgtaatttgaatctctccttttcttggtcagtgtagctaaaggtttgttcattttcttgatctttctaaagaaccagcttttggtttaattgactttctctgttgtttttctattttctttttcatgactttctcctttaatctttattatttttttccttctgcgtgctttcagtttagtttgctctttttccactgtcttaaggttaagcttttaatttgatgtttcttcttttttaaaatagacaattacagctacaaattttcctttaagtattgctttctctgcattccacacatttccatatattgtgccattttcattatctaatagtattttctaatttctttttttattcttttcagttatttaggggagtatgtcacttaatttttacgtatttgtgagttgcacagatttctttccattattgatttattattttgttctattgtggtcaaagaatatgttttatattagttctgtccttttaaatttaccaaggtttgttttatggccttacatatagtcttggataatattcatgtgcacttgagaagaatgtatattctgctgttgttgtagagtgttctgtagatgtttgttaggtttaattggtttatagtgacttcaatttccctaattatcttcttgctctattgttctatcctttttttttttttttttttagatggagttttgttcttgttgcccaggctggagtgcagtggcacgatcttggctcactggaacctccgcctcccagattcaagtgattctcctgccttaccctcccaagtagctgggattacaggtgctcaccaccatgaccagctaatttttgtatttttagtagagacgaggtttcaccactggccatgttggccaggctggtctcaaactcctgagagacgaggtttcatcactggccatgttggccaggctggtctcaaactcctgacctcaggtgatccacccgcctcggtctcccaaagtgctaggtgtgagcaccgtgcccggcctctgtatccgttactgaaagtatcgaagtctctagttattgttgttgtattagctcttcctcccttcatttcttcttggttttggcatcatatattttggtgctctgttgttgctacatacatgtttataattttgtatatattgtttaataagtaatgtctaaaaaagagctataaactgaaagactggcaaattcgaaattttgtggaagagtgaatatctgtggattcaattattggaaaaaatacgttagtaatccagaaaattcatacaatttttttaaacagtatattagttacctactgctgtgtgacaaattggcccaaaacttagtggtttaaacaacatattaccatcttacagtttctgtgagtcaggaatcagggcacagcttatctgggtcttcgacttcagggtttctcatagactgtaatcaaggtgttgactgggattatagtcatctcctggggaaggggctgcttctaaccttactcacatgattgttcgcaagatttagctccttgccaaatgggcctcttcaacatggcagcttgcttaatcaaagcgtgcaaattgataaggcaatagagagcgagtgtgaacaagacaaaagtcacaggttagtcacctggtcttggaaatgacatctcatcactttgccatatttggtagttatagcccacattcagtgagaggagatcacacaagggcttgcgtataggtggcagggattgatcatatgggagccctccaaacagttttctgtctgtagttagttatatgtaagaacataaggaaaaagtatatctaaatatatttattagttgctactcacataccagccaaataatgaaatgtgtttatactctgtgaagactaaagtagaaatgatttttgaaaatgaataaatatgttctgtgagttaccaggagagaaaaaaaaaagaataaatgatatagccttttgccaatctgaaaaagttttgttttaacttgagcacatgtaactataaatattaaaacattaattcttatttcatccttgatggttgattaaaatatagcttccttatatggataaaaaattttggactcagtgtttagtaacctgctcaggatccctcagaaattagggtctaatgttgtaagaatacttggagtcttacgtaggcttgtttttctagtaaatctccatgtcctcagaattcagagtgttttgttatttcttatatgtgctgtacagaaaagatcttacagtgatcactgtagaaagaagagaatttctcagcagtttctagggaagattgtttactgagggttagagcaggaggggtgaaaagtagttatgcttgagtatctgctttcctgtctgggaggcaaaagggtatgatgcaaataccactgggcttgcatttctgaagagctgggctggggagtcctaatctgctgtttactagctaaattaccttgagcaagtcacttatgccactctaggatggttttatcatgtataaaataaagatgtcaccctatccacttatgaaagccatccattaaatgcctgccttatagttcttactgtattaaacattttatatatgtattagctcattattcctcacatcaagtcccatgtggcagttattattaacctcattctaatagagaacttcacagcattgtatgaagacttttaaagaagctagtgaacatacaattggttaatatactctacaacaccattataaattaaaacaaatttttatatggcatttaggaaattgataagtagatatatggagacaaaggcttatgagataacatgacattttagaaaattgatttagagttaatgaatatatatatatatatatatatatatatatatatatatattttttttttttttttttttttttttttttttgagacagagtcttactctgttgcccaggctggagtgcagtggcacaatctgggttcactgcaacctctgcctcccaggttcaagcaattctcctgtctcagcctcctgagtagctgggattacaggcatgcaccaccatgcctggctaatttttgtagttttagtagagacagggtttcaccatattggccaggctggtctcaaactcctgacctcaggtgatcctccctgctcggcctccgaaagtgttgggattacaggcatgagccactgcgcccagcagagttaatgaacttttaatacatgagctttataattcataaattaccataaaataatatttgttaagtttgcacctttgtatgatatcatgccaaaaaaaaagctaaacggacaggccttggaaaatgataggtggtacttaatggtgaatactctgaagccatcttagtccattctcgtaactagtggggaaaaaaacaataattcaagcctttgtgctattaaagtatatatatgtgtatgtatgtataaataaatttgtatgcattgttattgattgcagggcaattcatgatgttaaagccacagatctgggattaggtaaagtaagatttaaggcagaagtagattttgatgggcgagttgttacaagatcatatttggaaaaacaagattttgaccaaatgttacaagtaagtttatttgttgttttcttacataactgagggttagaaaaatgcttttaaggtaaacaaaatgaaatttttttttatagatcttaaaggcactttagctctcaacttcttaggttccaaaatttaacagagacctttatatttactatggaggggttcagaggagacagcaaaagaacaaacttactatttcatgcttgctatgtgcatttaatctttttttatctaatttaccctcaacaaccctgttatttcaacaatgaaataacatttttattttaacatatatagaaattgaaagacagagattaagtaatttgccttaagttgtagtgccacagagatggagtcatatatgaatcgagatctgcctgactccagaatccatttttttattaagaatagtttaaaagagaatttataaaacagaatataatgaacagcacagatgttaccacttgcccctgtcaaatcttaacattttgctatagtgtatttgcttaaggtcttaaaaaaagaaataattacaaaaacaattcaagcccccattttctctttctatatctcattcttcttcttccatccctagaattaaacattatgctgaatttggtacctgtcttttccattcagatttttatacttttcagcattttttagtgtaatatgtaacattttgaatgtttaaaaattggtataaatggtatcctactgtatgcgtctctacaattggcataacaacatattttttagattcttccgtgttaatttatatatctctagtcagtttaccttcattgttatagagcatttcatcctatgaatatgctgtaatttatttattttgtctccagttgatggacatttatattactgttagaaacaatgccatggccgggcgcggtggctcacgtctgtaatcccagcactttgggaggccgaggtgggcggatcacgaggtcaagagatcgatcccatcctggcccacatggtgaaaacccgtatctactaaaaatacaaaaattagctgggtgtggtggtgcgtgcctgtagtcccagctactcggcaggctgaggcagtagaatcgcttgaacctgggagttggaggttgcagtgagcctagatcgtgccactgcactccagcctgggcgacagagcgagactccgtctcaaaaaaaaaaaaaaaagaaagaaacaatgccatgattgcattctcacacgtttccttgttcacatatatgaaaatttctttagtatggtgtatatatagatagctagattttaaataggtgggccattgggtgtacttaccttcagcttgcctaggtcttaccaagttattttccaaagtgtgtcaatttaacttccatcattgtatatcaaggttcttgcttcctattcttacatgattgtattaatagagttattaaatttttgccagtttgataggtgtgaaatagtatcttgttctaattttatttcttggagcattgaggttaataaacattgaagttcattgaccagtgggatttcctctacattgctccctgatttttcatgttttaagttcatttgcattacacttatagatttgaaaggtctttattttattgcattgtattattattttttgagacagagtctcgctctgtcacccaggctggagtgcagtggcgcgatcttggctcactgcaacctccgccccccaggttcaagcaattatctacctcagcctcccaagtagctaggattacaggtgcctgtgaccacacccggttaatttttctatttttagtagagatggggtttcaccatcttggccaggctggtcttgaactcctggaaaggtctttatttttaatatcctggatgctaattcttacttgtatatatgcaattatttttttctagtttataacttccttttctttttgttgttatacaaaatatttaatatgatttttaattttaatgtgagatttgtaatcttttcctctgtgctttttattcttttgcatgaaaaatccttccatatcccattatcataaaaatattctcttctcatctagtagttttgtggtttgttttttacccttatgtctttcatccactttgaattattttaatggtctgacatagggattcaatttttttttcttaagggaaaatattctaacactatttattgactatattatttccccagtaattttgtagtgctacctctgtgtagtattatactcagttttcttgatccgaattgttttggaaataggtaatccattgcctgtggcttaaagttttaaaaatgttcattaaacttaatggcgtttgttataggtttgtttttttttaaggagtcataagtgtaccactatggttttttaaaaatttattttcctgttttcattttctttataggaaattcaagaagtgaaaactcctgaagaactagagacctttatgcttaaacatggagaaaatattattgatactttaggagctgaagtagatagacttgagaaggaactgaaagtaagatgtattcataaaaataacataatgataatggcagctatttttttgagtacttactctacagcagacactaagtgcatccatcacatgcatgctttaacccactcataactccacagtgtgtaggtatttataagcaagaaaatgactgggttagataagttgaataatttacccaaggaaatagggaaattgtgatttgaaccagattctttacttttaaacactattttatgcagcctgcttagtttctaaaatagtcaaagggggtttttttgtttgttaataaataagcattttgaaagttcctagagaaagatgaaaaggaaactttagactgtggtcaaaagttagaaaaaatagaatgtatatcttgcttttagcccatttgaaattattttctgtttttgtttgtttctattcagttggatgttattgtaatttattgattatgttactgaaatattacctgatcctgatcaggttgtcttttaaaatgtctcagtgttctcaaattgccatttattgacatttgaattctgtttgcaatgaataaaaacttgtaaatgatctttaatgtatataatttgttgaaggcagtgctttttctgcagttgatattgaccattctttaattttgtaaaaaattgaagaaaaaaacttccatctctacttttcaagttttcctttgagaatctggatatccgattagattaatacaagtacttcaaataagattttgttaatattatagttcatgagctttatctgacataatttttgaattttctagatgatattttggtcttaagacgctttcattcttaaaaattattgcagacctcaaagagattttatttatttgagttatagttattgatatttaccaaatcatgcatgaaagtagataaattttaaaatatttatcatttacttttaaaaacatacacctatttaatataaataactttttttttttttttaactaagaatctcactctgttgcctaggctggagtgcagtggcacgatctgggctcactgtaacctccgtctcctgggttcaagcagttctcctgcctctgcctcctgagtagctgggactacaggtgcctgccaccatgcccagctaatttttgtatttttagcagagatgaggtttcaccatgttggccaggctggtctcgaactcctgacctcaagtgatctgcctgccttggcctcccaaagtgctgtgaagtgctgggattacaggagtgagccaccccacccagtcacatttttttttttttttaactgagacggagtctcgcactgtcacccgtgctggagtgcagtggcacgatctcagctcaccgcagcctccgccttccaggttcaagggattctcctgcctcagcctcccaagtagctgggataacaggcacccaccaccacgcctggctaatttttgttttgttttgtacttttagtagagacagggtttcactatgttggccaggctggtcttgaactcctgaccttgtgatgtgcccacctcagcctcccaaagtgctgggattacaagcgtgagccaccatgccaagcccacatttttatataaatagttatattttccaaaatgaaaaaacgtagttagaagagtgatatttcacatttttgcaaaagtctcttatgcctggcttagtagaagacagctacattcccatatctgcttctgccttcagttgtagtgatttgattgtttggccgaagaacatgaaggaaagggagaactgttcctatagccttttgagataattgtgatactctcttttggtgttataacagctggtagaaaccaaatcaatgaatgaacttctcatatgctacttgtgaaggtagggggcacagtctacaagactgtccttccttctaataccaactgtgagttcaggaggttccctagagcaccttcagatttaataactcactaggactcttagaactcaccgaatcatgttatacccatcatggtttggtttattacagggaaaggatactgcttgaaatcagccaagggcagaagaagtgcatagggcagggtccaggaaagttccaaacatgaagtttcagttgtcttttctctgtaatgcatagtattactctcctggcaatgaagtgtgacagtagcatgacgtgttgccaaccgggaagctcatctgagacttgatgaccagagattttattgaggctccatagttgactgcataagtagctgaccttttgtctctagcccttctagaggtagagcagatactgtgtggccaaaggcccccatcatatatcacattctaaagttaatgcccccagataaacaaagacactcttaggcaggacatgtcaagggcctagaaattccctcccggttatggagaacaaaagccaaacctccctttgggtaagattaattctctactatacactgttatattaaaatctgttggtctatttttatactctgaatgaatcttttacccatgcatgattctataacattatgaattagtattttggaaaatactggttcacagaagtacttagatctttcagatgttgatacatttctaaatatgggtacactctcaggctgatggggtggatatgtttttcaacttaaatttccacttaaaagcttgcattttatcattagcaacaaatactgttgttttccttgaaataagactcattttgttcattttttaggagatgcctgccaaatacccaaatttgaataaaccgagtttgttaatctttcaaataaaaatgtactctagattaaaaagcagtttattcagctcacaacttaagcaatcaaagaagtacttttacgtactttccattttgtcacagtatttttaaaagtgaactcaagggtttaggtttaataaaatggatatatttgctatttcatgaaagacttttttaaatgaaactggctttttttttaatgtcaagtgtgggacagtagagacaatgactactggtattgtttgatgccatttgtgttgaattgtgcaaaggtgcaagcagttttacccaccattgtttttatgccatcaggaaatgtcagcatagtaaaaaaagcaaagaatgtcttacagttactgtgaaaatagttgtgaccttagagtccccctaaaaaggtctcaggaccccagcagtccttgaaccgcactttgcaaacaactaatctgtataaaatgtgagacaatggttatttttgtgcaaggtagcacaagattgaataaactttgctctttattctacttgtttttattttgctggcaaggaaaataatggactaaatatttgctttacattttagtagatacaagaaatcagaagccagatttaagaataatcaccaaattggtccttgtcacctacatttactcttacaacaatcagaccttattgtttttgtttagctaactttgtactttaactagaggctattaaatcattaataatgtttttgaattatgtaagtctttcaaaccaggaaggtaagtataatccatacattcaggtggaaacgtctttggctaagataataaagcatggccgggcgcgtgcggttgctcatgcctgtaatcccagcactttgggaggccgaggcgggtggatcacgaggtcaggagatcgagaccatcctggctaaaatgacgaaaccccgtctctactaaaaatacaaaatattagccgggcgtggtggcaggcacctgtagtctcagctactccggaggctgaggcaggagaatggcatgaacccaggaggcagagcttgcagtgagccgagttcgagccactgcactccagcctgggtgacaaaccgagactccgtctcaaaaaaaaaaaaaataaataaataaaataaaataaagataataaagcataattaatcttaagtcaaaggacatgttcatagttgaggtgccaaaccaaaagggaatgcatgaatgtaattgtttttcttagtcatgaaaataaggtgatttccttttgaaaactaaaactttgttcactggcatattccttcatttttagtatctcagtttaaattgtaattattattggattattttgggaggtcacactcatttatataattctgtaccagtggagtcatctctgttgagtaatgccattgagtgttgaaatagattatatttttggcttaaaattccagaacttgtggctgggcgcagtggctcacgcctgtcatcccagcactttgggaggccaaggcgggtggatcacctgaggtcaggagttcaagaccagcctgaccaatatggtgaaaccccatctctactaaaaatagaaaaattagcttggtatggtggcgggcccttctagtcccagctacttaggagtctgagacaggagaattgcttgaacctgggaggtggaggttgcagtgagccgagattgtgccactgcacttcagcctgggtgacagagcaagactccatctcaaaaaaaaaaaaaaaaattctagaacttttgtatagttatctgtaaaggtgttaaaaataatagagactaattcatagattcccatattacaagataggaactacaaaattaatataaaatatatcttgttattattttgaagttctttgacctgttaaacattttttgtcttatctctgtatttcagagtatagataaacctttctcctatccctccattaagttttttgtttatgatgattaatggaaattagttcattgggaggctgctgtagcattcataaattccttataaataatggctgaattaaatgctctgttctttactttgcctttgtttctccagtttctcttaaagcattgtttttaatgaatctgcagcattgtaaaataaattatgtaatttgggctttaactctctgcaagtattggaataaaatcctcatggtgtgtaaaatagcctaatcggtattgagcaatgcaaggaatatagattttaaagtatttgttgaataagtgggtgaaaattttaaattggataccaattattgattttcagttctgttcaataaatattagtttctactatacacatgatatcttgttaagcagtaaacattgaattttaaggatattaatcatatttattcattcagcatatattgtgtgctttgtattgtgcacatatacttttacaaatttgattagtttactctgaaaacttgattttaaaaagcagagcaaatttttaggcttttttttaagataaagcttttattagtacacatttatttatatcatgctttttagacagaataatgtcaaacttaatgaacaggtaaatttttcaagtcatattaggataggtaagggttgattggagtaggaagatacaatttagtttcatttctgtttggagaatttttttttaattctatattgagtttaaggagttctagagacagggaatagttttaaataaggaaaaagttgggaacaaaagtgtgccctccttgttaaaaggtccctggtcattcccacattaggatctaagaggaaagtacccccaggcacacctgagcgacactagttataagaaaaatccctgtgtgcactcagtagagtgttcttgctggagcaaaactccaatattctgccagattttgtttttataactggatgcctttaatacaagtaatatgcacatggtcctaggatatttttaagctaggaatcctaactgaatcatttacaggaacttttctcccctttttatttttgcaatttttatcaataatgcacaaagtttataaagtcaaatagaactgaaaagattataacagaaataactatcactgcctcacctgcctcagtacttatattttaagagataaccatttttaatacttttagtatgtctttatttattgccatatttctgcataaaagtcttatactacttctcttgatttaacagtatttcctctacgataggtgtagatttagttcttttatacactactttctgtcctcccttctcacagtattaatatgttacattttattatatttgtaattccccttaagttgatttaggtgcccttcctttattttattttattttttatttttttatttttttgagatggagtcccgctctgtcgccaggctggagtgcagtggcacaatcccggctcactgcaacctctgcctcccgggttcaagcgattctcctgcctcagcctcccgagtagctaggattacaggcatgcgccactatgcccagctaatttttgtactttttaatagagatggggtttcatcatgttggccaggatggtcttgatctcttgaccttgtgatccgcccgcctcggcctcccagagtgctgggattacaggcgtgagccaccgcgcccggccaggtgcccttcctttgtgcactcacaggaaaaagaaacccaaaatctttactttgctctgtggtagccgagtgttgtaattgcctacttaatttacctatatcacctcactaccaaacgtaagtccactgaaggcaaatactgtttgttcccagctcattgtcatatacacttcaatgcctggcacagagtaggcatgtaatagtagacagtattggttgttattgaattgaagttccttaagctagcatataagatttttaacaacctgatttctgcctgtctttccagcctcattaccaaccctaccctttttgcagcttctgtgctagctataccatagtgccagtgcacactttgcaggctgtctgactttgctgatgttgtgttttctgtctagacactcttcattatctacctggaaggctcatcatatgcagacctaccttagatattatatcctcagtgaaattttctagatctcatgagcaaaatggctgtctcatttttgctcccagtgttattatttagtacagtgtaataggagcttgggatctggaatcaggcctggagtcaggcctggaatcaatcctggctccatcacttactagcagtgtgacttcagacaggttagttaatttcttcgtacttcagttttccctgatgtatgtataagatggaaatagtaattaggttatgaggcttttaaaacacacatacatgtgctcatgtaacacagtacttgatacatgagtgagtaagcaataaatgttaactttttattattagctctaatactttaacttgtagatgattactgctatgctggtctccctagctaaactgagtcactcagggtcaggaacagagtcttatttaataatcatagctctgttttctagcacagggcccggcccaagaatatatggattgttgctaaagtatataaaatgagtggttgtcaatttactctttttgattattattgttttgcagtgattttgttttcaccacacaaaaatgtgtatttccagtgcttcgcaatgcttggcatgtactagatccttaatgcacttttgtattaacaaacacatgaacaaacttaggaatgtgatactacttattgtactgtttatagtatgtctatttacctattgatcttactttttttcttatgcaactatttctctcattagtatgctatagtgaaatagtttgcaaatgttttcattggctctaatgaccaaaaggaataaaaagaaacaagattttattttgctacaaataatgtggtggtgatttttctttccagaaacgaaatcctgaagttcgacatgtagatttggagatactgtgagtttgatggaatgaatcacctgggtggggaccttggaaacaagtttgtccgtccactctacaaagtttcctcctctcctacactgaaagactcagtgccatgcagaagccttttttttaagatgaaggaaatattttatgtaaagagcaactcagcaggacacagaactaaaactactacttacatctaacagacacactacaagttgaatcaatttgaaaatcatgtttttatgcttccatagggaaca

SEQ ID NO: 14114 - DNA, 809 bp, Homo sapiens
tgctatggatatatctaaaagaaatggactcttcattatgtcatttttttgtattggtgtctctaatctaaatgtgctcagaaacttcacatatgtaatgacaggcaatccactgtatgacagcctaggttctttgggtgtgggcaccttattaggcatggtctcagcattcctcatctacactaacacagaagcactcttagggcggtccatccagccagaacaagtacaacggctcactgaactcctggagaatgacccatcagtaagggcaattcatgatgttaaagccacagatctgggattaggtaaagtaagatttaaggcagaagtagattttgatgggcgagttgttacaagatcatatttggaaaaacaagattttgaccaaatgttacaagaaattcaagaagtgaaaactcctgaagaactagagacctttatgcttaaacatggagaaaatattattgatactttaggagctgaagtagatagacttgagaaggaactgaaaaaacgaaatcctgaagttcgacatgtagatttggagatactgtgagtttgatggaatgaatcacctgggtggggaccttggaaacaagtttgtccgtccactctacaaagtttcctcctctcctacactgaaagactcagtgccatgcagaagccttttttttaagatgaaggaaatattttatgtaaagagcaactcagcaggacacagaactaaaactactacttacatctaacagacacactacaagttgaatcaatttgaaaatcatgtttttatgcttccatagggaaca

SEQ ID NO: 14115 - DNA, 15818 bp, Homo sapiens
tggtattttcatgatgggtgcaggactatcttggtaccatggagtcatgggattgcttcatcctcaaccaatagaatcccttctatgggtaatcctctttttttctcctcagttttgatgtcttatgacatagtgattgtgtacagtagaaggcctttgtcatattggtgttaaaggagaatgacatacaccttcttgactgtgtattgtagggttatatatctatagtttaatttttagaacgtgactggacataacctctaaatccataagattcaatgatgttgaacaagatctctgtaggtaccaattatcaagccctgctccttggttaaaatcttgggcagttccactaatttctccagttactgttgaagaacaagaaaacctctgttcacttttggtcccaagaatagtctcatttcagtaattaaaatattcagacccatgtaatagtcataagttggaactatatttgaagttaaagcttctcttttcccgcatcctgggcttccttcaggtaggaagcctgcactgggggaatgggaggatagcaggatgatcacccgtatgatcccctctggggcttctgcccctctctcctattccctggaaagtgttgagggtttggataagggataaaaacataccactttactgactacagtgttattttgcattggtttcctctggcctttgtagatgtttaaaactgtctttttttttctcatgggcacttcttggagattaccctgcttggctgctctggctatggctgcccaaattgatcacatagcctaccctctcagcttctgcatctcatggtgtggtttccagacagtgctgaagttgtcttgcatttggaaagaatgccctttgagcagctgatctccttataaaagactcctagggacctgtgtgttaaaacagacatctttaacacactttctgtgggagtgcaggtttttctctcaagcccaatgatctactctgctgatacagccaatatcagttagtaggcttgcgtatggatgtatcactcaggtatgcatcagacagtttgctgtgatatccaatatcccgggggacacacatcaaggctactgaacaatcttagtagctcaacagctttcaccaaagaaatcttcatttttggcctcctcaatttcagctcttcttatgtggtctagaggatgtggagctagcatgtagtctagtgggtagaggccccaggtttgggctaccttctgtgcaaggcctgaatagatggtataacacctccttttggaatgtggggatacttgtacctattttcttctctattttgagttgtagtcagaactagacagaatcaatctgtctacttttttaatatcctgttatatcatgcaaatctacttaataacaagcacattaaactaggcttatttgttattctctagttttctatagttttgattgactagtttcttaccataatacatttcatataattaaaacaaacaaatgtgtttcctccattctgaaaagatttggccactttatgggtacttcattgttctagcgttcttctaatttgtatagtgtcactttataggggcaaagcactctctgtagttagagattaggtaattagttaaattttcagttgtgtataagttttaaaacttctaaaagctcttgtgtctttcagtaactaaatgggtttccattagactatggccctttttaaaatagtgttggactaggttcaaagttttcagacctctattttaggaaagcctagggttctaaacattgttgaaaattctgtagatgtttggtttgaatttcattaaaataaaaaaaatgtgttgctaggttaactttttttttttgatacacccctgtctaaagctttttttaccatctttaattgaagagtgtcctgggattgcagggaatgtggtattaccaaaaaacaaacattggttactgtttgtaactacttatctttctgaatcaggattttcttggtattaggcatggaagcaaaatccagaagttacttgagtttgggtgtggatcttactgtatctggtgtctaccactcctgatatcaaatattgtattcatatctcattgtcctcctcatttgagttgtttcccattagtaaccttactgtctggcttaaatttgaattcgtgtttttgttttagacattacggactttatatatgaacaattgtgattggaagtacttaatttatgctttattttaatatttcttttctaggcatattgtattttagcaggatcattagtatctgaaggaggtatgtactgtcacaaagtatgtctctattcttaatttagtaatatatattcagctgtccattattatagtttgctaagttctgttgattaaagaaaagcaagtgtgggaataggcatctaagctttctctacttttagggagtaaagtctttgcataatgtactgtggttgttctgtaatggatagctgtgggggggtgtgtaactgcgccctgccatgggatggcatcctggcaaggcctcatttctctttgtgtcctgagctgctaggataggctcaagtaggtgactatcagatagatggaagacagtaactgatgtggcatgaaagcgcttagcaagcccaccatatttgtggttatttttaaactatgtggtggtaagaggtgttccttacagttttcactttgcaagcattattccttgattgaacccaccaccactactatcgctgttacttgccgattcactaaaaattggataaataattattttacttatttaaaagggaaagtatgtttcatttttgagtatcataccataatactcaaaacatttgaaatggagtataaaaaacataattaaactgaacttttaaaattagagtttaataatattcaccagaagaatattatttactggctcttgtgagacaaatatttcaaagtttttgaaatacacagctatagcagtatgatgacagagaactgctaatatcagtataaaactgcctgattcactgctgtgctcatgtttacttctgaaacattgtaactttctatgtataatgttcccttcatctatttttaaaattaacattttttattgacagatcctaattgtatatgtttatggggcccctcatctttgaaagtctatgaaatggttataacacaacctgcttcaaaagattgggaggctcagaaatgaatgtggttagtgtggtgctgccaaatagcagctcttcaataaactaaagctgttgttattagtaattatatttaattattatggtttagaactatggggttcattttattataatgattaattgataacaactaattaacatagaacttgtccttattgccaaccctagttttaaaatgttgtgcttatttgtttatcttttgagatgccatctttaaagtttggaggcatgaagtttctgtcttgctgatatgaatgcttttcttttagcaacacttcttgttgctgtaaatgaacttcgtaggaatgctcgggctaaaggaatgtcattttacaagtatggtatgtattttagaaaccaagtgtttgtttcacctcccttatttgcttaaaattacttagtactgttattgctttgttcctaatagaaatgtacaaaatatatctgaatatcatccctgtgtggctcttacatatccttcagcccttattaaaaagaaatgtagtatagaaatttgaacatggatactttatatttggatttgacttaagtgaactaaggtatttctttatatggttatataacttgagaaagtaatttgactttatgtatcagttattgttgacatttaagccaagaaattatgtttgcattgagcaaggtttttaaaatcataatctctcatacacttttttatcttaacttatatcttgattttaaatggatacttattaaaatgttacctgatagtatcaagttaagattttagaaattttcttgtcttgtctcttccccaatgactagtaatggaaagtcgtgatcctagtacaaatgtgatattattggaggatactgctgcagtcttgggagttataatagcagccacttgcatgggccttacttctataacaggtaaatattccttaaattacaggtgatttatttgtcctacttaaataattctctaatatgtgggaattttctcttatatcattgaataatattaaaccaacaaattgttaaatgttaattcctactaatcattgacttatgtaagacatttggtcagcagaagtattcaggtttatttgaattaaaaatgtctctaaattagaaataaggaaggctatttgtaaaggatttctgtaatgctgtacgtctttctagctgtgacttaaaaaattgtgcaatcactctgaactttttatttacctataaaagtgtggataatatttaccttggtaacctcttaggtttattaagaaaatatgagagttttaataaactctaaagttccaaataaatatacataggtcctcaaataacattgttttgttcaacttgattttgttataacattgttgcgaaaaatatcaattcctaactggagctaccatctctgtggagtttgctcattctccttttatctacataggttttctttgggcaccccaacttcctcccacatcacaatgccgtacatggtcagtgaattggggtgtctaaatagtcccaatctgagtgagtgtgggggtgtgtgtaagtgtgccctgccatgggatggcatcctggccaggtctggttccttcctgtgtcctgaactgctaggataggctcaagtagatgataatcagacaaatgcaggacaataactgatgtatgaaagcgctcagcaagcctacatatttgtggttgtttatttttgaattatgtggtgataggtgttccttacaattttcactttgcaaacatttattctttgatttaactcaccacccctactattgctgatactcactgattcaccaaaaattgggtaaataattattttacatagtttttattaatttttaaaaatgtatatgtagcccacatttatttcagtgttcaatattagacatgttttgggtcttagaagttgagtgatgtttttgtgaccagaaatatgccataggaacttaactctttttttttttttttgagacagagttttgctcttgttgcccaggctggaatgcaatggtgccatgtcggctcactgcaacctccacctcccaggttcaagcaattctcctgcctcagcctcccgagtagctgggattacaggcatgcgccaccacgcccggctagttttgtattttcattagagacggggtttctccatattggtcaggctgatctcaaactcccgacctcgggggtgatcctcccaccttggcctcccaaagtgctgggattacaggcatgagccaccacgcccggccggaacttaactcttgtttgtatcagttagcttatggtaaaattggttttgttatatgttgttccctataaagtcgcagtttctaagaacctattgacaacatgaatgaggacttaaccgtatattgtggctcttgttcatttgtctttttccacacttaatgccaataataactactgttgccttcctatttctttaattctaagttgtttgtgtccttattttggtagctaattaagtgttttgagggccaataaaatacaagtaaatgaaaagacaattctattttatttttattttcgaaaacaaccatttagcatgaaaagactcaatttatgaagttggaattctcttggaaaggaacttcttccatacttctctatttgtccttacatatttaaaataattttaggtgacgagcttccacagttctgcagtgtttcttcaaatagtctgaaatatgaatacttctttctcattctgagtgtgcattttaataccaaactagcattctctgatgtttattgtgatccaaaatatttgtaaaaatgttgattgtttttctggttgaccatatagttttagactgtttttgaacataaattactagcaaaattttaggcttaagaaaagtgtgacttgatgcagatgtcaactttgaataatttattttcttttacataataatagaaaccaatcaaatcaaatttacaaaaatatgtaatgtgttttacatgaattaaatttttcttaattagctaatttattcaaattaaattaaataacatgccaagaaataaaagttttcttaaaaaaggtattttctttcagctaatattcctgtaatttctttaagagtacatgaatgtatatatttaaataaaaataactcttcacatttggatttctaaagagcagtatttgattttgagctctataattacaaaacttctaatggataatgttttacaagcggatcatttttaacacttagtatagattaacaagtttgctttttagtgttacagcttagcaaaatatatgttttatcaagcattaagaagagttaaatatattgatgacatttcatctttgggataaaaagacttgtagtcataaaagccatgtgtaaaatttattataaagatttaaaacgtatttattggtgtctattatataaatattacctatacattcatagatgataaatcagcctttctcattggttctgggagagaagccctgacaacctaaggcaaatattagaatcagaatcacctgaagggcttggggaaacacagaatgctgaaacccacatccagaattttttattcaggggcctgaaatgaggtctgagaatttgcttttctaccaagttttcaagtgatggctgctggtccaggaaccacactttgagaagcaccaccttgaggcacctatggcatgtaatgaattaagttctctcctttttatctagaatgatactagctatatatcatccttggttggatgagaagagagtcacccatattattttctgtagggcttaattctcttacagaacattagtaggaagaagatacggaaaaaggtttctttcagcttttgattccactgttattttgtctatctggtgtaggaaaagtgctatggatatatctaaaagaaatggactcttcattatgtcatttttttgtattggtgtctctaatctaaatgtgctcagaaacttcacatatgtaatgacaggtacaagtaagagatcttaattatgtcacatagtactcttatgaaagcaagttgtagcatcctcattttgtggtatattaaaactattaggagttgttaaaggaagtaattaaagaaattaggaataaatttcaagtgccttgatttactcgttctggttctttgctctctataaagttcactgaaataatataaactgttaatttactgatttttttatgtgcttcatttaggcaatccactgtatgacagcctaggttctttgggtgtgggcaccttattaggcatggtctcagcattcctcatctacactaacacagaagcactcttagggcggtccatccagccagaacaagtacaacggctcactgaactcctggagaatgacccatcagtaaggtcagccttattccagtaatcctgttaaggcttacaaaaacatattaaaaaacagaaatgcctggtttgtaaatacttccagaggaagttttggattcctcgtcttcagaacgttttagtctgtaacttttcagaattataatcctggaagtaagaaagaatacacttaggaaactccttctaagtttccttttaaattttctatacttctaatttttagagtaaggaagagtcaagttgatataatgagaatggaagtttgcaaagtagttgtcttcttagtggaaatacttaatatggaacctgtagagttgccttatattcgcattgcaattacaaattgaatatattaaatttaaaaagatttttgttcattgggcaatgattaccaaattaaatataatttatatttactttgaaaatagactttgttttagcttattttaagtatttttcttataatctttatcttttaaattatgtaaaactaaagaactggagacttaggagataatcagcagaagagatacagaattctaatagtgcttttcagtgaaattctagcagcattgtggttttataatgaaataaaagaacaaacctttaaaaacccagttttctactaactcgctctatattttttcaaactttaaaataagatttttttgtgtattgtacttgaaatctttaagttaaatctttttaaaatgacccgtatatctgaattagtaaaatatattaatgattactagatttatattctatgccctatatgtttaatcttgaaaagtaactatcttattggaacaagattagaaaatgagagatgggcacagtggcacatgcctatagttccagctacttgggaagctgaggcaggaggatcacttgaggccacgagtttgaggctagtgtgcaatgatcatgtctgtgaatagccactcactgtactatattctgggcagcatagcaaaaccctgtctcaaaaaaaaaaaaaaaaagattagaagttgagcattatgaaagtcagtattagagttattaacataatgtgagataatccaaattaatatcctttctttgtgatgtttttgtctggttttggtattaagataatactggcttcagagaatgagttgggaaatgttctctcctatttttttggaagagtttgtgaataattggtgttagcttctttaaatggtagaattcaagtatctggatatgagctttgctgtgtgggtagttttttgattagtaattatatctcttgttatggatctgttcagattgtctgtttcttcttgacttagtttaagtagcttgtattctaggaatttgtcttttacttctaatttacctaatttgttggtatacagctatttataatattcctttgtaatccattttatttctttagtgttggtacaaatgtctcatctttcatttctgtaatttgaatctctccttttcttggtcagtgtagctaaaggtttgttcattttcttgatctttctaaagaaccagcttttggtttaattgactttctctgttgtttttctattttctttttcatgactttctcctttaatctttattatttttttccttctgcgtgctttcagtttagtttgctctttttccactgtcttaaggttaagcttttaatttgatgtttcttcttttttaaaatagacaattacagctacaaattttcctttaagtattgctttctctgcattccacacatttccatatattgtgccattttcattatctaatagtattttctaatttctttttttattcttttcagttatttaggggagtatgtcacttaatttttacgtatttgtgagttgcacagatttctttccattattgatttattattttgttctattgtggtcaaagaatatgttttatattagttctgtccttttaaatttaccaaggtttgttttatggccttacatatagtcttggataatattcatgtgcacttgagaagaatgtatattctgctgttgttgtagagtgttctgtagatgtttgttaggtttaattggtttatagtgacttcaatttccctaattatcttcttgctctattgttctatcctttttttttttttttttttagatggagttttgttcttgttgcccaggctggagtgcagtggcacgatcttggctcactggaacctccgcctcccagattcaagtgattctcctgccttaccctcccaagtagctgggattacaggtgctcaccaccatgaccagctaatttttgtatttttagtagagacgaggtttcaccactggccatgttggccaggctggtctcaaactcctgagagacgaggtttcatcactggccatgttggccaggctggtctcaaactcctgacctcaggtgatccacccgcctcggtctcccaaagtgctaggtgtgagcaccgtgcccggcctctgtatccgttactgaaagtatcgaagtctctagttattgttgttgtattagctcttcctcccttcatttcttcttggttttggcatcatatattttggtgctctgttgttgctacatacatgtttataattttgtatatattgtttaataagtaatgtctaaaaaagagctataaactgaaagactggcaaattcgaaattttgtggaagagtgaatatctgtggattcaattattggaaaaaatacgttagtaatccagaaaattcatacaatttttttaaacagtatattagttacctactgctgtgtgacaaattggcccaaaacttagtggtttaaacaacatattaccatcttacagtttctgtgagtcaggaatcagggcacagcttatctgggtcttcgacttcagggtttctcatagactgtaatcaaggtgttgactgggattatagtcatctcctggggaaggggctgcttctaaccttactcacatgattgttcgcaagatttagctccttgccaaatgggcctcttcaacatggcagcttgcttaatcaaagcgtgcaaattgataaggcaatagagagcgagtgtgaacaagacaaaagtcacaggttagtcacctggtcttggaaatgacatctcatcactttgccatatttggtagttatagcccacattcagtgagaggagatcacacaagggcttgcgtataggtggcagggattgatcatatgggagccctccaaacagttttctgtctgtagttagttatatgtaagaacataaggaaaaagtatatctaaatatatttattagttgctactcacataccagccaaataatgaaatgtgtttatactctgtgaagactaaagtagaaatgatttttgaaaatgaataaatatgttctgtgagttaccaggagagaaaaaaaaaagaataaatgatatagccttttgccaatctgaaaaagttttgttttaacttgagcacatgtaactataaatattaaaacattaattcttatttcatccttgatggttgattaaaatatagcttccttatatggataaaaaattttggactcagtgtttagtaacctgctcaggatccctcagaaattagggtctaatgttgtaagaatacttggagtcttacgtaggcttgtttttctagtaaatctccatgtcctcagaattcagagtgttttgttatttcttatatgtgctgtacagaaaagatcttacagtgatcactgtagaaagaagagaatttctcagcagtttctagggaagattgtttactgagggttagagcaggaggggtgaaaagtagttatgcttgagtatctgctttcctgtctgggaggcaaaagggtatgatgcaaataccactgggcttgcatttctgaagagctgggctggggagtcctaatctgctgtttactagctaaattaccttgagcaagtcacttatgccactctaggatggttttatcatgtataaaataaagatgtcaccctatccacttatgaaagccatccattaaatgcctgccttatagttcttactgtattaaacattttatatatgtattagctcattattcctcacatcaagtcccatgtggcagttattattaacctcattctaatagagaacttcacagcattgtatgaagacttttaaagaagctagtgaacatacaattggttaatatactctacaacaccattataaattaaaacaaatttttatatggcatttaggaaattgataagtagatatatggagacaaaggcttatgagataacatgacattttagaaaattgatttagagttaatgaatatatatatatatatatatatatatatatatatatatattttttttttttttttttttttttttttttttgagacagagtcttactctgttgcccaggctggagtgcagtggcacaatctgggttcactgcaacctctgcctcccaggttcaagcaattctcctgtctcagcctcctgagtagctgggattacaggcatgcaccaccatgcctggctaatttttgtagttttagtagagacagggtttcaccatattggccaggctggtctcaaactcctgacctcaggtgatcctccctgctcggcctccgaaagtgttgggattacaggcatgagccactgcgcccagcagagttaatgaacttttaatacatgagctttataattcataaattaccataaaataatatttgttaagtttgcacctttgtatgatatcatgccaaaaaaaaagctaaacggacaggccttggaaaatgataggtggtacttaatggtgaatactctgaagccatcttagtccattctcgtaactagtggggaaaaaaacaataattcaagcctttgtgctattaaagtatatatatgtgtatgtatgtataaataaatttgtatgcattgttattgattgcagggcaattcatgatgttaaagccacagatctgggattaggtaaagtaagatttaaggcagaagtagattttgatgggcgagttgttacaagatcatatttggaaaaacaagattttgaccaaatgttacaagtaagtttatttgttgttttcttacataactgagggttagaaaaatgcttttaaggtaaacaaaatgaaatttttttttatagatcttaaaggcactttagctctcaacttcttaggttccaaaatttaacagagacctttatatttactatggaggggttcagaggagacagcaaaagaacaaacttactatttcatgcttgctatgtgcatttaatctttttttatctaatttaccctcaacaaccctgttatttcaacaatgaaataacatttttattttaacatatatagaaattgaaagacagagattaagtaatttgccttaagttgtagtgccacagagatggagtcatatatgaatcgagatctgcctgactccagaatccatttttttattaagaatagtttaaaagagaatttataaaacagaatataatgaacagcacagatgttaccacttgcccctgtcaaatcttaacattttgctatagtgtatttgcttaaggtcttaaaaaaagaaataattacaaaaacaattcaagcccccattttctctttctatatctcattcttcttcttccatccctagaattaaacattatgctgaatttggtacctgtcttttccattcagatttttatacttttcagcattttttagtgtaatatgtaacattttgaatgtttaaaaattggtataaatggtatcctactgtatgcgtctctacaattggcataacaacatattttttagattcttccgtgttaatttatatatctctagtcagtttaccttcattgttatagagcatttcatcctatgaatatgctgtaatttatttattttgtctccagttgatggacatttatattactgttagaaacaatgccatggccgggcgcggtggctcacgtctgtaatcccagcactttgggaggccgaggtgggcggatcacgaggtcaagagatcgatcccatcctggcccacatggtgaaaacccgtatctactaaaaatacaaaaattagctgggtgtggtggtgcgtgcctgtagtcccagctactcggcaggctgaggcagtagaatcgcttgaacctgggagttggaggttgcagtgagcctagatcgtgccactgcactccagcctgggcgacagagcgagactccgtctcaaaaaaaaaaaaaaaagaaagaaacaatgccatgattgcattctcacacgtttccttgttcacatatatgaaaatttctttagtatggtgtatatatagatagctagattttaaataggtgggccattgggtgtacttaccttcagcttgcctaggtcttaccaagttattttccaaagtgtgtcaatttaacttccatcattgtatatcaaggttcttgcttcctattcttacatgattgtattaatagagttattaaatttttgccagtttgataggtgtgaaatagtatcttgttctaattttatttcttggagcattgaggttaataaacattgaagttcattgaccagtgggatttcctctacattgctccctgatttttcatgttttaagttcatttgcattacacttatagatttgaaaggtctttattttattgcattgtattattattttttgagacagagtctcgctctgtcacccaggctggagtgcagtggcgcgatcttggctcactgcaacctccgccccccaggttcaagcaattatctacctcagcctcccaagtagctaggattacaggtgcctgtgaccacacccggttaatttttctatttttagtagagatggggtttcaccatcttggccaggctggtcttgaactcctggaaaggtctttatttttaatatcctggatgctaattcttacttgtatatatgcaattatttttttctagtttataacttccttttctttttgttgttatacaaaatatttaatatgatttttaattttaatgtgagatttgtaatcttttcctctgtgctttttattcttttgcatgaaaaatccttccatatcccattatcataaaaatattctcttctcatctagtagttttgtggtttgttttttacccttatgtctttcatccactttgaattattttaatggtctgacatagggattcaatttttttttcttaagggaaaatattctaacactatttattgactatattatttccccagtaattttgtagtgctacctctgtgtagtattatactcagttttcttgatccgaattgttttggaaataggtaatccattgcctgtggcttaaagttttaaaaatgttcattaaacttaatggcgtttgttataggtttgtttttttttaaggagtcataagtgtaccactatggttttttaaaaatttattttcctgttttcattttctttataggaaattcaagaagtgaaaactcctgaagaactagagacctttatgcttaaacatggagaaaatattattgatactttaggagctgaagtagatagacttgagaaggaactgaaagtaagatgtattcataaaaataacataatgataatggcagctatttttttgagtacttactctacagcagacactaagtgcatccatcacatgcatgctttaacccactcataactccacagtgtgtaggtatttataagcaagaaaatgactgggttagataagttgaataatttacccaaggaaatagggaaattgtgatttgaaccagattctttacttttaaacactattttatgcagcctgcttagtttctaaaatagtcaaagggggtttttttgtttgttaataaataagcattttgaaagttcctagagaaagatgaaaaggaaactttagactgtggtcaaaagttagaaaaaatagaatgtatatcttgcttttagcccatttgaaattattttctgtttttgtttgtttctattcagttggatgttattgtaatttattgattatgttactgaaatattacctgatcctgatcaggttgtcttttaaaatgtctcagtgttctcaaattgccatt

SEQ ID NO: 14116 - DNA, 1078 bp, Homo sapiens
tggtattttcatgatgggtgcaggactatcttggtaccatggagtcatgggattgcttcatcctcaaccaatagaatcccttctatgggcatattgtattttagcaggatcattagtatctgaaggagcaacacttcttgttgctgtaaatgaacttcgtaggaatgctcgggctaaaggaatgtcattttacaagtatgtaatggaaagtcgtgatcctagtacaaatgtgatattattggaggatactgctgcagtcttgggagttataatagcagccacttgcatgggccttacttctataacagggcaattcatgatgttaaagccacagatctgggattaggtaaagtaagatttaaggcagaagtagattttgatgggcgagttgttacaagatcatatttggaaaaacaagattttgaccaaatgttacaagaaattcaagaagtgaaaactcctgaagaactagagacctttatgcttaaacatggagaaaatattattgatactttaggagctgaagtagatagacttgagaaggaactgaaagtaagatgtattcataaaaataacataatgataatggcagctatttttttgagtacttactctacagcagacactaagtgcatccatcacatgcatgctttaacccactcataactccacagtgtgtaggtatttataagcaagaaaatgactgggttagataagttgaataatttacccaaggaaatagggaaattgtgatttgaaccagattctttacttttaaacactattttatgcagcctgcttagtttctaaaatagtcaaagggggtttttttgtttgttaataaataagcattttgaaagttcctagagaaagatgaaaaggaaactttagactgtggtcaaaagttagaaaaaatagaatgtatatcttgcttttagcccatttgaaattattttctgtttttgtttgtttctattcagttggatgttattgtaatttattgattatgttactgaaatattacctgatcctgatcaggttgtcttttaaaatgtctcagtgttctcaaattgccatt

SEQ ID NO: 14117 - DNA, 30249 bp, Homo sapiens
cccaggcagcttgtggcggcgaagccatcggtgttcgctgatgtccagtctatggagtcagttggtaccggtggcggcgcggaggcagaaggcggtgtccgagtaggggcctctgccccaccaggatgttacccggcttggccgccgccgcggcccacagatgtagctggtcctccctgtgccggctccgtctgcgatgcagggcggcggcctgtaatcccagcgaccgccagggtgagtgtcccgcgctggccgctggctccgtagaagccgaactggagggccaggctgggctcggcgcctcgcctggggcaattcgcccacttgcctttcgccaacctcagaaccttcctttctggcctccgcctttccagttcagcctgcgcagcccgcgggggtcctgacaggtctctgactctgatgccttctgcagccctagcatggcccccgcgggaacttgtgggcacctcgcgggccggattgcacctctgaagcctaccgctttgtaccaaacaaaatgttacgtgcgcatcgcggtgtcccgcggttactcacctccgcggttggaaattgcggactccgcaaagttccagggtctttggagctttccagcgcaccttcatttagcacttggttgagattttcttggccttctttttcttactctcccaacttattttcttaaattttctaaaaggaaggaggggtgctactcactacggatcttttggaagaagtacgaaagtatccgacaatcattgaatgaacccagtttgggtccgaaaaacaaagaaactcttcagttcggctgagcagtctttttggtgaaaaggtggcagttgtagtggtaacccagaaaaaaaggtggttgaagagaattttcgtctctctcaacattcttttctgactcaaatttaaatggtttgagagtttccaaaataacattgaactaatcaggcttaccttcgtttttgccgtagcttgacacacattgcttgacactgagaactgataggatctctgagggagaagacagaactaagtccacccttaacctaatccctccattcttgggatgcagagagtatttaccgaaacattcatgttcgaagccaggtgtggtggtgcgctcctgtagtccagctactcgggagactgaggcaggcagatcttttgagcccaatagttctaggctagccttggcaacatagtgagctgtctgtaaaaacataggtttgaaaaaacctgtaacatgttcgtgacctcctgaaagaagtcggaagttgcagtcattcgagattttatgtaatataagctatagtaactatgctgtggatataaattagaatatattcgtatcttttatttgcaataaatgtaaagctgaatcttagaatttcaaacggataaattttaacagcactattcccagggcttttttggtagtgatagaaaagtgtaactgttgagtttttccatattggcaatatactgccaggttcccttatggacagaatgaatcatcggctgggtgcagtggctcatgctgctaatcctcaggaagattgtaaaccttaggacgctgaggtgggtggatcgcttcagcccaggagttccaagaccagcccgggcaacatggcaaaactgcctctctacaaaaaattagcctggtttggtgacgcgcgcctgtaatcctagcctgtactcaggaggctgaggtgggaggatcgcttgagcccaggaaattgaggctgcagtgagccttgagcatgccagtgcactccagcctgggtgacagagtgagacctgtctcaaaaaaaaaaaaagaaaagaaaaagaaaaatgaatcatacgtttatactgtactccagaatccccaagtaagtttctaacacaattgtttctattgaccaagcaattttggcattttacactgaaattacagtggctgttaaatttagtctaaactgccctttaagtgttggcaaaaaggagaagaaacagtgtaatttgtaatccctcttctgtgtagctgtcattatgttgaaaattatgtattctttgtctcatctgtctgtgaaacacagataattattacctaccttagtggtcaaaatgactttgcaaagttgtttggaatgtttattactacaaaaaattaaaattttttttacacttaaaaatgcttagtaggtttttaaaaataactttgtgaaaatttagtttcagtaatgaagcatttcttaaaagggcaaccattattatggcaaaatttaaaaatcatttagaaaaagagtactatttaaattggatgcatgtgagaagactatttgaagaacttttggagaaagaaaatctaaaaacagttgtttttatttgtctagaagtaaggtttagtttatgcttctaaaatgcctgtggctgggaaaagcttataaagcataaggagaggaggaaaccttgagggattgcttgaatacttaaaaatgaggaatgcctttaaaggcaaaatagaaactgtctaaaagaaatatgagagccctgtttgtaattttgagttgtctgatagccacattaaaaaaagtaaaattaaagatgaattaattttaatatatcctagaattaattttaataacgaaatttatatattttaataataaaatatataaaatttaatactattttattaagtatattcaaaatatttcaacatgtaatcaatatcaaaattattgaagtattttacatcatctttttgtactgtctttaaaacccagtgagtattttacactttcagcacatcacagttcagactaaccacgttttaagtgctcagtaaacagtgactactcaattagatagtgtagttagagttagtatctaagttataaagaatttttacaaaccagtatacattccagtaggaaaatggacaaaggaattgaatacaaagttcataaagttgttcaagtggccaataaaaatgcaaaaatgttccatactgaaaaacagagactttaaagggttttacttctcactgcctatttcattttggccgaatttttcataatgataataccccatattgagggtgtgggaaaacaggaactctcttaactactgattgaaaacataaacggtttatgccctctgacctaacagtttttactcaaaaggatttactttaaagaaataatcaaaatacatattaaaatgtttgcagaagtttattatagtaataaattggtagttcatagttatggagagtgggaaactgaaatatattatgatacctttattatgggctggtgatgtatacaaccatttttttaaaaaattataattcagggctgggtgtgttggctcatgtctgtaatcccaacactttgggaggccgaggtagggggatcacctgaggtcaggagttcgagaccagcctggccaacatggtgaaaccccatctctaccaaaaatacaaaaactagctgggcatggtggcgggcgcctgtaatcccagctacttgggagactgaggcaggagaatcacttgaacccaggaggtggaggttgcagtgagctgagattgcgccactgcactccagcctgggcgacgagcgaaactccatctcaaaagaaaaaaaaaagttataatttagaagaatagtgacatggaaaatactcttgtgttattaggtaaaaactgtagaaaaatacagtgaaaatatatactgtgatattaacagtgagtttgtctaaaaatttttttatttgtgttttacaaatgatctacagtacacatatacttctaaagaataaaaatgttacttagtttctgtagtaagtatatccttttttataaaaagttctttgggttaggatagagcacatatttctttttttcatgtatttataccttgcctcatttggcaaaaatttgagaggggaagacacttaagtatactagatgaacactgaaattaataaaagtgtaatttttaaatagaaaatagaaatcaaacatactatgttattattgtctccaatctgctagtatttattgtcataagaaaagtaggctgagaatttaacttttatccccagcagaggtccctcctcctcctcaacctctttaaataactaagagtattgacagttacaaaagaccagtctggccaacatcgtgaaacctcatctctactaaaaatacaaaaattagctaggcatggtggtgggcgcctgtaatgacagctactcaggaggctgaggcaggagaattgcttgaacccgtcagatgtggtctcaaaaaaaaaaaaaaaaaaagaccatttagactgtcaatgctcttagttgtttaaagaggttggggaggaggagggacctctgctggggataaaagttaaattcttagtctgattaagagagcattgacagttataaaagaccatttagggctgggtgtggtggctcacacctgtaatcccagcactttgggaggccaaggtgggcggatcacctgaggtcaggagttctagaccagcctggccaacatggcaaaaacctgtctctactaaaaacacaaaaaaattagctgggcatggtggcaggcgcctgtaatcccagctacttgggaggctgaggtgggagaattgcttgaacccaggaggcagaggctgcagtgagccgagatcgtgccattgcactccagcctgggcaacaagagcaaaactccgtccccccaccaaaaaaaagaccatttaggcaggcagacaggaagattctatgcagatcaagttcatgatagaatttattgtacttaagtataaaatgaagctaactgtagtatgtgcctcctagagtttttgtgaatgagaatcattcagcattggatgccaggcattatagttgctgatagtgtagtgctgaacgaggtggatggtttccacctttcttccaccagaaataaatatatttaaagtgccatagaagagataggcaggatgatgggctagaaagtagccaggatgggctatttcattcgataagatggcctaggactccagcttttctgaggtaatgactgagcctaggcatgaaagatgaaaatgagcaagccacgtgaaggtctgggagaaagagcaatttgggaagagtaaagaggaactgtaaagatcagactagtatgtatatatgtatgtatttttgagaaagggtcttgctctgtcacccaggctagagtgcactgacaggatcacagctcaccgcagccttgacttcctgggctccagtgatcctcccacttcagccttctgagtagctgggaccacaggctagcgccaccatgcccagctaatttttatatttttgttagagactgggtttcaccatgttatccaggctggtctcaaactcctgagctcaagcattccacccatctcggcctcccaaagtgctgggattttaggtgtgagccactgcgcctggcccagacaaatagttttaaggagcagaaagaaacctgttgtgtctagggtatggtggggtggtatgaaaataaatttgagtttttttattttttgtggttttttttgagatggagttttgctcttgtttcccaggctgaaatgcaatggtggatctcggcagactgcaccctccacctcctgggttcaagcaattctcctgcctcagcctcccaagtagctgggattacaggtgttagccaccacgcctggctgatttttgtgtttttagtagagatggggtttttccatgttggtcaggctggtctcaaactcctgacctcaggtgatccacctgccttggcctcccaaagtcccattacaggcgtgagccactgcacctggccgaaatttgagtattttaagccataggcttagaaaaagaggagtgttttaaaatatcactctggcccagtcgtagtggctcatgcctgtaatcccagcaaaatttgggaggccaaggtaggtagataacttgagtccaggagtttgagaccagcctgggcaacatggcaaaatcccatctctacaaaaaaaaattaaaaaatgtagccaggtagggtggcacacgcctgcggtcccagctactcaggagtctgagatgggaaaaccacctgaggctggggaggttgaggctgcagtgaaccatgattgcaccactgccccagcctgggtgacagagcaacaccctgtctcagaaaaacacaggtgggtgcggtggctcatgcctgtagtcccagcactttgggaggccaaggagggtggattacctcaggttaggagttcaagaccagtctggcccacatggtgaaaccacatctctgctaaaaatacaaaaattagtcaggcgtggtggcacatgcctgtaatcccagctacttgggaggctgaggcaggagaatcacttgaacccgggaggtagaggttgcagtgagctgagatcacgccactgcactccagcctggatgacggagtgggactccatctcaaataaataaataaataaataaataaataaaaatgaaaaagaaaaatagaattaagcaaggcagtagagaggtatgtcaagatgcagtctaggaagttgtcatcatctcctattgtttcctaactcaaaaaaaaaaaagattctctgttttttactctgctctggcgaaaagttacatcagcagtggtcttctagactgagctactccatccaggtcacacttttgcttgctacatgattaaggataaaaaggattttcctgtagttttggctagctgaaaggattaaagtaaaccagagatagtcaatctgttaatggtagactatattacaaattgtgataatgatgttaataagaccttgatgaagttccagataatttagctatggacacattcttaggttttttttttattattatgggcattttttttaatacagggaaagtataaggtataaagtaaaaactatgcataattcagatatttcaccacatttttagtagttgaaatcatactgtataagtcttccgctttttttatgcaacattataacatgagtgtttttccttgttattaaaagtttttaatgaatacataataaaagtatagttacctgccgtaatttaatcattcttctattagggaacatttgagttgtttgttttttcctgtgataaataataccatgaggaatcatctttgcattctatattatgtattttaaattcacacttaataacctctttaaaaggttatataacctcttagtaacctctttaacagttatttagctttcatatattactgccttagaaattttggaaaagaattattgaaatagtctcttaagtaaggagactgaaatctagaagacaggctgcaagcttgactctggctctgaaattagccggaaataaactcacgttgcaagaaatctttttgtttatttttagttgttgttgcggaagcaacgtatacagtagactgagttgtcagtttgtgtgagagaaaaagagtgtctttttgttgttattcgtagcctaaaaatgatggccagattttctctggaagccagagtagtggtaggtgacaaaccagattggagagagagaggacaagtagtgatcactggcagtggccattaggtcactagctacagaggccatgagagtaaaataaagacggagaagtgtggctgttctgagtagactgctgataggataccagtaactctgcagtcttgaagacacagcccttatatacacagccataaggaagttcttgtccaggccagtagaatagtaagtgccagagtaaagacttcgatatgtagcttgtttagaagtcaccttgaaaaaagaatattaatggtgggtaatatttttcactatctctttgcttactggaattaatgaattcagtaattctttttttttgtttgtttttgagatggagttttacaccgtcaccctggctggaatgcaatggcgcgatcttggttcactgcaacctccgcctcccgggttcaagcgattctcctgcctcagcctcccgcatagctaggattataggcgcccaccgccacgtctggctgatttttttgtatttttagtagagatggggtttcactatgttggccaggctgatctcgaactcctgacctcgtgacctgcccagcttggcctcctaaagtgttgggattacaggcatgagccatgcaccctgcggaattcagtaattctttaaccagtggttgtgtttctattgctatgtgttaggtattatatttgttttattgagttaaatgtgcttcagtatagtttttataatatacaatattaggtggtaaatgtatgtgccattttctgtctcgtatgaatgccaaatgtgtacttttaaagttgctgttacctgaatttctactggtgttaaaaattaaggacttttcaaaacagccagcaagaaaaagctatcaaagattatgaagatagtgtcaaaagcacttaggagtcaattttaagaggcctctactggcccaaaatagaacagtttgagcattagtcaggataatgactaaactagattgaaaaatgccaagtaatgtttaaatttatgaagttgtaatgatatacacacaaattaaaaatgtgtcactattacaggaccttgggtaattaacgtattattttgagaactggtaaataaagggaaagaagcatttagtctgactttcctatatgaactacttttctgaataaccaataaatgatggatattttctctttgtagaaatattctgagtagtaaatgaaggagtaataaaattggtatcatcactttgtaaccacctaatgaataaatgattctaagcattgaagaacagtagacactatgatcacaaataaatcaaccagttactgtgtggttcctgatgaaagaactcatcaccacttaacaaagtagtgttgacctaataaaaatagcctgaagttagataaagcctttacagccattgatttatagaacatacagaagaatgggctaaacaataccataggaattcagtcagcaaaattcagcctgggaaactaccaggacaaaaattcaggacaaacaacctggctttttcaacataaaaattgcagttaaaaaaaaaaaagacattctgtagcttaaaagagacttaaaagacatctcaattagtcccaatatgtggactttatctggatctattcacatagaaactggaaaaaaattgtaacatttgtaacaactggaaatttgaaattgagaatatttgatattaaggtttttttttaatttctggtaatggtgttatggttgtgttaaagtttttgtctcttataaatacatactgaaatatttatggatgaaattatatctgagatttgcttcaaattaatattggtgcaggtagagatgagatgaaattgtccatgagttgatcattgttgaaagtaggcaatgggtacgtggcagtttattgtgctggtttttctacctttgcatacgtttgagattttctgtagcattttaaaaacaaaagagaacactgaaaaaaatctagcatcaagtcatggaaatgggtcgtcttccaaggaaggacttttaaactgtggagtaatccctctttaaacatcttagcacaaattctatgaaaatatttcatcagtgtatgaaaaaaaagttagtggcatattgtctttgtcaggtaataattacagaagatattttgaatagggctgaacagtcagaacaccagtggccaggatgaagaagatgcttttctggagtgtgtttcctatgaaaatctgctttagcccatatttactaattatttttgctagtaggcagcatattttaatgtgtaggaatcttctgctgttatatttgctttactgaccctttaaaaaatagacacaaatgaccaaaaacattataggccttcaacagtttctcaaataagtaaaagaatcagttcacatcagaaagtttttcaagaaaataagttctaggccggaaacttgagtgaatacttatgttcccttatgtcctttgtgctcttcatattattttcaacattcataataatttatgttcctgatgaattctctgagccattaagaaatggcttttctttcagaatgcatatatctgcacacacaatccatgaattaacatttttggaagatcattattaagcacttacaaaagtttcaactcttaaatgcttaaccctccatccttggaaaaacttgactatctgtaatgatgtaatttgatttcacctaaaactttacaaaatatatgaatgatatctatatagggtttttgggttctttcaaaaagaggaattatcagtactcatggtaaaaaaagagaaggagggtcacaggaaaataggaacaaatttggttttctagtacttgggtaaattgtggaatatactttccttctgtatttgagcccttcaaagctcacagtcaacccagatgaagcagctgaagtgctttgtaattagtcttctattcttcactcaattaaaattccccatttactgaggcatctcaccaaatgttgatctaattatctgattaaaaaatcggtgacagtatgaatgaatgattaatataattcacttgattgtgaaatgaaagaggaataaatctttagctagtggaagaaggacacaggataattttgtgtaggaagtcttcctgaccttccctcccagagtcctttattctgaaaagtaattatgccaacatttttttagcttgcaaccaacatgcaaaataaagagtatctattatgtactatatacctttcaaaatagctgaatagcataaatattttatttgattttttatatttttaaaaatttccaaataagtttacaagttagagaaaattagaatgttgtcactaatttttctttacaaaatggtatttcatgtgtacctagaagcagtgaaacacctctggagagggtggcttggcaattaattatgcagctaggacttggtttgaaattaaagtatatatattttttcttttagagtggcagaatttagtgacatttggaagcttttcaaacatggttccctgtagtcatccatatattggtaccctgagtcaagtaaagttgtactccacaaatgttcagaaagaaggacagggatcacaaacactcagagtggaaaaagtaccatcatttgaaacaggtatgtgtaatttttttaatgtacttttttctgtatactggaatagtttgtgtaaaattatttgttccctggatgtttgatagaacttacttataatactgtctggactgatgttttctttgtgggaactattaaagcacttatttaatttctttattttttctatttctttttgactcagttttctacgaaaaactatctacttatctacttaaactaaaattttaatttattggtataaagtgtataataatgttccctgtttactcccaatagcatatgtagttatgtccttttttcattcctaatatttgtcttattttcttggctagtcttcccagaggtttgtgttttattatttttccaagtaatttttttttactttgaaccattatatgtttgtatcctatttcgtcaatttttactttttaattatagcctcctttctgcctttttttgggtttgttcagtcattattttttgttttgttttataacttcaacttttgtttagattcaggagggtacatgtgagggtttgttacatggtattttgtgtgatgatgaggtatgaggtacacgtgatctcatcacccagatagtcagcatagtaccaaatagtttttcaaccattgctgccctctctctctctccctcatctagtagtccccattgcctatttttgctatctttatgttcatgtgtacctagtgtttagctcctagttataagtgagaatatgtggtacttggttttttgttttctgtgttaatttgcttaggataatggcctctagctacatccatgttgttgcaaaggacataattcattcctttttgtggctgcatggtattccatggtgtatatgtaccatatttactttatccagtaccccattgatggacacctaggttgattctaagtctttgctattgtgaatagtgctgcaatgaacatatgagtgcatgtgtctttttggtagaataatttatttctttttgatatacactccctgatgggattggctggagttctttgagaaatctccaaactgctttccacagtggctgaactaacttacattcccaccagcagtgtattaagtattgacttttctctgcagtctcactagcatctcttgttttctggttctgtcattctgttattaattgtcagttagacacttagtttattaacccttccttcctttctgaagtagacatttaagccatgataacacatcccacagttttgatatataatatttttattatttgtaaatctaaatgtattcttatttctattgtgattcttctatgactttttagttgttaaagcatcattgtaaatttacagatagatggaatttttgtttatctttttgtatttaatgtatttcacaaaatgtggtctgtattgattcagtcttgaaatttgttgagtgtaacattttagtttagcaattggtcagtttttctaaatggttttcctgtgcttgaaaataatgtgtatttttaattgctggtgtggtgtttatacacatcaattcttatttttagttgttcagtacagatctttgtcctgttttaaaaattcattattaccaagggagatgttggagtatcacactctgatggtagatttgatggtctttttttatggttctgtaaatttttgctttttataatttgaggctgtcattagatacatacatatttagaattattacctaacactgatgaattattccctctatcattgtgcagctactgtttttctttagtgagctctccactacatttcttttggttactattttcccatcctttgattttaacttaattttgtcttaatatgatcatctctgtcttttaactggaagtttaggcagtgtgcatttactgtaatcactgatatagttaaacatatttctaccattttatcatgtttccttgtcctgttttcttaaattccttttttgcctttaattttttttctcattccgtcatcctttctcctctattctctttctctcatttgaaagttttagactctgtgtctgtacttcaaagcctaaagttaattgataaatttactttccttctgaaaaacacaaaagctttagagtgctttaattctgatcaccgcctccaacttatgtgctatttgttggctaatattttctgtctattctgctctttctctgctataaagtatgcattgttgcttgcttagatttattcagaatctttgttagccaccttttcttatgtctgatctttctgtctgatgtacatcctatacaagttcgtttagctgaggatcttttgtgggaaaggcacatttaagatgttactcgattgttttttggcttccactaattgttgagaagtcagatattatgcctttgtttgtatattttttctatttgacagcattttaaatttgattagctttaatttgaaagtctttttctttggtataaatggcagttttattatgaagtaactaggtatgtatttctttgtatttattctacttgagatttgttgggcttcctggatctgaggattgatatttttctacagttctggaattctacaattctcttattatcccttcatatattacatcttcccatttctgtattatctccttctggaacttcaattagaaatatgttacatcatcttatgtttttcatgtctttaaacctctctatcgtattttctatttctttacctttctggcctgcattctgtattatttcctcaggtctaccaggatcactaatttcctctttagttgcctctaatatgctggttgattatgtatgttgggtttttaacttaaatgattatattttccttttttttttctttttctttttttttttttgagaccaagtctcattctgttgcccaggctagaatgcagtggtgtgatcatggttcactgcagccttgacctccggggctcgacctaccttagccccctaagtagctgagaaaacaggtgtgtgctgccacgcccagctaatttatttttatattttgtagagacaaggtctccctgtgttgcccaggctggtcttgaactcctgggctcaagcaatcctcctgcctcagccttccaaagtgctgggattacaggggtgagccactataccggccatatttttcatttctagaaattgttttttaccttgcttggttggtctttaattccttggttgtattttcagacttaccttttattacattagatacgttaaacatagctattttatatttttaacagaaaattctgctatatgaaatctttttgtttctcactatatgagacttttcttcccttttttgctcttattcatgatgtcgtacctgtgttttataactgtgagttcttcattttccatgatgtttttgtatcttgaaagtatttgatgtttatctggactgaaaatgactttctgcctggaagggtttgtttttgcttttgtgtgctactctccagtagcattattgggaccacattaaattcagttctctgctttagatttacattgtgaattcagactgtaacttgtgttagggttcacttgtctgtaggattttcagaggagtatttttttcttccccactatttaacaccaaaatacagataggccagcttacttgctgttcccttctatgtgtattatttatttctagttcatagtgatcccatggctgtggctttttacctcagtgtcccctgttagactccttatcttggcagaacctagtcttattctctggtcttccatgcccgttgtagctctggaggtagaaataagctcaaagaatccaagcttcaatagaaatccggggaaagctggctttgatatgttcatttgttctgtagagattctgctttcacttcatttttggccttttcgtatcattttttgctagactaacaatgcatttaaaaagattttgcttggggtacaataaaaggaagcattaaaggaagtcctttattcatttattcattaatttactcaagaaatatttattgagcactttttatatggcagcaaatgagaatgactcagagttgattactaaagcagaaaattaagcaaacaaatattgtattgtaacatttagccctgtattcatgtgttcagcatctgtggattcaaccaaacaaggattaaaagatttggggggaaaatggatggctgcatctgtactgaacatatacagacatttttttcttgtcattatttcctaaacaatacagtgtaacaacggtttacttagcatttgcattgaattcggtattataagtaatctagagatgatttaaagtacatgggaggatgtgcataggttatatgcaaatactgcaccattttataagatggacttgagcatccatggattttggtatctacagggaggtcctggaaccaatccccaacaaatactgagggataaccatactgtgataggggaaattcattaatggtgctgcaggggcacataggagaggcacttaactgagtcttgagtggttaggaaagatttccataaggaaatgatacctccttggagacatgaaagaaaagtaggtattggccaggtgtggtggctcacacctgaaattctagcactttgggagaccaagtgtgtggatcacttgagcccaggagttcgagaccagcctgagcaacgtggtgaaactctgtctctacaaaagatacaaaaattagctgggcatagtggtgtgcacctatagtcccagctactcaagatgttgaggtaggagggtcaccttagcctgagaagtcaaggttgcagtgagccatgatagtgccactgcactctagcctgggcaacagagtgagaccctgtctcaaaaaaaaaaaaaaaaaagtaggtatggatgtgtggtgaatggtggaaaaaggaggtaaaattcctggaatagtgagtagaggatttggcggtggggttggtagtgttgaaagtacaagagacggtgatccagcttccatattccttttaatttttttctactgctctcttgcttgctcactatgtttcagccaaagcagtctccctttttctcagccatgttctgagaaaatggcaagagttaagcactagtcagatcggggtcttgtttgggagtttggactttgttttgtaggtagtgggaataacagagtattattaatacaagtaggggaggtacttgatcagatttaaggttttagaaagataactagttgcaaaatgtcaaacaggttgcaaaggagggagattgaaagtagtagtacaaatgaaggtctggagtagggtaataataatgcttttttttaaaggagtagatgaccttaagagatctaggagctgaataattaggacttagtaattgaatctgggggatgaagaagagggtcaagccaagggcaatgcttggttactgtttggccagctgtctagatgatttcattgatttctaaaattaggagtaccagagctggagtatattttaatgagatgatggcttggtttgcacatctgaattataggtgcctatggaaggtcttaacagatgatgcagtgaccaataggcagttggttatccagtgaatctactagtcactgcatcgtctgttaaaatgtcacacatcaggtcgggtgcagtggctcatgcctgtaatctcagcactttgggaggccgaggcaggctgatcacgaggtcatgagatcaagaccatcctggctaacccggtgaaaccccatctctactaaaaatacaaaaaattagccggagccgggcatggtggcacgcacctgtagtcccagctactcgggaggctgaggcaggagaatcgctcgaacccaggagggagaggttgcagtgagctgagatcgcgccactgcactccagcctgggcgacagagcaagactccatctcaaaaaacaaaagatgtcacacatcttaacacaactactatcctacttcaagatatcattatctcttgtctgatttactgtggtagtattctccctgggatctctgcttccattcttgtccttctgtagttcatttttcacgtaacaagtgtggtctttttaaaaacagatcatgtcacttttttaattaaaactctccattggcttctagttacccatagaacaaagccaagactgctagaataaaattaaaatttactattctgactctcaaagttctttctagctgatctggcttccgtattcctctttattttcttctgctactctcttgcttgttcattatgtttcagccaaagcactctccttttggttcggagaaaatggcaagcttgttgttatagggcctttgctctagttgcgttctctttccaaggtgcccttctccacatggctcagcctcttctggtcattcatatctcagtttaaatgtcagctctgcatagagacattttaaaatcactcaacctaaagtagccacccagtaagtctttaatactaccctaatttaatttttggcataggtagcacttactcctgattgatgttttccatattttatttcctcatcacctacatgtttgcaagctccatgacagcatgaacctcagtgtcttgctgatagtagggacataataaatatttataagtgagtgaatgcttagagttctaacctggaactaaagatttaggagtttttacctatacatagatggaactgaagccatgggtctgtttgggacagtgcagggacagtgtttagagtgaggagagatcttctagtacaaaatcccccacatgggtgagggacaggtagaagaggagcctgcaaagcagacttgagaaggagtggctggagaaaatccagactatctggtgtcaggagaagacagtgtttgaagaataataaacatttcaagaccatttttcctttagttagatgtctttcacaggggaagattttacagattccttgagaaacctgtatacatttaatggctccttgttttcattctttttcctaagcctcatcctccctttgggtttacctgtgcaatttcttctctttcttttgtggtgatggagaactgctggggtaaatattgattgagagtttgattttatgcaatgaaagaatgcagagtgtaatgagtccctaagttccagaaataagcatgtttattagaacacagttaagggaaaagaaatagtgatgaaataatataattaagggtaaaatatgttacaatgctctgcagaggtgaacacagactcaggggaaaatatttaatatggttccaccattcagaatctttcaaattgaaatccatgattaagtttcttttttctctgctgactggaataaaaatgttagtttattttcttatattagaaatacattgtttattgacagttttattttgggctcaatttttcagtacttgcttaggccacattagaccttgttagccatcagacagagtgcaagtaattgcttgattgaaagataatttgtatatttaaagatttgagattgagttttgaataattcaaatcacatgataaagtcaggaacagctcattaagaagcagagacttgctaaggaatccttaagtttttaaggagcattcagatttgttaaattttagtaaaattagttttaattttgctaatgacagcagatgtgtggcaaacagccagggtttgagcttaaaacaaatgtctagcgatattcatggatagaatgtttggttactgattgaaatcataaagattctactgcagtgatgcagtgtgagtttattaagttggtgctatgtaaaataagtattcatacatgtgtttaagccatttactagcattcttgtttgtgctgtataacactatatatttagtaacatctagacagtttgtagtgagaagaatatccagaaatatacagcttaaagcaactcattttatgtgattaagttcaataatgttgagcattgtagaaactagggttgtttctgaaacttttgacagtagatatcagttgtttggacattaggtaagttttgaaaatgtattattccacctttttcccttcactcctctctgccctgctctctgtttcccaaagctaaattgtaagaaatggatgtgtaggttctatagataaagatactttagaatttgcttgctgtgtagcgagacaaaaataaaatcataataatttaattttttaaggtcaaatgtagttactaaatagaagtgtttttaagcttatcttcaatttactagtatgacatcataacctacttaggatttggcaaacacttaaagcctttttagattttctgtacatgctttaggtatcaaaacgtactgtattttggtcaagtgaagtggctcacacctgtaatctagcactttgggaggccaaggtgaaggatcccttgaggtcaggagtttgagaccagcctgggtaacatggggagggagaccctgtctctacaaaaaataaaagaattatccaggtgtggtggcatgtgcttgtagtcccagctacttgggaggccgagacgggaggatcacttgagcccaacaggttgaggctgcagtgagccctgattgtgccactacactccagcctgggcgacacagcaagatcctgtctcaaaataaaataaaataaaataaaataaacacacacacagtatttggtcattttcctagtggttttcactgaaaaacaattgccaagaaatatactaaaaattacctgtaaaatattttgcttttatttcaaatagggctttgcttttgttagtgcttaatatattggcatttaattgcttcatataagctttgaaagaggtaactcaatggataggcagaacttctgatcacagtggtattgtgaatacatactttgaggcatgtgttctactaaccactcattggaataatagataaagtataaaaagagaaaattgaagacatagttggactaaaaaaagacatgttatatcaaagaaatggaacagaagcatctggactctgggtctgtaatctgggagtggcagctaggagtttggcttgtttggagtaatatgctacatgtgctatttgaatagcaaggtactggagtcagactcactatttgaacttatccacccacccccacagaaggagactgaaaatagctaattccagttgctacctgaggctgtgtcttacaggaagctgtaggcctagggaggcaaggagaagaccagtgtactagtccattttcatgctgctatgaggaaatacctgagcctgggtaatttatgaagaaaagaggtttaattgactcacagttccatatgactggagaggcctcatgtggcagaaggcacctcttcacagggtggcaggagagagaataagtgcaaacaggggaaatgcaagacacttataaaaccatcagatctggtgagattcactcactatcatgagaacagcatgggggaaactgctgcgtgatctgattacctcctcctggtcctgcccttgacacatggggattatggggattataattcaaggtgagatttggatggggacacagagccaaaccatatcaaccaggaactgaaacttgctgtttcctggcttagagactggattgaggggaaggaatttcaaactggcaatatgagatcaaactggcaatatgagttttgcatagaggtattagaatgaactctgagcacaagaatgtgaagaggagaatgaaaggatataccctattcagggtaagatggtgaactctaaaatttcaaaatacatgaagaatcctaatgctacgaaagccaatagaatcaataaatgtgaattaattccagttgaagctaaaataacagcttcaattgctttaaaataagtttaatgttctcaaaaggttaaatgaaggactcatattcattaaaaatgacagggaattttgaaacacaaacttgcagaaataaaaccagagcaaataattaggaaaaggagacaattagaaatcttagaaatgaaagtgtagccactaaagtaaaaatgtagtagactaaatagtcattgtcagtaggagagttagtaaattcaaattcagtctgaaggcacataggaaggcaaaaagatattccaaaaattgaaagcatttaagaacttgcagctctagcctacatttaataggtagagaaatggtgaggaatcaatatataaagagagatgagaatttttcagaatttgagaaaaacaggacttctcagatcagaaatatgttttgagtaccaagcaggataaataaaaagaaatctacccctgacactttgtagagacaccacagatttaaaaaccaaaacacgaaacaacccaacttaaaagctgacaaagagaaaaatcagaatactatcagcctaattgttgttctactgaagtagactttttacctgcaaaaatatgcagaaagcaaagatgggggagtgatttggaataatatccaggaaagagtaagaggaaaaataaatgctactctggaatttcatagtgatctaaataatcattgtagagtgaaggcaaaaataggaatgttatcatacatataaagatgaatgtcattttaaaaaaagcttattttctaaaattttgggaggtacatagtaggtgtatatatggagtacatgagatgttgtgatacgggcatgcaatgtgaaataagcgcgtgatggagaatggggtatccatcccctcaagtatttatcctttggtttataaaccaattacattctgtaagttattttaaaatatacaattaagttattactgactatagtcaccctattgtgctatcaaatagtagatctttttctatttttttaatccattaaccatcttcatctctcaaagatgagagtcattttactaaacaacccctccacattaaaaaacaaacaaacaaaaaaaactattaaagcatgtacttctgcaagatgcagaagaaacctggagttacagaagggaaaggatgaaatatccaagagacaacaaagaacaagaaatggataaaatgtcctggtaaaactattgataataaaacagtaaacttttttttaatattaaatgctaaaactataatcaaccaggctcagtggctgaggcctgatactataaccaggctcagtgactcaggcctgtactctgagcactttgagaagctgaggtgggaggatcacttgagcccaggagtttgagaccagtctgggcaacatagtgagacttcatctctacaaaaaatttaaaaattaactttgatgtgatagtgttcacctctggtcccagctactagagaagctgaggtgggatcacttgagcccaggagttggaggtggcagtgagctatgatctcaccactgcactacagcctgggtgacatagcaagatcctgactcctaaaaaaataataataatagtatgatggaagacatttagatcactatgaaattctagagtaacatttatttttcgtcttactctttctcagatactactgcaaatcaccccctacccacctttgctttctgggcaacaagaaaaaaactgtggaggaatattaccagatttcaaattatactacagggctttaataatctaaacagcataggtttaggttactaaacctaaatcctttatgctgttttactgttataaagacagacacataaaccaatggaacagaatacagagcccataagtgaatccatagatatacagtgagctcattttcaacagatgtgccaaaaacatacattggggaaaggactgtctattcagtaaatggtgctggggaaaactggatatccatatgcagaagcatgaaactagaccccttctctcgccatttacaaaaatcaaatcaaaatggagtaaagactgaaatctaagacctcaaatgatgaaactatttaaagaaaacattggggaaactctccaggatattggactgggcagatttcttgagttagatcccacaagcacaggcaaccagagcaaaaatggacaaatgggatcacattaagttaaaaggcttctgcacaacaaaggaaacagtcaacaaaatgaagagacaacccataaaatgggagaaagtatttgcaaactattgatctcaccagaatatataagaagcttaaataactctatgggggaaaaatctaataatctgattaaaatgtggacaaaatatctcaagagacgttttcaaaagaagacatgcaagtggcaaaaaaaggtgtatgaaaaagtgcttaacatcattgatcatcagagaagtgcaaatcaaaactataataagatatcatctcactccagttcaaaaggcttttatccaaaagacaggcaataacaaatgctagtgaacatgtggagaaaagggaacccttgtacattgttggtgggaatgtaaattagtgcagctactatgaagaacaatttggaggaccctcaaaaaaccaaaaatagaactaccagcaatcccactgctaggtatattcccaaaagaaaggaaaacatacaaaaaaattagctgggtgtggtggcatgtgcctgtagtcccagctactcgggaggctgaggcaggagaattgcttgaacccaggaggcggaggttgcagtgagctgagatcgtgctgctgcactccagcctggcgacagagcgagactccgtcgcaaaaaaaaaaaaaaggaaatcggtatatcagaagagctatctgcattcccatgtttattgcagcactgttcacaatagccaaggtttggaagcaagctaagtgtccatcagcaaatgaatggataaagaagatatggtctatatatacaatggagtattatttaagcataaaaaagaatgagatcctgtcatttgcagcaatacggatggaactggaggttgttacgttaagtgaaataaggcaggcacagaaagaaaaacagcacgttctcacttatttatggagctaaaattaaaacaagtaaattcatggagagagagagagtagaatgatggttactaggggctgggaagaatagtgggaggtggagagtgaggatggttaatgggtacaaaactgcagttagatagaatgaataagagctagtatttgatagcacaacagggtgactacagtcagcgataatttattgtacatttaaaaataactaaaagagtataattgggttctttgtaacacaaacgataaatatttgagatgatcgatgctccatttaccctgatatgattattacactttgtatgcctgtttcaaaatacctcatgtaccccataaatgtttaatgtgtacccataaaaaattaaaatataaaagcaaatttaaacaaaaacccaaaaaataataaaaagttttttttaaagaaaaataatgttaaacaatagaaatacagtcttataaattccaaatagcaattgggggattggatgggaggcgaatatagaaaactttttcaatctaagagatggagacggcaggaaaagcgaaataaaaataaaagcaaagaaaacaagatggtaaactgaaaacaataagatggcagaagtacaaatgtaccacagttaagtagtcagacttagtggtgttccatatcatttaaatgaactcataatctaaatatgtggaattagttaatttctgtttcattccatgttttcagagacttatattctggatcccctactaccccatctgctcaaggactttgcttttgggattatcctgttagcctactttatattttcttcgtggttattgcatcattcctatctctatgtaaaatgcagtcaacctttccttgattcattctcttcagctcctgctgaaagtccaaataccgcttccatttaatctcctattttctcctcaactattgtgtccattcccattcttgtccagaaactgctgttttcaggaggttccagtgatcttcatgttggtaatctagtatctattcttttttttaccacctagaaaaatacacaaatacctacacataaaattaaatattgttctaaacacaggcaatacaggaaggtggttaagagtgtagagtaatcaaaataactgtgcctccatgtttaaaatactagctgcgtgactttgggagaatttacaaaacctttctatgccccagtttcctcataacaaggaaaactggctctgtgactttgggggaagttataataatctctgtgcctcagttttctcataagatgaagataatagtattttcctcagagcaattttgtgacaattaaatgaaataatttgtaaagtgcataggacagtacatggcacatgttaaatgcttagtatatatagccattcttcataaactctgaaatgttattgaatgaggatataaatataatggaaaatgttttaagggtgagatttttacaatatatttgatacatacaaaaggatattataatacatatgtaagttaacaacataataaaatcaaaccttggaatttactactcaagctaagaacttcactgtcttgatcacatcctcctatctccatttgtcctatgtatccatgtgaaaaaaaagaggaaatagctttatacatttgtatatagccctgattatttacttttgcttgtttgtgaacttcgttgtgatagcttattgtatatattcttttgtgatttacttttttcattaaatttagttgctaagatttatcttattgattggtgtgtgtgtctggttcattaatgttcttggagataattatagcacatactgttcagggatgttgtatgagttaaatgagttgatacatgcttagagtagtacttagcacacagtaaaagctcaaagaaagatggccattattatgtttgttactatgcactgctgtatgaaatgttgtgtgaatataacatggtctatctatctatctatctatctatctatctatctgttctcttgctaatgggcatttgggttgttgccagtttacaacaacagaacagagtcctgctctgaacactcatgtacctctgtccttgtgccctcgtgcaagagtttcttgaagccaaatatattgacctagaagaattgctgggtcataaattatgcttgtgttcaactatagtagataatgccaacttgtttaccaaggtattgtgcccatttatatttccaccagcagtgtatgcattttcattgttccatacccttgccaacattaggtattctcatattttcctttttcttgatctgatggttataaaatagcatcttatgatttcatttggattctattaataatggggcagacattttttcaaatgtttattggttatttgtatatccttttctgtgcaagattgtccttcctattttttctaatggattgtcatttttttgatctagaggacttatttaaatattcttgattacttttgttgattctatttgttggaaatatcttctctcagtttgcggcctttcttttttctctgtttttttttttttatgggattacttgatgaacagtttttctgagttttaatttggcagaaatttatccagtttttcttgtgttgtttatatcttgtttaagaaatctttctgtaccataaaagtattctgtattatctactataaggcatgtaaataccttaacatttaaataattaattaatctacctgtaattgttttttctttatggtgggaggtagattcaaattttttaaatttaatgtgttttttggtaggtgtagggttgtacagttgtcccagtcccacttaataatcattctttattgattgaatggtatctctggtacagttttaaatagaagaactgtgcattcttttgttccttaatttaaaaatgcatttaaacattcaccattaaagacaatgtttgttgtaggtttgttttaccctttaaagaaattcctatttgtcctaattttctaaaagggtttgagatttgcatggatgttgaattgtattaaatgctttttctttagcttctgaaatgattgtatagtttctcttctttaatctgttaatgagataaatagcttttgtaatgtttaactactcttacattcttaagatgaatccaacatggtctgatacattgtcgtttttatgcattgctatattacattggctaatattaattaagtttatagatttatgaaagcagttgtttaatgtaaacttcttttaataaactttacagcagaaggtataggcacagaactcaaagctccacttaagcaagaacctctccaagtaagaggtaaatatattttatcctatttttgtattataaagatgttttgaattaaatatataacattggtttatgtagagctctttatagttatattattctaagagtatagtttattttttacttttatttaaatagattgaccataaggatttattctcttacatataaactaattttctattaaatttattttgcatttttgtcacaaattttttcaaaagcccaagaaaggaataatggcaaataagaatcatcaattgcattatcatttttagaagagtaaggcaattaaagaacaagaggcccacacttttcagctactgcttattcaaatccaggtagagtttggccgttattgtctgactttattttctaggagaaattgaaggaattcctgtttgtagctctcttctgtataacaagctgtggttcccatctccaaagcagctgtttcatggaggcagcaactctatgattaacagcactgtggctttggcatcagataaaactggattaaatttgtggctccagtgcttaccagctggctgaccttgggcaatttacttgacttctctgaggcttagttttctcccctataacgtggtgctgaaaatgagacttcttttctagggtaactttgattaacacatggtagacaattaataacaattaatgttgttatagcagccatcattatcattatcatcctcaccttcatcattaataacctgggccagggttttttagctatttggaagaaatttttttaaaaattttttaaaaatttaaaaggcggtttagagacatgaaactcacgcaaaaaaaaaatctgtatttccttatattttttttcagataaggttttgattttttaattgaactttatttttcaaatattcttattacataatatttgtgcatttaatgtaagtatgtattattttaggaatctttttacccactgtagtgataggtaatcttaggctgaatttgctctttcaacttggaagtagaacagaaaattgtgaaataataaatatgagaatagaacatgaagtgaatagatgacaattcgaaatagaacacataagtttgttattttgctcttgcacttcaggtatttgcttatttatctctatcatatgaccaaaagtctcaccttataatgatttattaacatagaccaatgttctgtaatttttaactcacagactataattgatgccaaattggtattggtattggtgtcgctggcctttttatgagcagtttgatacttgacaatagaaaaacaatttattagaaggcaatatttaacctataatctataataattttttttgtaatttttaactgatgaaattattctgtacttttcttcagttttattacattatgtgaaatggtctagtggctttaaacttttttgactgtaacccacataagaaatactaattagcaactagtatacacatagattagtatatgtaaatgaaacaaaggttttcacaaaaaaataattatatgtagtagtctttgattactttatatttctactttgtatgaaatgctgatttcacctcacagtttgaaaagcactcaactactctgttattttatttatttatttatttattattttttttggacagagtctgactttgtagcccaggctggagtgcagtggcatgatctggctcactgcaacctctgcctcccaagttcaagtggttctcatgcctcagcctcctgagaagctgggattacaggcacccaccaccacacctggccaattttttgtattttttttttagtagagacagggtttcaccatgttggccaggctggtctcaaactcttgacctcaagtgatccacctgccttggcctcccaatactctgtaattttttatcaaaacttcagttcattttcatttagaccctaagcaatttaaattataccaatatgatttagacagaccagtaatacctgttcaaggtgttcattagacaaaggttgacattttgggatcagttatagatgacatatagagacaaaagctagatggctacaaatgcaatttcatcctattctgcacttggataattttttctctgatgtcattcagtgaaaaagatcagttttctgtgaaattcattagtgaagcctcttaagtatcagcctatattcatcttcacatgtgactttcaatgtgcatatttattatgttttcctgttttttgtttagttaaagcagtccttaagaaaagggagtatggctcaaagtacactcagaataatttcatcactggagtcagagcgataaatgagttctgcctcaaatccaggtaatttttttaaaaaatgtagccgtgtgtcatatctaaataatctaaataactattcctttcttagagtgtgttacctgctaccatccatatatggaaaatttgctactggctccttaaaatgaagagatatttttattcagtcaaaaatgttaaaaattgttagcaaactaaactgaatcctgccccagcattagcaattctagtctttcttagtttcttaaacccacaatggtaaattcttcaaaagctttccatca

SEQ ID NO: 14118 - DNA, 819 bp, Homo sapiens
cccaggcagcttgtggcggcgaagccatcggtgttcgctgatgtccagtctatggagtcagttggtaccggtggcggcgcggaggcagaaggcggtgtccgagtaggggcctctgccccaccaggatgttacccggcttggccgccgccgcggcccacagatgtagctggtcctccctgtgccggctccgtctgcgatgcagggcggcggcctgtaatcccagcgaccgccaggagtggcagaatttagtgacatttggaagcttttcaaacatggttccctgtagtcatccatatattggtaccctgagtcaagtaaagttgtactccacaaatgttcagaaagaaggacagggatcacaaacactcagagtggaaaaagtaccatcatttgaaacagcagaaggtataggcacagaactcaaagctccacttaagcaagaacctctccaagtaagagttaaagcagtccttaagaaaagggagtatggctcaaagtacactcagaataatttcatcactggagtcagagcgataaatgagttctgcctcaaatccaggtaatttttttaaaaaatgtagccgtgtgtcatatctaaataatctaaataactattcctttcttagagtgtgttacctgctaccatccatatatggaaaatttgctactggctccttaaaatgaagagatatttttattcagtcaaaaatgttaaaaattgttagcaaactaaactgaatcctgccccagcattagcaattctagtctttcttagtttcttaaacccacaatggtaaattcttcaaaagctttccatca

SEQ ID NO: 14119 - DNA, 95868 bp, Homo sapiens
aaatgacgttgccgtttccgggtcacccaggcagcttgtggcggcgaagccatcggtgttcgctgatgtccagtctatggagtcagttggtaccggtggcggcgcggaggcagaaggcggtgtccgagtaggggcctctgccccaccaggatgttacccggcttggccgccgccgcggcccacagatgtagctggtcctccctgtgccggctccgtctgcgatgcagggcggcggcctgtaatcccagcgaccgccagggtgagtgtcccgcgctggccgctggctccgtagaagccgaactggagggccaggctgggctcggcgcctcgcctggggcaattcgcccacttgcctttcgccaacctcagaaccttcctttctggcctccgcctttccagttcagcctgcgcagcccgcgggggtcctgacaggtctctgactctgatgccttctgcagccctagcatggcccccgcgggaacttgtgggcacctcgcgggccggattgcacctctgaagcctaccgctttgtaccaaacaaaatgttacgtgcgcatcgcggtgtcccgcggttactcacctccgcggttggaaattgcggactccgcaaagttccagggtctttggagctttccagcgcaccttcatttagcacttggttgagattttcttggccttctttttcttactctcccaacttattttcttaaattttctaaaaggaaggaggggtgctactcactacggatcttttggaagaagtacgaaagtatccgacaatcattgaatgaacccagtttgggtccgaaaaacaaagaaactcttcagttcggctgagcagtctttttggtgaaaaggtggcagttgtagtggtaacccagaaaaaaaggtggttgaagagaattttcgtctctctcaacattcttttctgactcaaatttaaatggtttgagagtttccaaaataacattgaactaatcaggcttaccttcgtttttgccgtagcttgacacacattgcttgacactgagaactgataggatctctgagggagaagacagaactaagtccacccttaacctaatccctccattcttgggatgcagagagtatttaccgaaacattcatgttcgaagccaggtgtggtggtgcgctcctgtagtccagctactcgggagactgaggcaggcagatcttttgagcccaatagttctaggctagccttggcaacatagtgagctgtctgtaaaaacataggtttgaaaaaacctgtaacatgttcgtgacctcctgaaagaagtcggaagttgcagtcattcgagattttatgtaatataagctatagtaactatgctgtggatataaattagaatatattcgtatcttttatttgcaataaatgtaaagctgaatcttagaatttcaaacggataaattttaacagcactattcccagggcttttttggtagtgatagaaaagtgtaactgttgagtttttccatattggcaatatactgccaggttcccttatggacagaatgaatcatcggctgggtgcagtggctcatgctgctaatcctcaggaagattgtaaaccttaggacgctgaggtgggtggatcgcttcagcccaggagttccaagaccagcccgggcaacatggcaaaactgcctctctacaaaaaattagcctggtttggtgacgcgcgcctgtaatcctagcctgtactcaggaggctgaggtgggaggatcgcttgagcccaggaaattgaggctgcagtgagccttgagcatgccagtgcactccagcctgggtgacagagtgagacctgtctcaaaaaaaaaaaaagaaaagaaaaagaaaaatgaatcatacgtttatactgtactccagaatccccaagtaagtttctaacacaattgtttctattgaccaagcaattttggcattttacactgaaattacagtggctgttaaatttagtctaaactgccctttaagtgttggcaaaaaggagaagaaacagtgtaatttgtaatccctcttctgtgtagctgtcattatgttgaaaattatgtattctttgtctcatctgtctgtgaaacacagataattattacctaccttagtggtcaaaatgactttgcaaagttgtttggaatgtttattactacaaaaaattaaaattttttttacacttaaaaatgcttagtaggtttttaaaaataactttgtgaaaatttagtttcagtaatgaagcatttcttaaaagggcaaccattattatggcaaaatttaaaaatcatttagaaaaagagtactatttaaattggatgcatgtgagaagactatttgaagaacttttggagaaagaaaatctaaaaacagttgtttttatttgtctagaagtaaggtttagtttatgcttctaaaatgcctgtggctgggaaaagcttataaagcataaggagaggaggaaaccttgagggattgcttgaatacttaaaaatgaggaatgcctttaaaggcaaaatagaaactgtctaaaagaaatatgagagccctgtttgtaattttgagttgtctgatagccacattaaaaaaagtaaaattaaagatgaattaattttaatatatcctagaattaattttaataacgaaatttatatattttaataataaaatatataaaatttaatactattttattaagtatattcaaaatatttcaacatgtaatcaatatcaaaattattgaagtattttacatcatctttttgtactgtctttaaaacccagtgagtattttacactttcagcacatcacagttcagactaaccacgttttaagtgctcagtaaacagtgactactcaattagatagtgtagttagagttagtatctaagttataaagaatttttacaaaccagtatacattccagtaggaaaatggacaaaggaattgaatacaaagttcataaagttgttcaagtggccaataaaaatgcaaaaatgttccatactgaaaaacagagactttaaagggttttacttctcactgcctatttcattttggccgaatttttcataatgataataccccatattgagggtgtgggaaaacaggaactctcttaactactgattgaaaacataaacggtttatgccctctgacctaacagtttttactcaaaaggatttactttaaagaaataatcaaaatacatattaaaatgtttgcagaagtttattatagtaataaattggtagttcatagttatggagagtgggaaactgaaatatattatgatacctttattatgggctggtgatgtatacaaccatttttttaaaaaattataattcagggctgggtgtgttggctcatgtctgtaatcccaacactttgggaggccgaggtagggggatcacctgaggtcaggagttcgagaccagcctggccaacatggtgaaaccccatctctaccaaaaatacaaaaactagctgggcatggtggcgggcgcctgtaatcccagctacttgggagactgaggcaggagaatcacttgaacccaggaggtggaggttgcagtgagctgagattgcgccactgcactccagcctgggcgacgagcgaaactccatctcaaaagaaaaaaaaaagttataatttagaagaatagtgacatggaaaatactcttgtgttattaggtaaaaactgtagaaaaatacagtgaaaatatatactgtgatattaacagtgagtttgtctaaaaatttttttatttgtgttttacaaatgatctacagtacacatatacttctaaagaataaaaatgttacttagtttctgtagtaagtatatccttttttataaaaagttctttgggttaggatagagcacatatttctttttttcatgtatttataccttgcctcatttggcaaaaatttgagaggggaagacacttaagtatactagatgaacactgaaattaataaaagtgtaatttttaaatagaaaatagaaatcaaacatactatgttattattgtctccaatctgctagtatttattgtcataagaaaagtaggctgagaatttaacttttatccccagcagaggtccctcctcctcctcaacctctttaaataactaagagtattgacagttacaaaagaccagtctggccaacatcgtgaaacctcatctctactaaaaatacaaaaattagctaggcatggtggtgggcgcctgtaatgacagctactcaggaggctgaggcaggagaattgcttgaacccgtcagatgtggtctcaaaaaaaaaaaaaaaaaaagaccatttagactgtcaatgctcttagttgtttaaagaggttggggaggaggagggacctctgctggggataaaagttaaattcttagtctgattaagagagcattgacagttataaaagaccatttagggctgggtgtggtggctcacacctgtaatcccagcactttgggaggccaaggtgggcggatcacctgaggtcaggagttctagaccagcctggccaacatggcaaaaacctgtctctactaaaaacacaaaaaaattagctgggcatggtggcaggcgcctgtaatcccagctacttgggaggctgaggtgggagaattgcttgaacccaggaggcagaggctgcagtgagccgagatcgtgccattgcactccagcctgggcaacaagagcaaaactccgtccccccaccaaaaaaaagaccatttaggcaggcagacaggaagattctatgcagatcaagttcatgatagaatttattgtacttaagtataaaatgaagctaactgtagtatgtgcctcctagagtttttgtgaatgagaatcattcagcattggatgccaggcattatagttgctgatagtgtagtgctgaacgaggtggatggtttccacctttcttccaccagaaataaatatatttaaagtgccatagaagagataggcaggatgatgggctagaaagtagccaggatgggctatttcattcgataagatggcctaggactccagcttttctgaggtaatgactgagcctaggcatgaaagatgaaaatgagcaagccacgtgaaggtctgggagaaagagcaatttgggaagagtaaagaggaactgtaaagatcagactagtatgtatatatgtatgtatttttgagaaagggtcttgctctgtcacccaggctagagtgcactgacaggatcacagctcaccgcagccttgacttcctgggctccagtgatcctcccacttcagccttctgagtagctgggaccacaggctagcgccaccatgcccagctaatttttatatttttgttagagactgggtttcaccatgttatccaggctggtctcaaactcctgagctcaagcattccacccatctcggcctcccaaagtgctgggattttaggtgtgagccactgcgcctggcccagacaaatagttttaaggagcagaaagaaacctgttgtgtctagggtatggtggggtggtatgaaaataaatttgagtttttttattttttgtggttttttttgagatggagttttgctcttgtttcccaggctgaaatgcaatggtggatctcggcagactgcaccctccacctcctgggttcaagcaattctcctgcctcagcctcccaagtagctgggattacaggtgttagccaccacgcctggctgatttttgtgtttttagtagagatggggtttttccatgttggtcaggctggtctcaaactcctgacctcaggtgatccacctgccttggcctcccaaagtcccattacaggcgtgagccactgcacctggccgaaatttgagtattttaagccataggcttagaaaaagaggagtgttttaaaatatcactctggcccagtcgtagtggctcatgcctgtaatcccagcaaaatttgggaggccaaggtaggtagataacttgagtccaggagtttgagaccagcctgggcaacatggcaaaatcccatctctacaaaaaaaaattaaaaaatgtagccaggtagggtggcacacgcctgcggtcccagctactcaggagtctgagatgggaaaaccacctgaggctggggaggttgaggctgcagtgaaccatgattgcaccactgccccagcctgggtgacagagcaacaccctgtctcagaaaaacacaggtgggtgcggtggctcatgcctgtagtcccagcactttgggaggccaaggagggtggattacctcaggttaggagttcaagaccagtctggcccacatggtgaaaccacatctctgctaaaaatacaaaaattagtcaggcgtggtggcacatgcctgtaatcccagctacttgggaggctgaggcaggagaatcacttgaacccgggaggtagaggttgcagtgagctgagatcacgccactgcactccagcctggatgacggagtgggactccatctcaaataaataaataaataaataaataaataaaaatgaaaaagaaaaatagaattaagcaaggcagtagagaggtatgtcaagatgcagtctaggaagttgtcatcatctcctattgtttcctaactcaaaaaaaaaaaagattctctgttttttactctgctctggcgaaaagttacatcagcagtggtcttctagactgagctactccatccaggtcacacttttgcttgctacatgattaaggataaaaaggattttcctgtagttttggctagctgaaaggattaaagtaaaccagagatagtcaatctgttaatggtagactatattacaaattgtgataatgatgttaataagaccttgatgaagttccagataatttagctatggacacattcttaggttttttttttattattatgggcattttttttaatacagggaaagtataaggtataaagtaaaaactatgcataattcagatatttcaccacatttttagtagttgaaatcatactgtataagtcttccgctttttttatgcaacattataacatgagtgtttttccttgttattaaaagtttttaatgaatacataataaaagtatagttacctgccgtaatttaatcattcttctattagggaacatttgagttgtttgttttttcctgtgataaataataccatgaggaatcatctttgcattctatattatgtattttaaattcacacttaataacctctttaaaaggttatataacctcttagtaacctctttaacagttatttagctttcatatattactgccttagaaattttggaaaagaattattgaaatagtctcttaagtaaggagactgaaatctagaagacaggctgcaagcttgactctggctctgaaattagccggaaataaactcacgttgcaagaaatctttttgtttatttttagttgttgttgcggaagcaacgtatacagtagactgagttgtcagtttgtgtgagagaaaaagagtgtctttttgttgttattcgtagcctaaaaatgatggccagattttctctggaagccagagtagtggtaggtgacaaaccagattggagagagagaggacaagtagtgatcactggcagtggccattaggtcactagctacagaggccatgagagtaaaataaagacggagaagtgtggctgttctgagtagactgctgataggataccagtaactctgcagtcttgaagacacagcccttatatacacagccataaggaagttcttgtccaggccagtagaatagtaagtgccagagtaaagacttcgatatgtagcttgtttagaagtcaccttgaaaaaagaatattaatggtgggtaatatttttcactatctctttgcttactggaattaatgaattcagtaattctttttttttgtttgtttttgagatggagttttacaccgtcaccctggctggaatgcaatggcgcgatcttggttcactgcaacctccgcctcccgggttcaagcgattctcctgcctcagcctcccgcatagctaggattataggcgcccaccgccacgtctggctgatttttttgtatttttagtagagatggggtttcactatgttggccaggctgatctcgaactcctgacctcgtgacctgcccagcttggcctcctaaagtgttgggattacaggcatgagccatgcaccctgcggaattcagtaattctttaaccagtggttgtgtttctattgctatgtgttaggtattatatttgttttattgagttaaatgtgcttcagtatagtttttataatatacaatattaggtggtaaatgtatgtgccattttctgtctcgtatgaatgccaaatgtgtacttttaaagttgctgttacctgaatttctactggtgttaaaaattaaggacttttcaaaacagccagcaagaaaaagctatcaaagattatgaagatagtgtcaaaagcacttaggagtcaattttaagaggcctctactggcccaaaatagaacagtttgagcattagtcaggataatgactaaactagattgaaaaatgccaagtaatgtttaaatttatgaagttgtaatgatatacacacaaattaaaaatgtgtcactattacaggaccttgggtaattaacgtattattttgagaactggtaaataaagggaaagaagcatttagtctgactttcctatatgaactacttttctgaataaccaataaatgatggatattttctctttgtagaaatattctgagtagtaaatgaaggagtaataaaattggtatcatcactttgtaaccacctaatgaataaatgattctaagcattgaagaacagtagacactatgatcacaaataaatcaaccagttactgtgtggttcctgatgaaagaactcatcaccacttaacaaagtagtgttgacctaataaaaatagcctgaagttagataaagcctttacagccattgatttatagaacatacagaagaatgggctaaacaataccataggaattcagtcagcaaaattcagcctgggaaactaccaggacaaaaattcaggacaaacaacctggctttttcaacataaaaattgcagttaaaaaaaaaaaagacattctgtagcttaaaagagacttaaaagacatctcaattagtcccaatatgtggactttatctggatctattcacatagaaactggaaaaaaattgtaacatttgtaacaactggaaatttgaaattgagaatatttgatattaaggtttttttttaatttctggtaatggtgttatggttgtgttaaagtttttgtctcttataaatacatactgaaatatttatggatgaaattatatctgagatttgcttcaaattaatattggtgcaggtagagatgagatgaaattgtccatgagttgatcattgttgaaagtaggcaatgggtacgtggcagtttattgtgctggtttttctacctttgcatacgtttgagattttctgtagcattttaaaaacaaaagagaacactgaaaaaaatctagcatcaagtcatggaaatgggtcgtcttccaaggaaggacttttaaactgtggagtaatccctctttaaacatcttagcacaaattctatgaaaatatttcatcagtgtatgaaaaaaaagttagtggcatattgtctttgtcaggtaataattacagaagatattttgaatagggctgaacagtcagaacaccagtggccaggatgaagaagatgcttttctggagtgtgtttcctatgaaaatctgctttagcccatatttactaattatttttgctagtaggcagcatattttaatgtgtaggaatcttctgctgttatatttgctttactgaccctttaaaaaatagacacaaatgaccaaaaacattataggccttcaacagtttctcaaataagtaaaagaatcagttcacatcagaaagtttttcaagaaaataagttctaggccggaaacttgagtgaatacttatgttcccttatgtcctttgtgctcttcatattattttcaacattcataataatttatgttcctgatgaattctctgagccattaagaaatggcttttctttcagaatgcatatatctgcacacacaatccatgaattaacatttttggaagatcattattaagcacttacaaaagtttcaactcttaaatgcttaaccctccatccttggaaaaacttgactatctgtaatgatgtaatttgatttcacctaaaactttacaaaatatatgaatgatatctatatagggtttttgggttctttcaaaaagaggaattatcagtactcatggtaaaaaaagagaaggagggtcacaggaaaataggaacaaatttggttttctagtacttgggtaaattgtggaatatactttccttctgtatttgagcccttcaaagctcacagtcaacccagatgaagcagctgaagtgctttgtaattagtcttctattcttcactcaattaaaattccccatttactgaggcatctcaccaaatgttgatctaattatctgattaaaaaatcggtgacagtatgaatgaatgattaatataattcacttgattgtgaaatgaaagaggaataaatctttagctagtggaagaaggacacaggataattttgtgtaggaagtcttcctgaccttccctcccagagtcctttattctgaaaagtaattatgccaacatttttttagcttgcaaccaacatgcaaaataaagagtatctattatgtactatatacctttcaaaatagctgaatagcataaatattttatttgattttttatatttttaaaaatttccaaataagtttacaagttagagaaaattagaatgttgtcactaatttttctttacaaaatggtatttcatgtgtacctagaagcagtgaaacacctctggagagggtggcttggcaattaattatgcagctaggacttggtttgaaattaaagtatatatattttttcttttagagtggcagaatttagtgacatttggaagcttttcaaacatggttccctgtagtcatccatatattggtaccctgagtcaagtaaagttgtactccacaaatgttcagaaagaaggacagggatcacaaacactcagagtggaaaaagtaccatcatttgaaacaggtatgtgtaatttttttaatgtacttttttctgtatactggaatagtttgtgtaaaattatttgttccctggatgtttgatagaacttacttataatactgtctggactgatgttttctttgtgggaactattaaagcacttatttaatttctttattttttctatttctttttgactcagttttctacgaaaaactatctacttatctacttaaactaaaattttaatttattggtataaagtgtataataatgttccctgtttactcccaatagcatatgtagttatgtccttttttcattcctaatatttgtcttattttcttggctagtcttcccagaggtttgtgttttattatttttccaagtaatttttttttactttgaaccattatatgtttgtatcctatttcgtcaatttttactttttaattatagcctcctttctgcctttttttgggtttgttcagtcattattttttgttttgttttataacttcaacttttgtttagattcaggagggtacatgtgagggtttgttacatggtattttgtgtgatgatgaggtatgaggtacacgtgatctcatcacccagatagtcagcatagtaccaaatagtttttcaaccattgctgccctctctctctctccctcatctagtagtccccattgcctatttttgctatctttatgttcatgtgtacctagtgtttagctcctagttataagtgagaatatgtggtacttggttttttgttttctgtgttaatttgcttaggataatggcctctagctacatccatgttgttgcaaaggacataattcattcctttttgtggctgcatggtattccatggtgtatatgtaccatatttactttatccagtaccccattgatggacacctaggttgattctaagtctttgctattgtgaatagtgctgcaatgaacatatgagtgcatgtgtctttttggtagaataatttatttctttttgatatacactccctgatgggattggctggagttctttgagaaatctccaaactgctttccacagtggctgaactaacttacattcccaccagcagtgtattaagtattgacttttctctgcagtctcactagcatctcttgttttctggttctgtcattctgttattaattgtcagttagacacttagtttattaacccttccttcctttctgaagtagacatttaagccatgataacacatcccacagttttgatatataatatttttattatttgtaaatctaaatgtattcttatttctattgtgattcttctatgactttttagttgttaaagcatcattgtaaatttacagatagatggaatttttgtttatctttttgtatttaatgtatttcacaaaatgtggtctgtattgattcagtcttgaaatttgttgagtgtaacattttagtttagcaattggtcagtttttctaaatggttttcctgtgcttgaaaataatgtgtatttttaattgctggtgtggtgtttatacacatcaattcttatttttagttgttcagtacagatctttgtcctgttttaaaaattcattattaccaagggagatgttggagtatcacactctgatggtagatttgatggtctttttttatggttctgtaaatttttgctttttataatttgaggctgtcattagatacatacatatttagaattattacctaacactgatgaattattccctctatcattgtgcagctactgtttttctttagtgagctctccactacatttcttttggttactattttcccatcctttgattttaacttaattttgtcttaatatgatcatctctgtcttttaactggaagtttaggcagtgtgcatttactgtaatcactgatatagttaaacatatttctaccattttatcatgtttccttgtcctgttttcttaaattccttttttgcctttaattttttttctcattccgtcatcctttctcctctattctctttctctcatttgaaagttttagactctgtgtctgtacttcaaagcctaaagttaattgataaatttactttccttctgaaaaacacaaaagctttagagtgctttaattctgatcaccgcctccaacttatgtgctatttgttggctaatattttctgtctattctgctctttctctgctataaagtatgcattgttgcttgcttagatttattcagaatctttgttagccaccttttcttatgtctgatctttctgtctgatgtacatcctatacaagttcgtttagctgaggatcttttgtgggaaaggcacatttaagatgttactcgattgttttttggcttccactaattgttgagaagtcagatattatgcctttgtttgtatattttttctatttgacagcattttaaatttgattagctttaatttgaaagtctttttctttggtataaatggcagttttattatgaagtaactaggtatgtatttctttgtatttattctacttgagatttgttgggcttcctggatctgaggattgatatttttctacagttctggaattctacaattctcttattatcccttcatatattacatcttcccatttctgtattatctccttctggaacttcaattagaaatatgttacatcatcttatgtttttcatgtctttaaacctctctatcgtattttctatttctttacctttctggcctgcattctgtattatttcctcaggtctaccaggatcactaatttcctctttagttgcctctaatatgctggttgattatgtatgttgggtttttaacttaaatgattatattttccttttttttttctttttctttttttttttttgagaccaagtctcattctgttgcccaggctagaatgcagtggtgtgatcatggttcactgcagccttgacctccggggctcgacctaccttagccccctaagtagctgagaaaacaggtgtgtgctgccacgcccagctaatttatttttatattttgtagagacaaggtctccctgtgttgcccaggctggtcttgaactcctgggctcaagcaatcctcctgcctcagccttccaaagtgctgggattacaggggtgagccactataccggccatatttttcatttctagaaattgttttttaccttgcttggttggtctttaattccttggttgtattttcagacttaccttttattacattagatacgttaaacatagctattttatatttttaacagaaaattctgctatatgaaatctttttgtttctcactatatgagacttttcttcccttttttgctcttattcatgatgtcgtacctgtgttttataactgtgagttcttcattttccatgatgtttttgtatcttgaaagtatttgatgtttatctggactgaaaatgactttctgcctggaagggtttgtttttgcttttgtgtgctactctccagtagcattattgggaccacattaaattcagttctctgctttagatttacattgtgaattcagactgtaacttgtgttagggttcacttgtctgtaggattttcagaggagtatttttttcttccccactatttaacaccaaaatacagataggccagcttacttgctgttcccttctatgtgtattatttatttctagttcatagtgatcccatggctgtggctttttacctcagtgtcccctgttagactccttatcttggcagaacctagtcttattctctggtcttccatgcccgttgtagctctggaggtagaaataagctcaaagaatccaagcttcaatagaaatccggggaaagctggctttgatatgttcatttgttctgtagagattctgctttcacttcatttttggccttttcgtatcattttttgctagactaacaatgcatttaaaaagattttgcttggggtacaataaaaggaagcattaaaggaagtcctttattcatttattcattaatttactcaagaaatatttattgagcactttttatatggcagcaaatgagaatgactcagagttgattactaaagcagaaaattaagcaaacaaatattgtattgtaacatttagccctgtattcatgtgttcagcatctgtggattcaaccaaacaaggattaaaagatttggggggaaaatggatggctgcatctgtactgaacatatacagacatttttttcttgtcattatttcctaaacaatacagtgtaacaacggtttacttagcatttgcattgaattcggtattataagtaatctagagatgatttaaagtacatgggaggatgtgcataggttatatgcaaatactgcaccattttataagatggacttgagcatccatggattttggtatctacagggaggtcctggaaccaatccccaacaaatactgagggataaccatactgtgataggggaaattcattaatggtgctgcaggggcacataggagaggcacttaactgagtcttgagtggttaggaaagatttccataaggaaatgatacctccttggagacatgaaagaaaagtaggtattggccaggtgtggtggctcacacctgaaattctagcactttgggagaccaagtgtgtggatcacttgagcccaggagttcgagaccagcctgagcaacgtggtgaaactctgtctctacaaaagatacaaaaattagctgggcatagtggtgtgcacctatagtcccagctactcaagatgttgaggtaggagggtcaccttagcctgagaagtcaaggttgcagtgagccatgatagtgccactgcactctagcctgggcaacagagtgagaccctgtctcaaaaaaaaaaaaaaaaaagtaggtatggatgtgtggtgaatggtggaaaaaggaggtaaaattcctggaatagtgagtagaggatttggcggtggggttggtagtgttgaaagtacaagagacggtgatccagcttccatattccttttaatttttttctactgctctcttgcttgctcactatgtttcagccaaagcagtctccctttttctcagccatgttctgagaaaatggcaagagttaagcactagtcagatcggggtcttgtttgggagtttggactttgttttgtaggtagtgggaataacagagtattattaatacaagtaggggaggtacttgatcagatttaaggttttagaaagataactagttgcaaaatgtcaaacaggttgcaaaggagggagattgaaagtagtagtacaaatgaaggtctggagtagggtaataataatgcttttttttaaaggagtagatgaccttaagagatctaggagctgaataattaggacttagtaattgaatctgggggatgaagaagagggtcaagccaagggcaatgcttggttactgtttggccagctgtctagatgatttcattgatttctaaaattaggagtaccagagctggagtatattttaatgagatgatggcttggtttgcacatctgaattataggtgcctatggaaggtcttaacagatgatgcagtgaccaataggcagttggttatccagtgaatctactagtcactgcatcgtctgttaaaatgtcacacatcaggtcgggtgcagtggctcatgcctgtaatctcagcactttgggaggccgaggcaggctgatcacgaggtcatgagatcaagaccatcctggctaacccggtgaaaccccatctctactaaaaatacaaaaaattagccggagccgggcatggtggcacgcacctgtagtcccagctactcgggaggctgaggcaggagaatcgctcgaacccaggagggagaggttgcagtgagctgagatcgcgccactgcactccagcctgggcgacagagcaagactccatctcaaaaaacaaaagatgtcacacatcttaacacaactactatcctacttcaagatatcattatctcttgtctgatttactgtggtagtattctccctgggatctctgcttccattcttgtccttctgtagttcatttttcacgtaacaagtgtggtctttttaaaaacagatcatgtcacttttttaattaaaactctccattggcttctagttacccatagaacaaagccaagactgctagaataaaattaaaatttactattctgactctcaaagttctttctagctgatctggcttccgtattcctctttattttcttctgctactctcttgcttgttcattatgtttcagccaaagcactctccttttggttcggagaaaatggcaagcttgttgttatagggcctttgctctagttgcgttctctttccaaggtgcccttctccacatggctcagcctcttctggtcattcatatctcagtttaaatgtcagctctgcatagagacattttaaaatcactcaacctaaagtagccacccagtaagtctttaatactaccctaatttaatttttggcataggtagcacttactcctgattgatgttttccatattttatttcctcatcacctacatgtttgcaagctccatgacagcatgaacctcagtgtcttgctgatagtagggacataataaatatttataagtgagtgaatgcttagagttctaacctggaactaaagatttaggagtttttacctatacatagatggaactgaagccatgggtctgtttgggacagtgcagggacagtgtttagagtgaggagagatcttctagtacaaaatcccccacatgggtgagggacaggtagaagaggagcctgcaaagcagacttgagaaggagtggctggagaaaatccagactatctggtgtcaggagaagacagtgtttgaagaataataaacatttcaagaccatttttcctttagttagatgtctttcacaggggaagattttacagattccttgagaaacctgtatacatttaatggctccttgttttcattctttttcctaagcctcatcctccctttgggtttacctgtgcaatttcttctctttcttttgtggtgatggagaactgctggggtaaatattgattgagagtttgattttatgcaatgaaagaatgcagagtgtaatgagtccctaagttccagaaataagcatgtttattagaacacagttaagggaaaagaaatagtgatgaaataatataattaagggtaaaatatgttacaatgctctgcagaggtgaacacagactcaggggaaaatatttaatatggttccaccattcagaatctttcaaattgaaatccatgattaagtttcttttttctctgctgactggaataaaaatgttagtttattttcttatattagaaatacattgtttattgacagttttattttgggctcaatttttcagtacttgcttaggccacattagaccttgttagccatcagacagagtgcaagtaattgcttgattgaaagataatttgtatatttaaagatttgagattgagttttgaataattcaaatcacatgataaagtcaggaacagctcattaagaagcagagacttgctaaggaatccttaagtttttaaggagcattcagatttgttaaattttagtaaaattagttttaattttgctaatgacagcagatgtgtggcaaacagccagggtttgagcttaaaacaaatgtctagcgatattcatggatagaatgtttggttactgattgaaatcataaagattctactgcagtgatgcagtgtgagtttattaagttggtgctatgtaaaataagtattcatacatgtgtttaagccatttactagcattcttgtttgtgctgtataacactatatatttagtaacatctagacagtttgtagtgagaagaatatccagaaatatacagcttaaagcaactcattttatgtgattaagttcaataatgttgagcattgtagaaactagggttgtttctgaaacttttgacagtagatatcagttgtttggacattaggtaagttttgaaaatgtattattccacctttttcccttcactcctctctgccctgctctctgtttcccaaagctaaattgtaagaaatggatgtgtaggttctatagataaagatactttagaatttgcttgctgtgtagcgagacaaaaataaaatcataataatttaattttttaaggtcaaatgtagttactaaatagaagtgtttttaagcttatcttcaatttactagtatgacatcataacctacttaggatttggcaaacacttaaagcctttttagattttctgtacatgctttaggtatcaaaacgtactgtattttggtcaagtgaagtggctcacacctgtaatctagcactttgggaggccaaggtgaaggatcccttgaggtcaggagtttgagaccagcctgggtaacatggggagggagaccctgtctctacaaaaaataaaagaattatccaggtgtggtggcatgtgcttgtagtcccagctacttgggaggccgagacgggaggatcacttgagcccaacaggttgaggctgcagtgagccctgattgtgccactacactccagcctgggcgacacagcaagatcctgtctcaaaataaaataaaataaaataaaataaacacacacacagtatttggtcattttcctagtggttttcactgaaaaacaattgccaagaaatatactaaaaattacctgtaaaatattttgcttttatttcaaatagggctttgcttttgttagtgcttaatatattggcatttaattgcttcatataagctttgaaagaggtaactcaatggataggcagaacttctgatcacagtggtattgtgaatacatactttgaggcatgtgttctactaaccactcattggaataatagataaagtataaaaagagaaaattgaagacatagttggactaaaaaaagacatgttatatcaaagaaatggaacagaagcatctggactctgggtctgtaatctgggagtggcagctaggagtttggcttgtttggagtaatatgctacatgtgctatttgaatagcaaggtactggagtcagactcactatttgaacttatccacccacccccacagaaggagactgaaaatagctaattccagttgctacctgaggctgtgtcttacaggaagctgtaggcctagggaggcaaggagaagaccagtgtactagtccattttcatgctgctatgaggaaatacctgagcctgggtaatttatgaagaaaagaggtttaattgactcacagttccatatgactggagaggcctcatgtggcagaaggcacctcttcacagggtggcaggagagagaataagtgcaaacaggggaaatgcaagacacttataaaaccatcagatctggtgagattcactcactatcatgagaacagcatgggggaaactgctgcgtgatctgattacctcctcctggtcctgcccttgacacatggggattatggggattataattcaaggtgagatttggatggggacacagagccaaaccatatcaaccaggaactgaaacttgctgtttcctggcttagagactggattgaggggaaggaatttcaaactggcaatatgagatcaaactggcaatatgagttttgcatagaggtattagaatgaactctgagcacaagaatgtgaagaggagaatgaaaggatataccctattcagggtaagatggtgaactctaaaatttcaaaatacatgaagaatcctaatgctacgaaagccaatagaatcaataaatgtgaattaattccagttgaagctaaaataacagcttcaattgctttaaaataagtttaatgttctcaaaaggttaaatgaaggactcatattcattaaaaatgacagggaattttgaaacacaaacttgcagaaataaaaccagagcaaataattaggaaaaggagacaattagaaatcttagaaatgaaagtgtagccactaaagtaaaaatgtagtagactaaatagtcattgtcagtaggagagttagtaaattcaaattcagtctgaaggcacataggaaggcaaaaagatattccaaaaattgaaagcatttaagaacttgcagctctagcctacatttaataggtagagaaatggtgaggaatcaatatataaagagagatgagaatttttcagaatttgagaaaaacaggacttctcagatcagaaatatgttttgagtaccaagcaggataaataaaaagaaatctacccctgacactttgtagagacaccacagatttaaaaaccaaaacacgaaacaacccaacttaaaagctgacaaagagaaaaatcagaatactatcagcctaattgttgttctactgaagtagactttttacctgcaaaaatatgcagaaagcaaagatgggggagtgatttggaataatatccaggaaagagtaagaggaaaaataaatgctactctggaatttcatagtgatctaaataatcattgtagagtgaaggcaaaaataggaatgttatcatacatataaagatgaatgtcattttaaaaaaagcttattttctaaaattttgggaggtacatagtaggtgtatatatggagtacatgagatgttgtgatacgggcatgcaatgtgaaataagcgcgtgatggagaatggggtatccatcccctcaagtatttatcctttggtttataaaccaattacattctgtaagttattttaaaatatacaattaagttattactgactatagtcaccctattgtgctatcaaatagtagatctttttctatttttttaatccattaaccatcttcatctctcaaagatgagagtcattttactaaacaacccctccacattaaaaaacaaacaaacaaaaaaaactattaaagcatgtacttctgcaagatgcagaagaaacctggagttacagaagggaaaggatgaaatatccaagagacaacaaagaacaagaaatggataaaatgtcctggtaaaactattgataataaaacagtaaacttttttttaatattaaatgctaaaactataatcaaccaggctcagtggctgaggcctgatactataaccaggctcagtgactcaggcctgtactctgagcactttgagaagctgaggtgggaggatcacttgagcccaggagtttgagaccagtctgggcaacatagtgagacttcatctctacaaaaaatttaaaaattaactttgatgtgatagtgttcacctctggtcccagctactagagaagctgaggtgggatcacttgagcccaggagttggaggtggcagtgagctatgatctcaccactgcactacagcctgggtgacatagcaagatcctgactcctaaaaaaataataataatagtatgatggaagacatttagatcactatgaaattctagagtaacatttatttttcgtcttactctttctcagatactactgcaaatcaccccctacccacctttgctttctgggcaacaagaaaaaaactgtggaggaatattaccagatttcaaattatactacagggctttaataatctaaacagcataggtttaggttactaaacctaaatcctttatgctgttttactgttataaagacagacacataaaccaatggaacagaatacagagcccataagtgaatccatagatatacagtgagctcattttcaacagatgtgccaaaaacatacattggggaaaggactgtctattcagtaaatggtgctggggaaaactggatatccatatgcagaagcatgaaactagaccccttctctcgccatttacaaaaatcaaatcaaaatggagtaaagactgaaatctaagacctcaaatgatgaaactatttaaagaaaacattggggaaactctccaggatattggactgggcagatttcttgagttagatcccacaagcacaggcaaccagagcaaaaatggacaaatgggatcacattaagttaaaaggcttctgcacaacaaaggaaacagtcaacaaaatgaagagacaacccataaaatgggagaaagtatttgcaaactattgatctcaccagaatatataagaagcttaaataactctatgggggaaaaatctaataatctgattaaaatgtggacaaaatatctcaagagacgttttcaaaagaagacatgcaagtggcaaaaaaaggtgtatgaaaaagtgcttaacatcattgatcatcagagaagtgcaaatcaaaactataataagatatcatctcactccagttcaaaaggcttttatccaaaagacaggcaataacaaatgctagtgaacatgtggagaaaagggaacccttgtacattgttggtgggaatgtaaattagtgcagctactatgaagaacaatttggaggaccctcaaaaaaccaaaaatagaactaccagcaatcccactgctaggtatattcccaaaagaaaggaaaacatacaaaaaaattagctgggtgtggtggcatgtgcctgtagtcccagctactcgggaggctgaggcaggagaattgcttgaacccaggaggcggaggttgcagtgagctgagatcgtgctgctgcactccagcctggcgacagagcgagactccgtcgcaaaaaaaaaaaaaaggaaatcggtatatcagaagagctatctgcattcccatgtttattgcagcactgttcacaatagccaaggtttggaagcaagctaagtgtccatcagcaaatgaatggataaagaagatatggtctatatatacaatggagtattatttaagcataaaaaagaatgagatcctgtcatttgcagcaatacggatggaactggaggttgttacgttaagtgaaataaggcaggcacagaaagaaaaacagcacgttctcacttatttatggagctaaaattaaaacaagtaaattcatggagagagagagagtagaatgatggttactaggggctgggaagaatagtgggaggtggagagtgaggatggttaatgggtacaaaactgcagttagatagaatgaataagagctagtatttgatagcacaacagggtgactacagtcagcgataatttattgtacatttaaaaataactaaaagagtataattgggttctttgtaacacaaacgataaatatttgagatgatcgatgctccatttaccctgatatgattattacactttgtatgcctgtttcaaaatacctcatgtaccccataaatgtttaatgtgtacccataaaaaattaaaatataaaagcaaatttaaacaaaaacccaaaaaataataaaaagttttttttaaagaaaaataatgttaaacaatagaaatacagtcttataaattccaaatagcaattgggggattggatgggaggcgaatatagaaaactttttcaatctaagagatggagacggcaggaaaagcgaaataaaaataaaagcaaagaaaacaagatggtaaactgaaaacaataagatggcagaagtacaaatgtaccacagttaagtagtcagacttagtggtgttccatatcatttaaatgaactcataatctaaatatgtggaattagttaatttctgtttcattccatgttttcagagacttatattctggatcccctactaccccatctgctcaaggactttgcttttgggattatcctgttagcctactttatattttcttcgtggttattgcatcattcctatctctatgtaaaatgcagtcaacctttccttgattcattctcttcagctcctgctgaaagtccaaataccgcttccatttaatctcctattttctcctcaactattgtgtccattcccattcttgtccagaaactgctgttttcaggaggttccagtgatcttcatgttggtaatctagtatctattcttttttttaccacctagaaaaatacacaaatacctacacataaaattaaatattgttctaaacacaggcaatacaggaaggtggttaagagtgtagagtaatcaaaataactgtgcctccatgtttaaaatactagctgcgtgactttgggagaatttacaaaacctttctatgccccagtttcctcataacaaggaaaactggctctgtgactttgggggaagttataataatctctgtgcctcagttttctcataagatgaagataatagtattttcctcagagcaattttgtgacaattaaatgaaataatttgtaaagtgcataggacagtacatggcacatgttaaatgcttagtatatatagccattcttcataaactctgaaatgttattgaatgaggatataaatataatggaaaatgttttaagggtgagatttttacaatatatttgatacatacaaaaggatattataatacatatgtaagttaacaacataataaaatcaaaccttggaatttactactcaagctaagaacttcactgtcttgatcacatcctcctatctccatttgtcctatgtatccatgtgaaaaaaaagaggaaatagctttatacatttgtatatagccctgattatttacttttgcttgtttgtgaacttcgttgtgatagcttattgtatatattcttttgtgatttacttttttcattaaatttagttgctaagatttatcttattgattggtgtgtgtgtctggttcattaatgttcttggagataattatagcacatactgttcagggatgttgtatgagttaaatgagttgatacatgcttagagtagtacttagcacacagtaaaagctcaaagaaagatggccattattatgtttgttactatgcactgctgtatgaaatgttgtgtgaatataacatggtctatctatctatctatctatctatctatctatctgttctcttgctaatgggcatttgggttgttgccagtttacaacaacagaacagagtcctgctctgaacactcatgtacctctgtccttgtgccctcgtgcaagagtttcttgaagccaaatatattgacctagaagaattgctgggtcataaattatgcttgtgttcaactatagtagataatgccaacttgtttaccaaggtattgtgcccatttatatttccaccagcagtgtatgcattttcattgttccatacccttgccaacattaggtattctcatattttcctttttcttgatctgatggttataaaatagcatcttatgatttcatttggattctattaataatggggcagacattttttcaaatgtttattggttatttgtatatccttttctgtgcaagattgtccttcctattttttctaatggattgtcatttttttgatctagaggacttatttaaatattcttgattacttttgttgattctatttgttggaaatatcttctctcagtttgcggcctttcttttttctctgtttttttttttttatgggattacttgatgaacagtttttctgagttttaatttggcagaaatttatccagtttttcttgtgttgtttatatcttgtttaagaaatctttctgtaccataaaagtattctgtattatctactataaggcatgtaaataccttaacatttaaataattaattaatctacctgtaattgttttttctttatggtgggaggtagattcaaattttttaaatttaatgtgttttttggtaggtgtagggttgtacagttgtcccagtcccacttaataatcattctttattgattgaatggtatctctggtacagttttaaatagaagaactgtgcattcttttgttccttaatttaaaaatgcatttaaacattcaccattaaagacaatgtttgttgtaggtttgttttaccctttaaagaaattcctatttgtcctaattttctaaaagggtttgagatttgcatggatgttgaattgtattaaatgctttttctttagcttctgaaatgattgtatagtttctcttctttaatctgttaatgagataaatagcttttgtaatgtttaactactcttacattcttaagatgaatccaacatggtctgatacattgtcgtttttatgcattgctatattacattggctaatattaattaagtttatagatttatgaaagcagttgtttaatgtaaacttcttttaataaactttacagcagaaggtataggcacagaactcaaagctccacttaagcaagaacctctccaagtaagaggtaaatatattttatcctatttttgtattataaagatgttttgaattaaatatataacattggtttatgtagagctctttatagttatattattctaagagtatagtttattttttacttttatttaaatagattgaccataaggatttattctcttacatataaactaattttctattaaatttattttgcatttttgtcacaaattttttcaaaagcccaagaaaggaataatggcaaataagaatcatcaattgcattatcatttttagaagagtaaggcaattaaagaacaagaggcccacacttttcagctactgcttattcaaatccaggtagagtttggccgttattgtctgactttattttctaggagaaattgaaggaattcctgtttgtagctctcttctgtataacaagctgtggttcccatctccaaagcagctgtttcatggaggcagcaactctatgattaacagcactgtggctttggcatcagataaaactggattaaatttgtggctccagtgcttaccagctggctgaccttgggcaatttacttgacttctctgaggcttagttttctcccctataacgtggtgctgaaaatgagacttcttttctagggtaactttgattaacacatggtagacaattaataacaattaatgttgttatagcagccatcattatcattatcatcctcaccttcatcattaataacctgggccagggttttttagctatttggaagaaatttttttaaaaattttttaaaaatttaaaaggcggtttagagacatgaaactcacgcaaaaaaaaaatctgtatttccttatattttttttcagataaggttttgattttttaattgaactttatttttcaaatattcttattacataatatttgtgcatttaatgtaagtatgtattattttaggaatctttttacccactgtagtgataggtaatcttaggctgaatttgctctttcaacttggaagtagaacagaaaattgtgaaataataaatatgagaatagaacatgaagtgaatagatgacaattcgaaatagaacacataagtttgttattttgctcttgcacttcaggtatttgcttatttatctctatcatatgaccaaaagtctcaccttataatgatttattaacatagaccaatgttctgtaatttttaactcacagactataattgatgccaaattggtattggtattggtgtcgctggcctttttatgagcagtttgatacttgacaatagaaaaacaatttattagaaggcaatatttaacctataatctataataattttttttgtaatttttaactgatgaaattattctgtacttttcttcagttttattacattatgtgaaatggtctagtggctttaaacttttttgactgtaacccacataagaaatactaattagcaactagtatacacatagattagtatatgtaaatgaaacaaaggttttcacaaaaaaataattatatgtagtagtctttgattactttatatttctactttgtatgaaatgctgatttcacctcacagtttgaaaagcactcaactactctgttattttatttatttatttatttattattttttttggacagagtctgactttgtagcccaggctggagtgcagtggcatgatctggctcactgcaacctctgcctcccaagttcaagtggttctcatgcctcagcctcctgagaagctgggattacaggcacccaccaccacacctggccaattttttgtattttttttttagtagagacagggtttcaccatgttggccaggctggtctcaaactcttgacctcaagtgatccacctgccttggcctcccaatactctgtaattttttatcaaaacttcagttcattttcatttagaccctaagcaatttaaattataccaatatgatttagacagaccagtaatacctgttcaaggtgttcattagacaaaggttgacattttgggatcagttatagatgacatatagagacaaaagctagatggctacaaatgcaatttcatcctattctgcacttggataattttttctctgatgtcattcagtgaaaaagatcagttttctgtgaaattcattagtgaagcctcttaagtatcagcctatattcatcttcacatgtgactttcaatgtgcatatttattatgttttcctgttttttgtttagttaaagcagtccttaagaaaagggagtatggctcaaagtacactcagaataatttcatcactggagtcagagcgataaatgagttctgcctcaaatccaggtaatttttttaaaaaatgtagccgtgtgtcatatctaaataatctaaataactattcctttcttagagtgtgttacctgctaccatccatatatggaaaatttgctactggctccttaaaatgaagagatatttttattcagtcaaaaatgttaaaaattgttagcaaactaaactgaatcctgccccagcattagcaattctagtctttcttagtttcttaaacccacaatggtaaattcttcaaaagctttccatcacacaagaatcttaggagttaaattgttaagtcattggtatgtgacagaattctcaataagattatttgcgtatttgtatgtttgactgttttggttttttggccagcagagttgagtacttaatttagtgagttaaatttatgttcatgctcccaactgtgatttctgttgagtataaattatttttactactttccaatatctgttattattaattttctcatatttatatttattgaaattatgttagtcacagatttaaacttttctccctcctttgtgcacgaattagagaaatcagatgatctatctttttttcagtcttcctcattgtcacagccactttggtatatatcaagaaataggtattcctataatttttaacttttataactattacatcaacaaccaattataatattgatttagttctgacacaaattttgtgaattaagtggattaggcattgctgtctccactttaatagaccaggatgagcataatacaagatgttagtgattgacccagctcatttaagtgagtcagtgacagggagaactagaatatatatcttttgaaagctgatccatacatttttactaacatgtgatggttattgatgttttttaaatctaggtttaatttctagaacttgataacattacatagtcacagactttttatttatagattgtttcattgctttaacaaaatttccataggaagatccatgattaaatatagaatgactatttagcagtgacttgatgaatatataagcctttcagaatttaagagaaaggaaaataaataacatgtaattgacacaaactctttatgacatcattcctttgaatggatattaccacttagtattaatctacatataaacaaataatgactgtaaatttttaacttaaattcttaagtagagggatgatattctaatccatgttctttcttcttttcgttttttttgtttgtttttttttgagacagggtctcactctgctgcccaggctggagtgcagtggcacaatcatggcttactgcagcctctacctccctaggctccagtgattcttccacctcagcctcctgagtaactgggactatggctgtgcgccaccacgcctggctaatttttttttttttttttttttttttttttgagacggagtctcgctctgttgcccaggccggactgcggactgcagtggcacaatctcggctcactgcaagctccgcttcccgggttcacgccattctcctgcctcagcctcccgagtagctgggactacaggcgcccgccaccacgcccggctaatttttgtatttttagtagagacagggttttgcaggttgcacagtctagtctcgaactcctgacatcaagtgatccacccacctcagcctcccaaagtgctgggattacaggtgtgagctaccgcaccttgcttatttttcacttttttttttttttgctttatctcctaggccgaagtacagtggcgtgatcttggctcactgtaacctctgcctcccgggttcaagtgattcttctgcctcagcctcctgagtagctgggattacaggcaggcaccaccaaacccagctaatttttgtatttttttttagtagagacggggtttcaccatgttgaccaggctggtctcgaactcctgaccacccacctcggcctctcaaagcgctgggagtgagccaccacgcattacctaacttttcacttttttccccatatattagagatggcagtggtgtgcccatagcagatacaaatacaagtactggtgagggaagtgaatctctacatattatattgtggtgtctacactgagcatcaagagtaattttttttcactgtctctattttttgtatacaaaatgtcatctttaaactgatctttaaaagccattcacatcaatatttctctaagatggggatcagtgttgttgcttttatctgcccttagtaatcctctttaagtatataaactatatgcactttgtctgaataaattcaacatgtttctttctctagtgatctagaacaacttcgaaaaatcagacgacgaagtccccatgaagatactgagtcttttactgtatacttgagatcagatgtggaagcaaagtaagaacatagttctttcagaataaaagtgcaaaccaaattttggattaataaaaatacattttagacagagtcagaattttttaaatgactttttaaaaacaatatttttgtatttgcaaatctgtttatttgtgagttactaatatgtactccttaactaaatatatgtcataatgtgtaagaaaatttgctgttgaatttactctagttgtttagatttcatttggaaaagttcctaagtcctttatgtttctccaaaagcaccttacactttgttgtaagattctcattagagaatttagatttaaatgtgatgtcaataaagtcattaaaattgttcattgtggtgaccatgtgtgtatgcacagatctttggaagtttggggaagccctgaagctcttgccagagagaaaaaattgcgtaaggaagcagaaatagaatacagagaaagtaagtatattcaatttaaagtcaagttaattgaaaaataacttgtagatgagaactgtatctgtaagaactctctagtgctagcatacctgttggcctaggctctgttgcttccagcaaatgctagtttccgttttgggattcaattatttcacaaaaacaggaactgtatttttgttttctcctgtatagctttttgaagatgatgagaggaagagaagctacagtttatcatttttataagacatataactatcaaaacttatctgatttaaagattatacttgttataaaagtgatagaataggaagtaattgctgtattagtctgttttcacactgctataaagatactacccaagactgggtagtttataaacaaaggagatttaactgactcacagttccgcatggctggagaggcctcaggaagcatacaatcatggcgcaaggggaagcaggcgcatcttaacatggtgtcaggcgagagacagcgtgtgtgtaggaggaactgtcaaacacttataaaaccatcagatctcgagaactcagtatcatgagaacagtatgggggagaccatccccatgatccagtcacctcccaccatggcctgtcctcggcacatggggattatggctattataattcgagatgagatttgggtggggacacagagccaaatcatatcaattacttttttacagaagggtctattaactcagctacattaattaattcagcagatatttatccaatacccgctatgaacaagaagctgtgcttggtgtttgaaatgtatatgcaagtaagactcttaggagccaggtgtggtggcacatgtctatagtcccagctacttgcctgtaatcccagctactcaggaggctgaggtgggaggatcacttgagcccaggagtttgagaccaccctgggcaacatagacataaatggggtgataccatacatattgtacatcttgctctttatagatagtggtataatcataaccgttttccatatctacatatagaaatctacctcattctttttaacagttgtatagtaccccattgtatggatgtagcaagatttatgttcttcagtttttcactgttagaaagaatacatcaataaatatttttatttttttaacgtgagataattgtgaatatttacataggattgagtgttaataatacaattttaggatcaaatggcataggcatttaaaaatttgatagatcctaaagaattactctctgaaggaaatatggtaccaatttacatttacaatcacagtgtatgagggagactattttttcatacccttgcccatgctggatattaacaagattttaacttttttgtgtatttgatgggcaacagatggtacctcgtttaattttgaatatctctgactactactgaggttatcttctatgtatagtggtttttcttagttcttctgtaataatttttatatgttttgttcacttttctattagattgtgtgtctcttaaaattgatttaaataagtttttggtggattttaaccaaaatctaaccaagttagtttcatatgttctaaatattttctaacagtctatcttgaaatttggtttctcctctttttagtagggaaatttcaaacatattcagaagtgcagagaaaaacataataaccttttaatgcccatcatctggctttacagctaccaacaacatggccagccttgtttaatgtatatccctctcactaaccttcactctactggattactttgaaaccaggtccagacattatatcattttatttataaatattccagtatatattaaaaggtcaggatgtttgttttagtcagttcatgtgatggtgatggttgaactgttttagaaaagttaactatccattgcctgtagtaagctgtcagtcttagtaatcctctcatttgccctttggttgaaggtctaggatgttctcaaatagctttaattctgacaaagaaagtgattgaccttctgttgatgattccttttcttgacaaaactgaaaatagtatgtctcttttcagctaacctagtcaggaggaataaggagtatatttgtgtgacctggaatatataatattaaatcatctagttgttgaataagtatagttttccttgtaaaatccaagttctttaaatcattggtttggcattttcaaaagtttgaaggagacagtgaatcctagtatcaaaggatttttggcctcagaaaaagttgttgattatttttattttattttatttttcgagacagagtcttgctgtgtcacccaggctggagtgcagtggcgcaatctcagctcactgtaagctctgccttccgggttcatgccattctcctgcctcagcctcccaagtagctaggactacaggcacccgccaccgcgcccaactaattttttgtatttttagtagagacagggtttcaccgtggtctcgatctcctgacctcgtcatccgcccacctcagcctcccaaagtgctgggattacaggcgtgagccaccgcacctggcgattatctgtttttttttaagagatgaggtctcactatgttgcccaggctggaatacagtggctattctcaggtgcaatcatagtgaattatagccttgaactcctgggctcaagtgatcctcctgcctcagcttcctgagtagccaggactacaggtgtgtgccaccgtgtctagctgacaatccacagatattataaagaggactgcacttaaattaacagaagtgaagtatttactttcaatggaagaaatacatactggggacagatagtcctggaaattctggtgtactattcagttaatggtttccattgagtttctttataggtaatacaggtactaacacaggatgcaatcagatagggcatattccattggggaattagatattgccagtgcagttatatagttcttttactcttgggcacttatatatggtaatgtatcaggattaaagtagagatcgatgtactagtatttatgaaaaatgtatacatatttttctttgataatcaggctgactttattgttatctgttaaacgactaacagattttattaagcatcgtgaggtttctcagaagaatatcattgctgctattccctttctggtttgatagaacaatttattttttagtgttcctacttcttatcaatgacactgatttttattagtattagaaagggactgcacttgcttagggtttgagaagttaataaattttgccttgtatggctgttaaaagccctaagtttgttcctttttttttttcttttcatcttctcttttggtttcttgacagtgcattgcaatttagtttttccaacgtgaactaactgccagttcattttaatctttcttaccaccctatttttaatttaaggccctttaaccaaagagagcataaagggtcccttggcattctacatcagggtcagtgtccacaaattgtttatttctagaagtctaattctaaatttacctattaattctgtggggttttttttgtttatagttttggatcttagtgtaatcaattttaatagaggatggcttcctggatagcttacaacaacctatgtccctggctcttaataaataacttttgccggtgttacggcatctgtcttcagtagccagagttggctaactatggcccgtggaacaaattggtctgctgcctgtttttgtatagtttataagccaagagtggttttcatatttttaatgactgacaaaaaagcaaaagagtaacaatattttgtgacagatgaaaattaaatgaaatttaaatttcagagtccacaaataaaattttattgggacgtagccatgatcttttatttacatattgtctgtggctgcctttgcactaccaacagcagagttgagtagctccgacagagactgcgtgtggtgctcctgtcactttgcactgctactcagttacaattcagtaacagttataattcaacagtatttcaaatgtcataggtatccttgtacatgaccttttttttttttagtatgagtgcatacctgtctggtgagtaagaaaagtagacatctagtgttgtgcttttaagtcacagttgagcatggattattttttattgaattagatggcaaagtactgtgtctactatgcagtgacaccatagctgagttaaaggaatacaatatatgttgacattactagattaatcaatcatcacagtattcccaactcacaggagtgtaacaatcagaaaaactagagaatttaagatggaatatattacagcagaatttgttcacaaaaatagaaaatgaaaatgaggctgcaaccaaagtttggtttctgagtggcttattagtcaagcaaagaaagtgggtttctaatggcaagtaaattaagtcctgtttaatttaagcagctgaagaaatgtatccaggactagtagtctttaggcaagactagttgcttcaagagttgaggacactgaggacagacatcagtagtcaattaaaaagcaaggcaaattattttgaatgatgttccttggctcttgataagttgacctgtgtaccaatactatttgaggagtgagtgctgagtttgaagagactggagaattaccctttgtgaatagtgtatgtggagcaaccacaggcaagaatttattttattttattttatttttgagacggagtctcactctgtcaccaggctggagtgcagtggcatgatctcagcacactgcaacctccgcctcctgggttcaagtgattctcctgcctcagcctcccgagtagttgggattacaggtgcgtgctaccatgcccggctaattttttttgtatttttagtagagatggggtttcaccatgttagccaggatggtctccatctcctgatcttgtgatcctccctccttgtcctctcaaagtgctgggattataggcatgagccactgcgcccagccacgtgagaatattttcaaagaagatgtgaaaatactaattcagtaaacctgatgtggaatctgctaagatgtcttatatagatgatggtggtaaaaatacatgtggagcagaaaaagccttagttggacaaatttataaagtttgtgaaaacataagatatttaaagccttttcatcagtagatacttcccagaaaatatttgtcatgagtaggaactttgtggaaaatgcttaaatcttgtttgctgttgaaccaatagtatcacctttgaacttgtggacttaaccactgaaagaaatagaagctgataatcctgacttgtccttctacactgcatttcagtggtttagcagttttactgccattttttgagctcaggattgaaaaattcaaaatggaaatttttctgaataagaagacccacctgtcaaccactattatcaaacactgagtggcttagaaaattaggttttgctgcagacgttatttttcttaatgcattcagtgtaaaattacaggggaaaacagtgcttaaatacaaaacttactctgctgtgaagtcatttcaacagtagatacattatttgaatcaaagtaatgtcagtcagctttatgtacttcccatgctgttaaaagtttaacacaagcactcagatccgcagtggcagtggtgtgtcctgtctgcggagagccaggccagagacaatgagcaacacctcagagaacacgagggcgtgccccgaagccacccacccttccgactgcggcagctgctgacccgctgttgccatgacctgcaggaaagccaatgaggagggcagttggaagaaattcttctggaactcagagaagaaggagtttttaggcaggactggtggcagttggtttaagatcattctattctacataatattttatggctgcctgactggcatcttcatcggaatgatccaagtggtgctgctcaccatcagtgaatttaaacccacatatcagaaccacatatcaggacccccaccaggattaacacagatttctcagatccagcagactgaaattgcctttcatcctaatgatcccaagcactgtgaggcatatgtgctgaacgtagttaggttcctggaaaagtacaaagattcagcccagaaggatgacatgatttttgaaaattgtgacaatgtgcccagtgaacccaaagaacgaggagactttaatcaagaatgaggtgagcgaaagtctgcagattcaagcttgagtggctgggaaattgctctggattaaatgacaaaacttacagctacgaagagggcaaaccacatgttattataaagctcaagtgagttctaggcttcaaacctaagtctcccgagaatgagtccttggagacttacccagtgatgaagtataacgcatctgtgtttcctgttcagtgcactggctagcaagatgaagataaggataaaaatagaaatgtggagtattttggactgggcacctaccttggttttcctctgcagaattatccctactatggcaaactcctgcagcccaaatacctgcagcctctgcttgttgtacagttcaccaaccttaccatggacactgaaattcgcctagtgtaaagcagatggtgagaacattgggcacagtgagaaagatggttttcagggatcctttgatgtaaaaattgaagttaagagctgatcacaagcacaaatctttcccgctagccatttaataagtttaaaaaaagatacaaaagcctgttagtcttgaacaaactgtcatatgtatgggacctacacttaaagcataatctatatgctttacacttgctttctgcatttaattggttagaatgtaattaatgtaaactaaagtgtagcaatagcaacaaaatattctactgtaaatgacaaaagaaaaattgagccttgggatgtgctcatttttactgtaaattatgattccataagtgacttgtaagcagtgtttctggcccctaagtattgcctcctatattttatttaatgtatagtactataggtgcatactctggtcctttttcaagccatgtgttatcgtatctgttttgtactttatgtgagcaggttttgctgtccaaggtgtaaatattcaatgggaatgaaactggcatggtcttttttttttttttttttgggctctttcaaagataatggcccatcaatgagcatctttaacatattctatagtcttttcctgtggtgttaggtcttactttattattattttttctcctgggaatgggacagggatttgtcatgggggaactgccctttaaattttaagtgacactacagaaaaacacaaaaaggtgatgggttgtgttgtgcttgttttgaatgctgtcttgacatctcttcccttgtcctctagtatgttctaaagctgtgtctgagatctggatttgcccatcactttggctagtgacaggcctaataaatttgctttgtacattttcttttactttccttttttcctttctgggggcatcatgctgatggtgtgtctttatgagtgttttaaccattttcatggtggaagaattttttatttatgcagttgtacagttttatttttttctgcaagaaaaagtgtagtgtatgaaataaaccacagtcacttgtttgaaaataaatctttattttgaactttatacaaagcaatgcagtactccatagactggtgtaaaatgttttctactatgcaaagtccatgttctaataattgccaggagtacagtgctcttgttgatcatgtattcagtcaagttaaaacaatggacaataaaagaatgaatacatgaaaaaaaaaaaacagaagacatctgcagcagatatattttccaagcccaacctatagttccagaagtgtttttcagatttccatgcaagtgcagaggaaatttacatatttcaaaatccattaaatagtgcagttgagcagctttctcctgacttcaattggaagtgattagtcgtcaatgtaagaagatgctaaaaggcaaatatcaacaagaatttcatagaattctataaatgctttcaaagcaatgaatatagttatttaaaattatgtttatagatttatatcagcatttggcagtacctatctataagattttgaatatgaaatagtaacatatcagatcatcatcaatagatgaacatttacaattaattttgatgataaggaatactaactgaatcccaattaagtgaaatattttatcctatccccccaaaaagaattctgttcttctcattagtagacctgtattacaaagaattgcactcacatatttttattatattttaaattttgtcaaaaaatttcatggaaatttgtagttatttcttgctataccttcatcatgtcctttatattacctcttggcctccaaagcatgaaatatttgctatctagctgtttagtcagttctcgtattgctataaagaaatacctgagactgggtgatttataaagaaaagaggtttaattagctcacagttctgcaggctgtatagaaagcatagaagcttctggggagcctcaggaagcttccagtcttggcggaaggcaaagatggaacaggtatcttacatagcaggagcaagagagagatgggggaggtgcctcacacttttaaatgaccagatctcatgagaacgaactcaccagtcgtgaggacagtaccaagagggatattgctaaatcattcatgagaattcacccccatgacccagttacccccccaccaggccccacctccaacaattggatttcaatttgacatgagatttggatggggacacaggtccaaaccatgtcaccagccctcttcgaaaaaagtttgccaaccctatttcaatggtttcgttaggattccaccccattttatttatttttgttattagtaacctggaaagaagctatgaaactggaaggatgtaactagaagccttggagtataaatatttaggaggattctaaattatttgactatctcagttctgcacaggaccaaggcttagaaatgacaatatttccttctccagatgagttggcaaaatttcaaagtggaaattgtgagacaattatggtcaataacccaggaagaaaagggatggagggagtttcttgagagtataggagttcattaccaggaggggagcagtgggataggaagatcaaggaagagggaagagggagaagaagatatgcaaggaaagaacaaagtagcagtgctcaaactgtcctaatgttggtcaatggaagcacctcagttggctcctaagtccctttgtcataactctagtatcatggcgtccttactttcaggaataatatgtttcagattcatcttgtacgtttcctgtcctgggttggtaatcaactatttctaaaaggagccacttttctttttactggaaaataaaatcaagttaaagtaattacatacttgatttattctatgtctctacacacatagagaataaagtgtagtttcaaatagcagtattaatactaacaatgtaatttaagatttctttgcttttctttgtatctttagtatatatatcccactagagatgtatagttcaatttctgtgtgttaaagtcacttaaaatttttctatatagaaatatcatcagtagatatacagttaggctcatttgtttcattttgcttctgatttttaaaaataattttgtttttattttataattgcctaaaaatttacatgatttcttagtcaaacctacagaacagatatttcagagaactctagcttccatctctgtcctttccactctaagtcctctctcttgtataagtaactgttttaaagtttttgggttttttttttaatacttaaaatataagaaaataaagccaggctccatggctcatgcctataatcccgggactttgggaggctgaggtgggaggatcacttgagaccaggagtttgagaccagcctgggcaacattagcgagaccattttccttaccaaaaatttaaaaataaaaataatattttttaaaaaaacgtacacatttgtattaaacgccatacccttcataaataaggcatactatacatactttctggtcttgctttttttttgaggcggagtctcgctctgtggcccaggctggagtgcagtggcacgatcttggctcactgcaacctccgcctcctgggttcaagcaattctcctgcctcaacttctcaagtagctgggactataggcacatgccaccatgcctggctaattttttgtatttttagtagagacggggtttcaccatgttagccaggatggtctcgatgatctgaccttgtgatccacccgccttggcctcccaaagtgctgggattacaggcatgagccaccgtgcccggctgctcttgctttttttacttaactctgtcatgaggactatgctatagcggtaaatagagacatttcttcatttattttataatactctgttttttgatataccgtaatgtattcaatcattcccccataggacgtttctagtgttttgctattaaaacgataccatgagaagccttgtaaataaaagttaaaagaattttttgtaatacaaaaatttgagaaaacacagtaatagaaaaatactctctcatatttttcaactttgaggtaaaaatgaaggacttgtttttgtatcaggcttagttaacttttataaaggtaatattgagaaaagaatcttaccaaactgtctttatctcattgcaaatccagattttcctgcctccttttttattgtaaaaaacacatagcccaaaatttaccatcttaaccatttttaaaggtacagttcataagtgtgtaagtatattcacattgttgtgaaacagatcttcagaggtttttcatattgcaaaactgaaacactatacccattaaataactaccccccatttccctgccaccccccggtccctggcaaccaccattctgctttttgtttctattaatttgaatactttagatacctcatataagtggagtcatacagtgtatgtccttttgagatgggcttatttcacttagcatagtgtcgtcaaggtttatccatgttgttgcatgtgacaggatttcctttttcaaggctaaataatactccatcatcatatgtatataccacattttgtttatccattcattcatccatccatggacatttgggttgcttcacctcttgactgttgtgagtactgctgctatgaacatgggcatgtaaatagctttttgaggccccacttgctattctttggacgtatgtccagaagtaggattgctggattatatggtaattctatgttacagttttttttaggaaccttcatatttttttccataacaattgcaccattttacattcctaccatcagtgcaaaaaggttccagttttgacacattgccaatccttgttattttctgtttcttgtttttttaatagtagccatcctaatggatgtgaggtgatatctcattgtggttttcatatgtatttctctgatgattagtgatgttgagtatctttccatatgcttgttggtggtttctatataatctttggagaaatgtctattgaaatcctctccccattttttaatcagtttacaaatccaaattttttataacttaatatttttgctgttagctagtagcgcatatttaacatagtcctgaagagaatatcatgttcatctaaactgtgactggtaagaatatctatgacctaaatttattttgttattcttacagggctatttagaaaccaaaaaatattaagagaatacagagatttcttgggaaataccaaggtatggatatctttgtaataatgtgtgtgtttgtgttgcacagcaaaattctaatatcagtccattgtaaaattctagcatgtctgtgatctcaatctaagattttcttgagtacattgtagttcactgaattatagtcaattcattcatttccgtctgattttcctttttttttttttttgagacagagttttgctcttgttgcccaggctggagtgcagtagtgtaatctcggctcactgcaatctccgcctcccgggtttgagcaattctcctgcctcagcctcccgagcagctgggaccacaggcatgccaccatgcccagttaatttttgtgtttttagtagagacagagtttcaccatgttggctaggtgggtcttgaactcctgacctcaggtgatgcgcctgcctcggcctcccaaagtgttgggattacaagcgtgcccggcctgattttcttgaaatttaaaacatttgtacataagttttctttaaagtcataaccatgttatgaaccttaagcatgtagatatagatgaggaagactttattttcttaggttttagtgagatttatatccgtcatacacactcttaattttctttagcctctctctttctgctcctaactctggttcaacattcagactgccaactctgtgcttgtatccaagaagcttagcccttggagaagaaaattacacagccagtgtgattgttctttcttccttatatgactatacaaaatcaatggatactcaatattatttgacagtcttactaaacttccagagtatgttcaccttcccactctttgaaatagctattgcatatctttttctttcttgccaacagcctcactctttactcttcagctgttgactttgcttcatattttattgaaaaaataggtgtaatttcataaaagtacctcatctttttcatcacctcatcttttcatcaccaaatttactaactcatctacacatgtgacaaaatactctgctttccttcctactagaaggaaattaatattgggacacatgtagaaagtttgcctctactgttctacctcttattttctcctgaacctaatccaattgggctttcaaccccaccaccccactgaaatgacttaccaaagtccccagcacctttaagatgccaagcagtctgtggccaagttgactttccatttaaacttggctgggaggaatctcctatcaagaagttaatgtcatatttggataaaaggctacctatgcacattttcttctctctggtggcatttgagacattgcacccattttgcaaagtttagacattggcagtgatgataattttagccaaatcttatttgatatgctttccttttccatttattatcttcaagacctcttaatttccatttcccctttgatcactgcatttctggcaccccagtactgccctgaagatgtggactctcctctggtagagccttcatatgtcttatgagccagcattttcactctcatgcctcaagggctattgccattgcctcttgtgctgggataacttaggctggtgagacctgcctcctgggaagattcactcctcgccttcacatctgtttcacatggagaatcatcctcaccagattttctaatagtagctgttgacttatgaaatctttgttacttcagaagattaatactggtcaacttttgaatattccatgttttgaaatgatttttttttgctattacaacgtttttttgctgggacattaggataaaactagtatttcatttccctctactgtacccctattccctttaggaatggttgttctctcactgaagatggttgctttccttctctaaaacatagggctaatcctgtttgcaaaaattaaatgccttcttttttttttttttttttttttttttttttttttgttatttctgacccagacacttgtttttccaatatattcttatctcatgagaactccaataatgagatatatgaaatcacagtgttctgggtctgctcctctggtatttaatttcttatataataatttcccctttaatacctttctactttcccatgccttcccttctatttctaattcatgggtttcttgatatagtacttcagagaattggaagtacctttatctctgcttaatatatttaactccacaatagtatcaccttgaaatgcaccaataatgctttgaacaatttatgctccttttcctggtagttctctctgaaatctatccaaattttctgcacttgtcccaatattaaagaaccttgtttattgtgaatgttctcaaagatatataaaaatagaaaaatagatattggctatccagtttcattaatttctaacattttgctgtcctggtcttcaaaaaggggcagttctccaattgctctgattatggaattttttaatattttattttattttatttttgagacagagtattgctgtgttgcccacgatctcagctcactgcaacctccgcctcccgggttcaagagattctcatgcctcagcctcctgagtagctgggattacgggcacccactaccacagccggctgatttttttgtattttagtagagacggggttttaccatgttgtccacactggtctcaaactcctgagctcaagcagtctgcccatcttggcctcccaaagtgctaggattacaagcgtgagccactgcgcccgacctgattatggaatttttgagtagcttttacaggaagcttcccaagcaggttgtggatcctggctccttgtgatctcttgtttttctagatttttattctcttgttagagttccttggaccttatcattatttctagtttctaccaacacatcttcccgttttctacagccttctttattagagtggtttgggccgagtgaatctttttccttatttttcttattatttcttattctgatcttaaagatctcatttcctttccctgttttgcccctcccatgagttcccaaacctttcttctaaagaaatcttatttttcaccgtaagcagcattctattgttcccataataatttcattgagttttttctctattcatccaaataatacaatatattcttattttaataaaacatacattctgtttgttatcaataaacagtataattcagaaatctagacccatagtcagagtttatggcttacaaatcgaagtaaaagttgagatcacatggacaaggtttatccctgtgtagttccttctcttagctctgaaggcaggtcaatacagaattttgggtgtctgatttcacacattcttagagcatatgaatttcagcacagtgcatttttctactttattactagtttttatgtagccagctcagatcctttctggaagtaggcaggacatgaattacaaggaaacaaaacaaacaagtttctggaaagagacccagatatgctttcggttttaatctttccactttctaaacaagaacttctagagaaaaataagtaaatctaattcagaagttttgatagaggaaaatgttctggtctgtcaaagccaccagttacagtgcttctctgcaaaattttggaggtattaaaaaaagtttttgtttttttacagccacgctccagaacagcatcagtgttttttaagggaccaggaaaagtggtgatggttgcaatttgcatgtaagtactgaaaaataagctttgtgaaatagaatatattcttttaaatatgtatatccttaaatatgtaaatttattacatggtagctagctatagagtttgaggtttattttgttttaggaggaaattgaataagtctttattattgtcagtaaagtggtggggaaagagcatgaattcatatagataaccatgctcattctctgtatatttttgatgtagttagatctaagaatagttgctacctgaaaatcctttcttgtttttattggagttgatagaagtcttttttaaagaagttagctaaaccaacctgggttacagctactgaagaatatctttgtgcttattatctttattccacttatcttggaagaacataattatttgttcttgttatttttgcctcctctttttttttttttttgagacagagtcttgctctgtcgccaggctggagtgcagtggctcaatctcagctcactgcaatctctgcctcccgggttcaagccattctcctgcaacagcctcccaagtagctaggattataggtgcgcgccatcatgcccagctaatttttgtatttttagtagagatggggtttcactacgttggccaggatggtctcaatctcctgacctcgtgatctgcccacctcggcctcccaaagtgctgggattacaggtgtgagccactgagcccggccttgccttcccctttttccctctatcttcttgattcctattgttttgttcaccttttgtctgtttttctgactaatctattttaggatggatgaaatcattcaataattcattagttcttttattcttaaatatatatatgtaaaatatgtatcagtgtgataggatatgaaaatataaagatataatacataattctttaaggattggagggacactaaactagaggaagacatttataatacagacaaggaataatgctgtcataactacaatagtggtggtacagatagacgtagacagtttcaacttcttagaaggtatgttcaaggatagtgaccaggtttctggctgtacaattgtgtaaataatgtaccattcactgaggagagtactggaaggaggagcagggtgggagcagagaaaatgatgagttcatttttgagctggtggtatgtttagggcacccaggtggagataagtcaacagggttctttccaccagtaatacagggatagtgattatagcttttctcattggagggatgtatgtgtgaaaagtgcttaacatagtacctgctctaagatatgtacttaagaagtattattgttaatatatattggtctgaagctcaggagagaaatctgagttagaggtttgatagtttttagtatatagatgataactaaagccataaaagtaaagatcacctgaggaatgtatgtatatatagtatcaggaataaaaagtcctcaggaaaaattccttgaagaatgttaacattaagaaaaaggtggaggctttgggagacctcgtgatccgaggtcaggagattgagaccatcctggctaacacggtgaaaccccgtctctactaaaaatacaaaaattagctgggcgtagtggtgggcgcctgtagtcccagctacttgagaggctgaggcaggagaatggtgtgaacccgggaggtggagcttgcagtgagccaagattgcgccactgcactccagtctgggcgacagagccagactctgtctcaaaaaaaaaaaaaaagaaaaagaaaaaggtggaggaaaaagtgcctgcagaggagattgaggaggagtaaggagaaaagtagaaagaaaaccaggagtgtattagtccattttcacgctgctgataaagacatacccaagactgggcaatttacaaaagaaagaggtttaattggacttacagttcccgtggctagggaagcctcacaatcatggtggaaggcaaggaggagcaagttatgtcttacatggatggcagcaggcaaatagagcttgtgcagggtaactcccatttttaaaaaccatcacatctcatgagctcattcactatcacaagaacaacatgggaaagacccaccctcatgcttcagtcatctcccactgcgtccctcccaaaacatgtgggaattataggagctacaagatgagattttgtgggagacacagagccaaaccatatcaaggagtgtcaagaaagccaagggaagaagcgtttgttttttttttgtgagacggaatctcactctgtcgccaggctggagtgcagtggtgcaatctcggctcactgcaacctccgcctcccaggttcaagcgattctccttgcctcagcctcctgagtagctgggactacaggcacacatgttttaaggaaatagcaggcctggtacaggcacacacctggaatctcagcactttgggaggctgaagcaggaggattacttgagctcaggaatttcagaccaccttgggcaacatagtgagaccttgtacctacaaaaaaatttttttaattagctgggcatggtgggtgatgtgcgcctgtagacctactcaggaagctgaggcaggagaatcatttgagcccaggagtttaaggctacagtaagctgtgattataccactgcactccaacgtgggcaagaacaagaccctgtctttaaaaaataaatagccagctagggggtggcgggcaagatggctggataggaacagatcctgtctgcagctcccagtgagatccatgcagaaggtggataacttctgcatttccagctgaggtacctggctcatctcattgggactggtcagacagtgggtgcagcccatggagggtgacccgaagcagggtggggcattgcctcaccggggtagtgcaaggggtcggggaactccctcccctagccaagggaagccatgagggactgtgctgtgaggaacggtgcattccagcccagatactacgcttttcccatggtcttcacaacccacagaccaggagattccctcgggtgcctacaccgccagggccttgggtttcaagcacaaaactgggcggccatttgggcagacaccaagctagctagactagttttttttcatactccagtggtgcctcgaatgccagtgagacagaaccttttaatcccttggaaagggggctgaaaccagggagctaagtggtctagctcagcagatcccacctccagagagcccagaaagctaagatccactggcttgaaattctggctgccagcacagctgtctgaagttgacatgggatgcttgagtttggtgtgtgttggggagttgggggttggggaccaccattactgaggcttgagtaggcagttttcccctcacagtgtaaacaaagccatcaggaagttcgaactggacagaacccaccgtagctcagcaaagccactgtagccagactgcctctctagatttcttctctctgggcagggcatctctgaaagaaaggcccagcagtcccggtcaggggcttatagataaaactctcatctctctgggacagaaaacttgggggtaggggcggctgtgggcgcagcttcagcagacttaaacgttcctgtctgctggctctgaagagagcagcggatctcccagcacagcgctcgaggtctgctaagggacagactgcctcctcaagtgggtccttgacccccatgcctcctgatggggagatacctcccagcagggatcaacagacacctcatacaggagagctccagctgacatctggcaggtgctcctctgggatgaagcttccagaggaaggaacaggcagcaatgtttgctgttctgcagcccctgctgttgatacccaggtaaacagggtctggagtggacctccagcaaactccagcagacctgcagcagagaggcctgactgttagaaagaaaactaacaaacagaaaggaatagcatcaacatcaacaaaaaggatgtccacacaaaaaccccatccaaaagtcaccaacatcaaagaccaaaggtagataaatccatgaagatgaggaaaaaccagtgcaaaaaggctgaaaattccaaaaaccagaacacctcttctcctccaaaggatcacaactcctcgccagcaagggaacaaaactggacggagaatgagtttgacgaagtaggcttcagaaagtgggtaataacaaactcctccaagctaaaggagcatgttccaacccaacgcaagaaagctaagaaccttgaaaaaaggtaagagaaattgctaactagaataaccagtttagagaagaacataaatgacctgatggagctgaaaaacacagcatgagaactttgtgaagcatacacaagtatcaatagccaaatcaatcaagtggaagaaaggatataagagattgaagatcaacttaatgaaataaagcataaaggtaagattagagaaaaaaatgaaaaagaatgaacaaagcctgcaagaaagatgggactatgtgaaaagaccaaacccacatttggttggtgtacctgaaagtgactgggagaatggaaccaagttggaaaacactcttcaggagattatccaggagaacttccccaacctagcaagacaggctaatattcaaattcaggaaatacagagaacaccacaaagacagtcctcgagaagagcaacctcaagtcacataatcatcagattcaccaaggttgaaatgaaggaaaaaatgttaagggcagccagagagaaaggtcgggttacccacaaagggaagcccaccagactaacagcagatctctctgcagaaaccctacaagccagaagagagtgggggccaatattcaacattcttaaagaaaagaatttttaacccagaatttcatatccagccaaactaagcttcataagcgaaggagaagaaaagacaagcaaatattgagagattttataaccaccagtcctgccttacaagagctcctgaaggaagtactaaatatggaaaggaaaaactggtaccagccactgcaaaaacataccaaattgtaaagaccattgacactataaagaaactgcatcaactaatgagcaaaataaccaactagcatcataatgacaggatcagattcacacataacaatattaaccttaaatagaaacaggctaaatgcccctgttaaaagacacagactggcaaattggataaagagtcaagacccattggtgtgctgcatgcaggagacccatctgacgtgcaaagacacacataggctcaaaataaaggaatggaggaatatttaccaagtaaatggaaagcaaaaaaaaaaaaaaaaaagcagggttgcaatcctagtctctgacaaaaaagattttaaaccgacaaagatcaaaaaagacaaaggtcattacatagtggtaaagggatcaatgcaacaagaagagctaactgtcctaaatatatatgcacccaatagaggagcacccagattcataaagcaagttcttagagacctacaaagagacttagactcccacacaggaatagtgggacactttaacccctcattgtcaatattagacagatcaacaagacagaaaattaacaaggatattcaggacttgaactcagctctggaccaagcagactaatagacatctacagaactctcaaccccaagtcaacagaatttacattcttctcagcaccctgtcactcttattctaatattgaccacataattggatgtaaaacactcctcagcaaatgcagaagaacagaaatcaaaacagtctctcagaccacagtgcaatcaaatgagaactcaagattaagaaactcactcaaaaccgcgcaactacatggaaactgaacaacctgcttctgagtgactactgggtaaataactaaattaaggcagaaataaataagttccttgacaccaatgagaacaaagacacagtgtaccagaatctctggaacatagctaaagcagtgtttagagggaaatttatagcactaaatacccacaggagaaagtcggaaagatctaaaatcgataccctaacatcacaatgaaaagaactagagaaacaagagtaaacaaattcaaatgctagcagaagacaagaaataactaagatcagagcagaactgaaagagatagagacaccaaaaacccttcaaaaaaccagtgaatccaggagctggtttttttaaaagattcacaaaatacatagaccactagccagactaataaaaaagaaaagagaggagaatcaaatagacaacaatgaaaaatgataaaggggatgtcaccactgatcccacagaaatacaaagtaccatcagagaataatataaacacctctacgcaaataaactagaagatctagaagaaatggataaattcctggacacacacaccctcccaagactaaaccaggaagaagttgaattcctgagtagaccaataacaagttctgaaattgaggcagtaattaatagcctatcaactaaaaaaaaaaaaaaaagcccaggactagacggattcacagccaaattctaccagaggtgcaaagaggagctggtaccatttcttctgaaactattccaaacaataggaaaagaaggactcctcctcaactcgttttatgaggccagcatcatcctgataccaaaacctggcagagacacacaaaaaaaagaaaatttcagaccaaaatccttgatgaacatcgatgcagaaatcctcaataaaatactggcaaagcaaatccagcagcatgtcaaaaagcttatcaccaccatcaagttggtttcatccctgggatgcaaggctggttcaacatatgcatcaacatatgcaaaataataaatgtaatccattaaataaacagaaccaatacaaaaaccaaatgattatctcagtagttgcagaaaagcccttcaataaaattcaacaccgcctcatgctaaaaactctcaccttaaactaggtattggcagaacgtatctcaaaataaaaagagctatttatgacaaacccacagccaatatcatactgaatgggcagtagctggaagcattccctttgaaaaccagcacaagacaaggatgctgtctctcaccactcctattcaacatagtattggaagctctggccagggcaatcaggcaagagaaagaaataaagggtattcaaataggaagagaggaagtcaagttgtctctgtttgcagatgacatgattgtatatttagaaaaccccataatctcagcccaaaatctccttaagctgataagcaacttgagcaaagtctcaggatacaaaatcaatgtacaaaaatcacaagcattcttacataccaataatagacaaacagccaaatcatgagtgaactcccattcacagttgctacaaagagaataaaatacctaggaatacaacttacaagggatgtgaaggacctcttcaaggagaactacaaaccactgctcaaggaaataagagaggacacaaagaaatggaaaaacattccatgctcgtggataggaataatcaatatcatgaaaatggccgtactgcgcaaagtaattaatggaatcaatgatatccccatcaagctaccattgactttcttcacagaattagaaaaaaaacttctttaaatttcatatggaaccaaaaaagagcctgtatagccaagataatcctaagcaaaaagaacaaagctggaggcatcatgctgcctgacttcaaactatactacaaggctgcggtaaccaaaacagcatggtactggtaccaaaacagatatatagaccaatgtaacagaactgaggccttagaaataacaccaaacatctacaaccatctgatctttgacaaacctgacaaaagcaatggggaaaggattcccgatttaataaatggtgctgggaaaactggcaagccatatgcagaaaactgaaactggaccctgtctttataccttatacaaaaattaactcaagatggattaaagacttaaacgtaagacctaaaaccataaaaaccctagaagaaaacctaggcaataccattcaggacataggcatgggcaaagacttcatgactttcacaccaaaagcaatgggaacaaaagccaaaattgacaaatgggatctaattaagctaaagaacttctgcacagcaaaataaactattatccgagtgaacaggtaatctatagaatgggagaaaatttttgcaatctatccatctgacaaagggctaatatccagaatctacaaggaacttaaacaaatttacaagaaaaacaaacaactgcatcaaaaagtgggtgaaggatatgaacagacacttctcaaaagaagatatttatgcagccaacaaacatatggaaaaaagctcatcatcactggtcattagagaaatgcaaatcgaaaccacaatgagattctatctcacgccagttagattggcgatcatttaaaagtcaggaaacagcagatgctggagaggatgtggagaaataggaacacttttacactgttggtgagagtgtaaattagttcaaccattgtggaagacagtgtggcgattcctccaggatctagaaccggaaataccatttgatccagcagtcccattactgtgtatatatccaatagattataaatcattctactataaagacacatgcacgtgtatgttttttgtagcactattcatattagcagacttggagccaacccagatgcccatcaatgatagactggataaagaaaatgtggcacatatacaccatgggataatatgcagccataaaaaaggatgagttcatgtcctttgcagggacatggatgaagctggaaaccatcattctcagcagactagcacaagaacagaaaatcaaacaccacatgttctcactcataagtgagagctgaacaatgaaaacacatggacacagagaggggaatatcacacactggggcctattggggggtgggtggctaggggagggatagcattaggagaaatacctaatgtagatgacgggttgatgggtgcagcaaaccaccatggcacatgtatacctatgtaacaaacctgcacattctgcacatatatcccaaaacttaaattataaatttaaaaaataaataaacattgtttaaaaaaagaagaaaatagtgtcagatgctcccaggaggttaagagaaatgctaaaatatttccaggaatttagtagtatggaatggtaggtggtattgataagatgaaaactgtgacagacagaataaatatgatgtttttaagaagttatctgaggtggaggagatgggaaaagggtagctaaaaggggacatacagttctctcatttataaaatgggggtgttaatatttgtataacagacttgtaatataacatggtaactcactagcataacgtctgagataaatcatattagtcattactgttagtatctgagcagctagtttcctcagagttaactgtttattttggcatctagctgcttctagtatgactctgagactgcttagagtcacctctggcatctgcctccttaagtaaacagattttcactgaagtcttgcctttgacactggcccaatggacagtatcaggtgcagatctgcttttatctacctaaaacacataattttcttttacattttatcttgtccacatatagaagaccatcttttctcaccagttttcaaaatatacttaagtaatttgcttacacatagcatgcctcttaacagtacataatctatattttttcaaatttttactcttgttacctaaacaaagttttttaaggctagggattcttttaattgtacttgttttttttgttattgttgttgttgttttagcgatggggtctcactctcttgcctaggctggagtgcagtggcacgatcatagctcacttcggcctcaaactcctgggctcagatgatcttcccacctcagcctctcagtagctgggactaaaggcgtgcactaccacaccagactaagtttttaaaaaattttttgtagagatggggtcttactttgttgcccagactggtcttgaactcctgtcctcaagccatcctcccacctcagcctcccaaaatgttggcattataggtgtgagccattgtgcttagcctaattttactttcaacagaatctagtgtagagatatacagctgattgagtatgcttttggcttaaatttttgtccaaacctatgctaaattgttttctctttctcttctagcaatggattaaactgcttctttaaatttcttgcctggatttataccggttcagcaagtatgttctcagaagctatacactcattatctgatacttgtaatcaggtgaggactaaagctttttttataagtcaattttaaagtaatagttgtaggctttaatctaaaagttgatctattttaaaactgaatgattccagtagttggcttgtgggataaaataaaagtttacttttcagcaatgaagtgcatagaaatttaatcatagtattttaaagcagattgttatgctttaagaacctctgacaatggaatgtgaagtataacattgtcagtcactgagcagaaatctggtctctgaatatgaattctcaatgactgtaatagtcaatgaatttaaacttttggaataaagatgtaaaatcatatgtaattggttaaaatgctttcacattagattcataatttgaattactttccttggctttgcaaatggagaaaaatttttgtattaatacaattaaaagaccttctaaaccccctgtggcccaaattgtgaaaactagaaacccaaaacttttctaagaatataataaaaatttctgtgtgtgcatcctattacattttaaagagtgtggtatattaagaggataccttttcaatatttacttatttttagtcctgttatgtaaaaactgatttgggagaacttcaatgagagacacaggtaaaataagaatatttaagacaaggataaaaataacgtgaagataaggagcaaggagagcaatattaattaaaaattaagcctgtgaacttgtctcactcactgtcaaatcagatggattaaaacccttcataaaagtaaggaaagaagacaagcgtttgccattagtactaagtatttaccttgaacttaatttttatactcaatatatacttaaatactgtctctataaaattttaccattcaactgtggtatgcagtgggaggagaggggatagggagagatatataacttataatctctattttcttgtaagcttatcgaggaaagttgaaatacagaaatatttgtccatatggcaaggagatatgtatgatgttattagtttcaatattagtttttatttcaaacattgaagacagtgtttaagtgttcattctctatgctattcaggcatttaaaaagaatgtagtagatatctgtgtactgacctggaatgataaccatgataaattgagtaaaaaatcaagttgcaaaatactatgttcagaacttctgctttcacccatgacagactaacagggattgagtttaatcttttgccatagacaactaaaagctagacagtatattggataatagcagcataagaccatgatctctgagagataagaaacaaattatttgaactctctgatctctctggctttttgcttgaacacatatttgggatagtggagcaggatgggaaataacagtctcattgagttgagaagacagaaatcagtgttcagggtgtctgaggtggctagaacttacaaggaagagttccacagaggaaggagctacaaggacaaaaagctatagaagtctacatagggatttccttgaattgaatgtttgctgaatgttaagttacacatgtgtaagatgtgagcatcaatctgggcagagaaccagcagggagcagtaactgactaattcccactgctcacacaaagctaggttacattcaggttctgactagctgacgtaagagagttctcattgattatcgaggccaatggaaggctcaccttaggagtagggctaaattattcttaacgtaaaggctgttctagaaccctccctaacaaatcttcctaaaagttctaaaggatcaagctgatcttcaaataatttaatcacttgccagaacaaagcctcacattctttaataaaggcagcaaaatccaaacactcagtataacattcacagtgtttagcatccaataaaaaagactaatcgccagtataagaagcaggaaaatttgactcataaccaggagaaaaatcagtcggaagcagactaaacagatgatagaattagcagacaaggatattaaacagctatttcaagtacagtcatgtattgaaaggaaaatatgaacataagaagataaatcaaaggtataaaaaataaaccaaatgaaacttttagagctaaaaaaatatatctggtgtgaaaaattcactgtatagaattaacagcacattagacactgcaggtaaaacagtcagtgaacctgaatatgtaacagcagaaaatattcttactaaagccacagacaaaaaagattgaaaaaaatggaggaagccttggtaacctatggaacaatatcaagagtattctgtcaagcatttagggaagaaacaatgctgagtacacagactttcagaaatagagaatgaaatgtttttctactgctttaatgaggctagtataaccctgatgccaaaattttacgaagtcattatgagagggaaaaaaccctacagaccagttattcctcatgaacacagatataaaactccttaaaatataatcagattttattatataaatatataaatatgatatatataaaaatgatattatatcataagtgagtaagatttcaggagtgtaaagttggtttaacattcaaaatcagtaagtatagaaggttaatatgaagaaattaattgcatttctactatcagcaaataaatggggaaggaaattttaataaattccataagtagtatcacaaaatattaaatacttagagataaatctagcaaaagacatacaagacctttacgctgaaaatcataaaatgttgctgagagaaatcaaagaagacctaaagaaatggagagatacaataccgcgttcatagattggatgtcatagatctgtcaaatctccctaaattgatttacagatataatggagttccattcataatatgaacagacttctctgtacaattgacaaaccgaataaattccaaaattcatacggacatgcaaagaacctggaatattcaaagcaatcttgaaacaagaaatttggagaacttcaagacattataaacttatatagaaattaggacagtgagttactggcataaggattgacaaatcaatggaacaaaattgaggatccaacaacagagccacatttacatggcccgtgcctttcggcaaaggtatcaaagcaattgagtgaggaaatgaaactttttaaaacaaataatgttggaaaaattggatccatatggggagaaaaaggaccttgactcctacttcacacactgtatacaagtttgaaatggatcatagtccaaatataaaagttaaaactatgaagattctagaagaaaacctaggagaatatcttttagacctggtaggcaaagatttcataaataggacacagaaacaatatcataaaataagatttacaaattcaacttcatcaaaattaaaaacttttgctcattgaaagacatccttaaggaaataaatacgcatagattgggagaaaatagtcacaaagcattctgacaagggactggtatccaggattaagaaattccacgattcagtaataaaatgagaaccagttttttccccccaaggataaagatttgggcaggtacttcacaaataaggaaacatgaatggtggccagtggacacctgaaaatgtgctaacaccgttaatgatcaggaaatgtatattaataccacaagacatctctgcatatccactataatggctacaagtaaaaacctgacagccaaatgttggtgaagatgtggagcagccagatctcccagtcattgctggtgtattactaaaatggtacaaccactctggaaaatatttggcagcctcctataaacatatacttatcctgtgacccaccaattccacttctaagtatttacccaagggaagtgggaatgaatggtcccaaaagatttgtataagaatgttggctgggcgcggtggctcacgtctgtaatccgagcactttgggaggccaaggcaggcagatcatctgaggtcaggaattcgagaccagcctggccaagatggtgaaattccatctctgctaaaagtacaaaatagctgggcatggtgatgggcccatgtaatcccagctactcgggaggctaaggcaggagaatcgcttgaacccgggaggcgggggttacagtgagccaagatccgagattgcaccactgcactccagcctggatgacaagagtgactcggtctccaaaaaaaaaaaaaaaaaaaaaaaaaaaaaggaatgttatagcagctttacttataatggctgaaaaaattggaatcaacccaaatgtttatcagcagtacagcagataaacaaattgtggtatactcatacaatggaatattatctggcaataaaagggaatgaagtacttttctgactggcaacatagatgtatctccagcaaggaactttaatttttaatagtttaaaaaaattgggaaaaatggttgcgtctgatgtcggggaggaaagaggcacagggagctttttgggaatgatggaaaggttctgtgtcttcataggaatatatgtttcaagggtatgtgtatttgttaacaaccagaactgtacattctgggccaggtacggtggctcatgcctgtaattccagcacattgggaggccgaggtgggcggatcactggaggtcaggagttcgaggccagcctggccaatacggtgaaacccgcatctctactaaaaatacaaaaacattagctgagcgtggtggtacatgcctgtaatcccagctactcaggagatggagacaggagaatcacttgaacccgggaggcagaggttgcagtgagtcaagatggcaccactgtactccagcctgggcgacagaactagacatctcaaaacaaaaacaaaaacaaaactgtacattcaggatttgtgcatttcattgtatgtgaattttacctcaaaaaaattctccctatgtggaaatgtgattacttagtagatatttgataatagtaaggaattagtattgatttttttttttttttgagacagagtctcgctctgtcacccaggctggagtgcaatggcatgatctcagctcactgcaagctccgcctcccaggttcacaccattctcctgcctcagcctcccgagtagctgggactacaggtgcctgccatcacgcccagctaattttttgtatttttagtagagacggggtttcaccgtgttagccaggatggtttcgatatggtcttgatctcctgaccttgtgatccacctgcctcggcctcccaaagtgctgggattacagacatgagccaccgcacccggccaggaattagtatcgatttttaaaagtctgataatagtcttgtggctgtattttctaaaaagcctagtttttaaagagattcatccaaaatatttaaagatgaaatggtacgatgcttggaatttacttcaaaatattcatgagggagtagatatggatgaaataaaacatatttggttacatatttataattgttaaagcttaatgatggatgatttgagtttttaaaaatgttctatcagggccgggcatggtggctcatgcctgtaatcccagcactttgggaggccgaagcaggcagatcacctgaggtcaggagttcaagaccagcctgaccaacatggcaaaaccccgtctcttagagttttcaaaaagacttcagttaaaaatatttcaactggacctttctgaatagatggaaattgtatttcagaaagttgtttctttcgagacctataatatttttaaaattttaattcattgtaatatttttatgccatatgttttccctcacttcttgagagacttaagtacctccaacttttaaattagacctgtgtctctaattataatgtagttttttatttatttattacttattttttgagacagagtctcgctgtcttgcccaggctggaatgcagtggcacaatctcggcttactgcaagctccatctcccaggttcacgccattctcctgcctcagcttcccgaatagctgggactacaggcgcccgccaccacgcccggctagttttttgtatttgcagtacagacagggtttcaccatgttagccttacaatttctgttacagttcatgttggaaaacttttctgttaaatattgcacatcgtatcatttaatatcaactgagatgaatttattgagcacctgagtttgcaatgtagcaagtgtttagaagaagacatggttctttctctgtcttctttaaacaggttatatgcggttatatgcacataaaacaactagaaagatcttctaaggtaccatttatgcaggtgctggatagtatgatacttaaggaacaccagaaacgtgaagggtgatcatggagtagagagcatttacagtacttcttagccactagatgttaatgttcgttatgctgcaaactaaacaaatgctctgtaggttatatatacgtactgatagagatttatgttgtaaatgtgtagaaaaaggtctggaaggatacatatcaaatataactgtgattctgtcttacctctgaggagagctggttggggtggtctcatttttgttagaactaataaatatggtccatattcattttataaaatagttgacggtatctcacacttcattgcacagccaactgaatattaaggatttttaaatagttgaatgtttattgaatattttaaaaataatataaatacatatatatgtatacatatatacacataatgtgaataatgactgtcacttttaatgtacaggtgtgtattattccattttcacactgctgataaaaacatacccaagactgggcaatttacaaaaaaaagaggtttaattgtgactagggcaggctcacaatcatggtggaaggtgaaaggcatgtctcacatggcagcagacaagagaagagggcttgtgcagggaaactcccctttttaaaaccatcagatcttgtgagacttattcactatcacgagaacagccgaggaaagacttgcctccatgattcagttacctcccactaggtccctcccacaacatgtgggaattcaagatgagatttgggtggggacacagccaaaccatatcttcccgccccagcccctcccgaatctcatgtcctcacatttcaaaaccagtcatgccttcccaacagtcccccaaagtcttaactcatttcagcattaactcaaaagtccatccaaggtgtcatctaagacaaggcaagtcccttctgcctatgaacctgtaaaatcaaaagcaggttagttatttcctggatacaatgagggtacaggcattgggtaaatacagacattgggtaaataccatgtctccatttggcgacattgggtaaatgtctccaaaagggagacattggccaaaacaaaggggctacaggccccatgcaagtccagaatccagcggggcagtcaattcgtaaagctccaaaatgatctcctttcgctccatgtctcacctccaggtcacgctgatgcaaaaggtgggctcccacagccatgggcaactccacctctttagctctgcaggatatagcccacttttggctgctttcaggggctggcattgagtgtctgtggcttttccaggtgcactgtgcaagctgtcagtggatctatcattctgggatatggagggcaatggccgccctctgctcacagctccactaggtggtgtcccagtaggttttctgtgtgggggctcccaccccacatttcccttaagcactgccctagcagaggttgtccatgagagccccgcctgtgcagcaaacttctacctgggcatccaggtgtttcccatacatcctctgaaatctaggcagagatttccaaacctcagttcttgacttctgtgcacccacaggcccaacaccacgtggaagctgccaaggcttggggcttccacctactgaagcaatagctggagctgtaccttggccccttttaatcacagctggagcagctgggatgcaaggcactaagctcccagactgcacacagcagagggaccctaggcccagcccacaaaaccacttttcttcctaaacctccaggcctgtgattcaaggggctgccacaaaggtctttgacatgccctagagacattttcccccttttcttggtgattaacattcagttcctcattacttatgcaaatttctgcagctggcttgaatttctcctcagaaaatggaattttcttttctattgcattgtaaggctgcaaatttttgaaacttttatgctctgtttcccttttaaaactgaatgccggggctgggcacagtggctcatgcctgtaatcccagcactttgggaggctgaggcgggcggatcacgaggtgaagaaatcgagaccatcctggccaacatggtgaaaccccatctctactaaaaatacaaaaattagctgggtgtggtggcacttgcctgtagtcccagctactcgggaggctgaggcaggataatcgcttgaacctgggaagcagaggttacagtaagccaagatcgtgccactgcattccagcctggcgacagagtgagactttgtctcaaaaaaaaaaaaaaaaaaaaactgaattcctttaatagcacccaaatcacctcttgaatgctttgctgcttagaaatttctccagccagacactctaaatcatctctctcaagttcaaagttcacaaatctctagggcaggggcaaaatgctaccagtctctttgcttaaaacataacaagagtcacctttgccccagtttccaacaagttcctcatttccatctgagaccacctcagcctggactttattgtccgtattgctgtcagcattttgggcaaagccattcaacaagtctctaggaaattccaaactttctcacattttcctatctttttctgagccctccaaactgttccaacccctgcctgttacccagttccaaagttgcttccacattttcgggtatctagagcagcaccccactctactggtaccaatttactgtattattctgttttcatgctgctgataaagacatgcccaagactgggcaatttacagaaaaaggaggtttaatggacttacaatttcacatggctagggaagcctcacaatcatggcagaaggtgaaaggcacgtctcacatggtggcaacacaagagaagagagcttgtgcggggaaactcccctttttaaaacaatcagatctcataagacgtattcactagcacaagaacagcatgggaaagacctgccctgattattcagttacctcccaccagatcccacaacacttgggaattcaaaatgagatttgggtggggacacagtcaaaccatatcagggtgtaaaagagttatatcttcctttgaatttcctgtcattctcttagtttaattccctgaaaaatcatgtatattttaggtggtttgctcccttttcccatggaatccagtggtaaaagcttataatattctgtgtatttagggtagggtttccaatattaagacctaaaaatatatttgtattaagtattttcaagtttctttaatctctattttttattagaaaaaatgtgtctattaaatttcttgtaacctaagggaaacctcatctgtgaagaagtcattatctagaaacttcacttatctgattatttgatatgatgctggaaaaaggaaaagcctcagattaatcaactaaaattacatagggaattcactcagaggctttatatttttatcaaatagttctaataaggtagtcttatgatgtgatttctagattcacatcaaattaggatggaaaggacttactagggacaagcatactactattgagaagttccagtggataactctttaacaaagggcaaaactttaaaaaccacctaagtggaaatgaaagaaagaaggaagaaatgatgaaggcaagtgagacagaggagaggcagtcagaaaggaaggaaagaaaagaatatgatatataattcctgtgcatggttttgcagttttaatagaaatgtgtgtgcccatacacaatatatatatattgtttaaagttgttattatcttttacttgtaaagctatacaagttattcttcctgtaaaaagtcaaatattagactaccttaattctgcctctcttcagagatacaaacatagttacttgcatgttcttttaaaccttttctgtgctttacattatatgtagtttataaaactacaaagcataagttctgtactgtacatactgttcctaacttgcttttttctcttcttccacttaatggtatgtctaggagctttatccatgtcagtatagaaagctctactctaaccctatttttttaacctactgtagaagtaatttatggtttatcatttattttgtcattcccaattgatggattttttttaggttgctttcatgtttctcatctttataaacaatggtgttttgaacccctttgagttcatctttattttttaaggtaagtactagaaaccagaattgctgggtcattggacatgcatatgttgagtgtttctttgtcattgttagcctgcaccctccacattggctttaccatattatactctccatcttgctaatgattattcacctttttttcttcttcttcatagggtttactagcattgggcatcagtaagtctgttcaaacaccagatccttctcatccgtaaggacattgccttattttgtttttgtttgttttggcgataagtcattgaaataactaaatatcagaaatctcctgcaatttatgtacctgcagtttgttcaagatttggtcatttcttccactgtagtatctaaaatgcagaacttcccactgtgtcaaagtaaattcaaggtataatttgaaaatggagttcaagttatttttatgctttgtagcacggcatggagatcttgttttctccatatttgataataataaagcacatattttgatcttagaggtctgttttatttggtccaaggaaacatatattctagatttagactcataggctgcccaatctaaaattttgatgataacttctattagatacacacttattttaatcctcctgttgtgatttggaaatgtattttgttaatatttcagaattatttatttgtaaaatgagtatactttttagaatgtattattttgaatcatagccattatttgatacagagatttttttctattgcttctattaacataaccatctaacacttttgaattccacaaacatcattttaagactagcttcagtaatataatttgataaatcttaagaccaaaaaaagtgcacttttatttctgtaaaggagtctacctctattctttagaaatgcctttctttacttgaaagcaatactactgttttcccataaataacatatttgaatgttttgtaactgtcaagctagtatagagaatagctctctagtgtgttaattacccatcattacagtgttttaccatcttaagaaaaatttttttttcatggccagttttatgtacaaaagatttaaaaacagaaggtacaaattttaaattttaggttgtgaagatttcttctcaaggtatttttatagtctactttagtgctgcccaacagaattttctgcaatgatggaaatattttatatctgtccagtatggtagtagctaactacatgtagctattgagcacttgaaatgtggccagtgcaactgaagaactagattttaaactatatttagttttaatttatttaaatttaaattgccacatgtggctagtggctcatcatattgggcagtttagacctacataatcaaaattttcaataagttaataattccttgaaatcacctgaagtaataccatttattttagatcttaatttactttaacgtgaatatatattcatgttactttagaagaaagtaaatttttctgagtgagctgattgtcacattgtcacatctataaactgggaattccccatggcaggattactctttgcaaaaaggaattccaagagcagcttgattaagaattcttgttgaaagccgggtgcagtggctcatgcctgtaatcccagcactttgggaggctgaggcaggtggatcacctaaggtcgggagttcgagaccagcctgaccaacatggagaaaccccatctctactgacaaaacaaaaaaattagccgggtgtggtggcgcatgcctgtaatcccagctactcgggaagctgaggcaggagagtcgcttgaactcaggaggcggaggttgtggtgagccaagatcacgccattgcactccagcctgttcaacaagagcgaaactccgtttcaaaaaaaaaaaatgtcgggcgcggtggcccacgcctgtaatcccagcactttgggaggccgaggaaggcagatcacctgaggttgagagttcgagaccagcctgaccaacgtggagaagccccgtctctactaaaaatacaaaattagctgggtgtggtggtgcatgcctataatcctagctacttgggaggctgaggcaggagaatcatttgtactcgggaggtggaggttgcagtgagccaagatcctgccattgcactccagcctgagcaacgagcaaaactccgtctcaaaaaaaaaaaaaaagaattcttgtttaaatttgtatttctcagaagagtgccactgagtttgggtttgggactaaattttccaggaaatatttttattaatgagtgattcttttcctcctctagtatgttattaatatatttttgagcacctttaatactaagtattgtgtcagtactaacaataatacaaaataatgtacatattgatgaagcatgcttgaaaaataattgagattttagcaccatgaaaacacccagaaaactgaaggtcttagttctagtaatagttgaaagttgctgtgtgctaacctattcagaaccagcaataaattatgtgttgtaaacttctgtatccagcatcaaattataggtattataaataatagactggctgcacacaaagatgaaaatattcaattagaagctgcattacaaggaaatttaaatgttatcctgttcattaaacatctgaatgcattttttaaaagattaattttaccaggatctgtggtacataatagtaaagtagctctctaaatcaaaataggctatttggaaaagagatcagaaaatacctgaattaaatggtattcactttatgtattttcaaaattcttacagttttttccactttacatattgcttttcaagtttggcacttaacatcttacttaaatataaaattataacatcttgatattgttagtctttttcattgacctattaagcacatatattttaaaagaaaccatttgtatttcttgcgaactatattcttttctatttttcaggtacggattttcaaatatgcgctatatttcttcgctaattagtggtgttggtattttcatgatgggtgcaggactatcttggtaccatggagtcatgggattgcttcatcctcaaccaatagaatcccttctatgggtaatcctctttttttctcctcagttttgatgtcttatgacatagtgattgtgtacagtagaaggcctttgtcatattggtgttaaaggagaatgacatacaccttcttgactgtgtattgtagggttatatatctatagtttaatttttagaacgtgactggacataacctctaaatccataagattcaatgatgttgaacaagatctctgtaggtaccaattatcaagccctgctccttggttaaaatcttgggcagttccactaatttctccagttactgttgaagaacaagaaaacctctgttcacttttggtcccaagaatagtctcatttcagtaattaaaatattcagacccatgtaatagtcataagttggaactatatttgaagttaaagcttctcttttcccgcatcctgggcttccttcaggtaggaagcctgcactgggggaatgggaggatagcaggatgatcacccgtatgatcccctctggggcttctgcccctctctcctattccctggaaagtgttgagggtttggataagggataaaaacataccactttactgactacagtgttattttgcattggtttcctctggcctttgtagatgtttaaaactgtctttttttttctcatgggcacttcttggagattaccctgcttggctgctctggctatggctgcccaaattgatcacatagcctaccctctcagcttctgcatctcatggtgtggtttccagacagtgctgaagttgtcttgcatttggaaagaatgccctttgagcagctgatctccttataaaagactcctagggacctgtgtgttaaaacagacatctttaacacactttctgtgggagtgcaggtttttctctcaagcccaatgatctactctgctgatacagccaatatcagttagtaggcttgcgtatggatgtatcactcaggtatgcatcagacagtttgctgtgatatccaatatcccgggggacacacatcaaggctactgaacaatcttagtagctcaacagctttcaccaaagaaatcttcatttttggcctcctcaatttcagctcttcttatgtggtctagaggatgtggagctagcatgtagtctagtgggtagaggccccaggtttgggctaccttctgtgcaaggcctgaatagatggtataacacctccttttggaatgtggggatacttgtacctattttcttctctattttgagttgtagtcagaactagacagaatcaatctgtctacttttttaatatcctgttatatcatgcaaatctacttaataacaagcacattaaactaggcttatttgttattctctagttttctatagttttgattgactagtttcttaccataatacatttcatataattaaaacaaacaaatgtgtttcctccattctgaaaagatttggccactttatgggtacttcattgttctagcgttcttctaatttgtatagtgtcactttataggggcaaagcactctctgtagttagagattaggtaattagttaaattttcagttgtgtataagttttaaaacttctaaaagctcttgtgtctttcagtaactaaatgggtttccattagactatggccctttttaaaatagtgttggactaggttcaaagttttcagacctctattttaggaaagcctagggttctaaacattgttgaaaattctgtagatgtttggtttgaatttcattaaaataaaaaaaatgtgttgctaggttaactttttttttttgatacacccctgtctaaagctttttttaccatctttaattgaagagtgtcctgggattgcagggaatgtggtattaccaaaaaacaaacattggttactgtttgtaactacttatctttctgaatcaggattttcttggtattaggcatggaagcaaaatccagaagttacttgagtttgggtgtggatcttactgtatctggtgtctaccactcctgatatcaaatattgtattcatatctcattgtcctcctcatttgagttgtttcccattagtaaccttactgtctggcttaaatttgaattcgtgtttttgttttagacattacggactttatatatgaacaattgtgattggaagtacttaatttatgctttattttaatatttcttttctaggcatattgtattttagcaggatcattagtatctgaaggaggtatgtactgtcacaaagtatgtctctattcttaatttagtaatatatattcagctgtccattattatagtttgctaagttctgttgattaaagaaaagcaagtgtgggaataggcatctaagctttctctacttttagggagtaaagtctttgcataatgtactgtggttgttctgtaatggatagctgtgggggggtgtgtaactgcgccctgccatgggatggcatcctggcaaggcctcatttctctttgtgtcctgagctgctaggataggctcaagtaggtgactatcagatagatggaagacagtaactgatgtggcatgaaagcgcttagcaagcccaccatatttgtggttatttttaaactatgtggtggtaagaggtgttccttacagttttcactttgcaagcattattccttgattgaacccaccaccactactatcgctgttacttgccgattcactaaaaattggataaataattattttacttatttaaaagggaaagtatgtttcatttttgagtatcataccataatactcaaaacatttgaaatggagtataaaaaacataattaaactgaacttttaaaattagagtttaataatattcaccagaagaatattatttactggctcttgtgagacaaatatttcaaagtttttgaaatacacagctatagcagtatgatgacagagaactgctaatatcagtataaaactgcctgattcactgctgtgctcatgtttacttctgaaacattgtaactttctatgtataatgttcccttcatctatttttaaaattaacattttttattgacagatcctaattgtatatgtttatggggcccctcatctttgaaagtctatgaaatggttataacacaacctgcttcaaaagattgggaggctcagaaatgaatgtggttagtgtggtgctgccaaatagcagctcttcaataaactaaagctgttgttattagtaattatatttaattattatggtttagaactatggggttcattttattataatgattaattgataacaactaattaacatagaacttgtccttattgccaaccctagttttaaaatgttgtgcttatttgtttatcttttgagatgccatctttaaagtttggaggcatgaagtttctgtcttgctgatatgaatgcttttcttttagcaacacttcttgttgctgtaaatgaacttcgtaggaatgctcgggctaaaggaatgtcattttacaagtatggtatgtattttagaaaccaagtgtttgtttcacctcccttatttgcttaaaattacttagtactgttattgctttgttcctaatagaaatgtacaaaatatatctgaatatcatccctgtgtggctcttacatatccttcagcccttattaaaaagaaatgtagtatagaaatttgaacatggatactttatatttggatttgacttaagtgaactaaggtatttctttatatggttatataacttgagaaagtaatttgactttatgtatcagttattgttgacatttaagccaagaaattatgtttgcattgagcaaggtttttaaaatcataatctctcatacacttttttatcttaacttatatcttgattttaaatggatacttattaaaatgttacctgatagtatcaagttaagattttagaaattttcttgtcttgtctcttccccaatgactagtaatggaaagtcgtgatcctagtacaaatgtgatattattggaggatactgctgcagtcttgggagttataatagcagccacttgcatgggccttacttctataacaggtaaatattccttaaattacaggtgatttatttgtcctacttaaataattctctaatatgtgggaattttctcttatatcattgaataatattaaaccaacaaattgttaaatgttaattcctactaatcattgacttatgtaagacatttggtcagcagaagtattcaggtttatttgaattaaaaatgtctctaaattagaaataaggaaggctatttgtaaaggatttctgtaatgctgtacgtctttctagctgtgacttaaaaaattgtgcaatcactctgaactttttatttacctataaaagtgtggataatatttaccttggtaacctcttaggtttattaagaaaatatgagagttttaataaactctaaagttccaaataaatatacataggtcctcaaataacattgttttgttcaacttgattttgttataacattgttgcgaaaaatatcaattcctaactggagctaccatctctgtggagtttgctcattctccttttatctacataggttttctttgggcaccccaacttcctcccacatcacaatgccgtacatggtcagtgaattggggtgtctaaatagtcccaatctgagtgagtgtgggggtgtgtgtaagtgtgccctgccatgggatggcatcctggccaggtctggttccttcctgtgtcctgaactgctaggataggctcaagtagatgataatcagacaaatgcaggacaataactgatgtatgaaagcgctcagcaagcctacatatttgtggttgtttatttttgaattatgtggtgataggtgttccttacaattttcactttgcaaacatttattctttgatttaactcaccacccctactattgctgatactcactgattcaccaaaaattgggtaaataattattttacatagtttttattaatttttaaaaatgtatatgtagcccacatttatttcagtgttcaatattagacatgttttgggtcttagaagttgagtgatgtttttgtgaccagaaatatgccataggaacttaactctttttttttttttttgagacagagttttgctcttgttgcccaggctggaatgcaatggtgccatgtcggctcactgcaacctccacctcccaggttcaagcaattctcctgcctcagcctcccgagtagctgggattacaggcatgcgccaccacgcccggctagttttgtattttcattagagacggggtttctccatattggtcaggctgatctcaaactcccgacctcgggggtgatcctcccaccttggcctcccaaagtgctgggattacaggcatgagccaccacgcccggccggaacttaactcttgtttgtatcagttagcttatggtaaaattggttttgttatatgttgttccctataaagtcgcagtttctaagaacctattgacaacatgaatgaggacttaaccgtatattgtggctcttgttcatttgtctttttccacacttaatgccaataataactactgttgccttcctatttctttaattctaagttgtttgtgtccttattttggtagctaattaagtgttttgagggccaataaaatacaagtaaatgaaaagacaattctattttatttttattttcgaaaacaaccatttagcatgaaaagactcaatttatgaagttggaattctcttggaaaggaacttcttccatacttctctatttgtccttacatatttaaaataattttaggtgacgagcttccacagttctgcagtgtttcttcaaatagtctgaaatatgaatacttctttctcattctgagtgtgcattttaataccaaactagcattctctgatgtttattgtgatccaaaatatttgtaaaaatgttgattgtttttctggttgaccatatagttttagactgtttttgaacataaattactagcaaaattttaggcttaagaaaagtgtgacttgatgcagatgtcaactttgaataatttattttcttttacataataatagaaaccaatcaaatcaaatttacaaaaatatgtaatgtgttttacatgaattaaatttttcttaattagctaatttattcaaattaaattaaataacatgccaagaaataaaagttttcttaaaaaaggtattttctttcagctaatattcctgtaatttctttaagagtacatgaatgtatatatttaaataaaaataactcttcacatttggatttctaaagagcagtatttgattttgagctctataattacaaaacttctaatggataatgttttacaagcggatcatttttaacacttagtatagattaacaagtttgctttttagtgttacagcttagcaaaatatatgttttatcaagcattaagaagagttaaatatattgatgacatttcatctttgggataaaaagacttgtagtcataaaagccatgtgtaaaatttattataaagatttaaaacgtatttattggtgtctattatataaatattacctatacattcatagatgataaatcagcctttctcattggttctgggagagaagccctgacaacctaaggcaaatattagaatcagaatcacctgaagggcttggggaaacacagaatgctgaaacccacatccagaattttttattcaggggcctgaaatgaggtctgagaatttgcttttctaccaagttttcaagtgatggctgctggtccaggaaccacactttgagaagcaccaccttgaggcacctatggcatgtaatgaattaagttctctcctttttatctagaatgatactagctatatatcatccttggttggatgagaagagagtcacccatattattttctgtagggcttaattctcttacagaacattagtaggaagaagatacggaaaaaggtttctttcagcttttgattccactgttattttgtctatctggtgtaggaaaagtgctatggatatatctaaaagaaatggactcttcattatgtcatttttttgtattggtgtctctaatctaaatgtgctcagaaacttcacatatgtaatgacaggtacaagtaagagatcttaattatgtcacatagtactcttatgaaagcaagttgtagcatcctcattttgtggtatattaaaactattaggagttgttaaaggaagtaattaaagaaattaggaataaatttcaagtgccttgatttactcgttctggttctttgctctctataaagttcactgaaataatataaactgttaatttactgatttttttatgtgcttcatttaggcaatccactgtatgacagcctaggttctttgggtgtgggcaccttattaggcatggtctcagcattcctcatctacactaacacagaagcactcttagggcggtccatccagccagaacaagtacaacggctcactgaactcctggagaatgacccatcagtaaggtcagccttattccagtaatcctgttaaggcttacaaaaacatattaaaaaacagaaatgcctggtttgtaaatacttccagaggaagttttggattcctcgtcttcagaacgttttagtctgtaacttttcagaattataatcctggaagtaagaaagaatacacttaggaaactccttctaagtttccttttaaattttctatacttctaatttttagagtaaggaagagtcaagttgatataatgagaatggaagtttgcaaagtagttgtcttcttagtggaaatacttaatatggaacctgtagagttgccttatattcgcattgcaattacaaattgaatatattaaatttaaaaagatttttgttcattgggcaatgattaccaaattaaatataatttatatttactttgaaaatagactttgttttagcttattttaagtatttttcttataatctttatcttttaaattatgtaaaactaaagaactggagacttaggagataatcagcagaagagatacagaattctaatagtgcttttcagtgaaattctagcagcattgtggttttataatgaaataaaagaacaaacctttaaaaacccagttttctactaactcgctctatattttttcaaactttaaaataagatttttttgtgtattgtacttgaaatctttaagttaaatctttttaaaatgacccgtatatctgaattagtaaaatatattaatgattactagatttatattctatgccctatatgtttaatcttgaaaagtaactatcttattggaacaagattagaaaatgagagatgggcacagtggcacatgcctatagttccagctacttgggaagctgaggcaggaggatcacttgaggccacgagtttgaggctagtgtgcaatgatcatgtctgtgaatagccactcactgtactatattctgggcagcatagcaaaaccctgtctcaaaaaaaaaaaaaaaaagattagaagttgagcattatgaaagtcagtattagagttattaacataatgtgagataatccaaattaatatcctttctttgtgatgtttttgtctggttttggtattaagataatactggcttcagagaatgagttgggaaatgttctctcctatttttttggaagagtttgtgaataattggtgttagcttctttaaatggtagaattcaagtatctggatatgagctttgctgtgtgggtagttttttgattagtaattatatctcttgttatggatctgttcagattgtctgtttcttcttgacttagtttaagtagcttgtattctaggaatttgtcttttacttctaatttacctaatttgttggtatacagctatttataatattcctttgtaatccattttatttctttagtgttggtacaaatgtctcatctttcatttctgtaatttgaatctctccttttcttggtcagtgtagctaaaggtttgttcattttcttgatctttctaaagaaccagcttttggtttaattgactttctctgttgtttttctattttctttttcatgactttctcctttaatctttattatttttttccttctgcgtgctttcagtttagtttgctctttttccactgtcttaaggttaagcttttaatttgatgtttcttcttttttaaaatagacaattacagctacaaattttcctttaagtattgctttctctgcattccacacatttccatatattgtgccattttcattatctaatagtattttctaatttctttttttattcttttcagttatttaggggagtatgtcacttaatttttacgtatttgtgagttgcacagatttctttccattattgatttattattttgttctattgtggtcaaagaatatgttttatattagttctgtccttttaaatttaccaaggtttgttttatggccttacatatagtcttggataatattcatgtgcacttgagaagaatgtatattctgctgttgttgtagagtgttctgtagatgtttgttaggtttaattggtttatagtgacttcaatttccctaattatcttcttgctctattgttctatcctttttttttttttttttttagatggagttttgttcttgttgcccaggctggagtgcagtggcacgatcttggctcactggaacctccgcctcccagattcaagtgattctcctgccttaccctcccaagtagctgggattacaggtgctcaccaccatgaccagctaatttttgtatttttagtagagacgaggtttcaccactggccatgttggccaggctggtctcaaactcctgagagacgaggtttcatcactggccatgttggccaggctggtctcaaactcctgacctcaggtgatccacccgcctcggtctcccaaagtgctaggtgtgagcaccgtgcccggcctctgtatccgttactgaaagtatcgaagtctctagttattgttgttgtattagctcttcctcccttcatttcttcttggttttggcatcatatattttggtgctctgttgttgctacatacatgtttataattttgtatatattgtttaataagtaatgtctaaaaaagagctataaactgaaagactggcaaattcgaaattttgtggaagagtgaatatctgtggattcaattattggaaaaaatacgttagtaatccagaaaattcatacaatttttttaaacagtatattagttacctactgctgtgtgacaaattggcccaaaacttagtggtttaaacaacatattaccatcttacagtttctgtgagtcaggaatcagggcacagcttatctgggtcttcgacttcagggtttctcatagactgtaatcaaggtgttgactgggattatagtcatctcctggggaaggggctgcttctaaccttactcacatgattgttcgcaagatttagctccttgccaaatgggcctcttcaacatggcagcttgcttaatcaaagcgtgcaaattgataaggcaatagagagcgagtgtgaacaagacaaaagtcacaggttagtcacctggtcttggaaatgacatctcatcactttgccatatttggtagttatagcccacattcagtgagaggagatcacacaagggcttgcgtataggtggcagggattgatcatatgggagccctccaaacagttttctgtctgtagttagttatatgtaagaacataaggaaaaagtatatctaaatatatttattagttgctactcacataccagccaaataatgaaatgtgtttatactctgtgaagactaaagtagaaatgatttttgaaaatgaataaatatgttctgtgagttaccaggagagaaaaaaaaaagaataaatgatatagccttttgccaatctgaaaaagttttgttttaacttgagcacatgtaactataaatattaaaacattaattcttatttcatccttgatggttgattaaaatatagcttccttatatggataaaaaattttggactcagtgtttagtaacctgctcaggatccctcagaaattagggtctaatgttgtaagaatacttggagtcttacgtaggcttgtttttctagtaaatctccatgtcctcagaattcagagtgttttgttatttcttatatgtgctgtacagaaaagatcttacagtgatcactgtagaaagaagagaatttctcagcagtttctagggaagattgtttactgagggttagagcaggaggggtgaaaagtagttatgcttgagtatctgctttcctgtctgggaggcaaaagggtatgatgcaaataccactgggcttgcatttctgaagagctgggctggggagtcctaatctgctgtttactagctaaattaccttgagcaagtcacttatgccactctaggatggttttatcatgtataaaataaagatgtcaccctatccacttatgaaagccatccattaaatgcctgccttatagttcttactgtattaaacattttatatatgtattagctcattattcctcacatcaagtcccatgtggcagttattattaacctcattctaatagagaacttcacagcattgtatgaagacttttaaagaagctagtgaacatacaattggttaatatactctacaacaccattataaattaaaacaaatttttatatggcatttaggaaattgataagtagatatatggagacaaaggcttatgagataacatgacattttagaaaattgatttagagttaatgaatatatatatatatatatatatatatatatatatatatattttttttttttttttttttttttttttttttgagacagagtcttactctgttgcccaggctggagtgcagtggcacaatctgggttcactgcaacctctgcctcccaggttcaagcaattctcctgtctcagcctcctgagtagctgggattacaggcatgcaccaccatgcctggctaatttttgtagttttagtagagacagggtttcaccatattggccaggctggtctcaaactcctgacctcaggtgatcctccctgctcggcctccgaaagtgttgggattacaggcatgagccactgcgcccagcagagttaatgaacttttaatacatgagctttataattcataaattaccataaaataatatttgttaagtttgcacctttgtatgatatcatgccaaaaaaaaagctaaacggacaggccttggaaaatgataggtggtacttaatggtgaatactctgaagccatcttagtccattctcgtaactagtggggaaaaaaacaataattcaagcctttgtgctattaaagtatatatatgtgtatgtatgtataaataaatttgtatgcattgttattgattgcagggcaattcatgatgttaaagccacagatctgggattaggtaaagtaagatttaaggcagaagtagattttgatgggcgagttgttacaagatcatatttggaaaaacaagattttgaccaaatgttacaagtaagtttatttgttgttttcttacataactgagggttagaaaaatgcttttaaggtaaacaaaatgaaatttttttttatagatcttaaaggcactttagctctcaacttcttaggttccaaaatttaacagagacctttatatttactatggaggggttcagaggagacagcaaaagaacaaacttactatttcatgcttgctatgtgcatttaatctttttttatctaatttaccctcaacaaccctgttatttcaacaatgaaataacatttttattttaacatatatagaaattgaaagacagagattaagtaatttgccttaagttgtagtgccacagagatggagtcatatatgaatcgagatctgcctgactccagaatccatttttttattaagaatagtttaaaagagaatttataaaacagaatataatgaacagcacagatgttaccacttgcccctgtcaaatcttaacattttgctatagtgtatttgcttaaggtcttaaaaaaagaaataattacaaaaacaattcaagcccccattttctctttctatatctcattcttcttcttccatccctagaattaaacattatgctgaatttggtacctgtcttttccattcagatttttatacttttcagcattttttagtgtaatatgtaacattttgaatgtttaaaaattggtataaatggtatcctactgtatgcgtctctacaattggcataacaacatattttttagattcttccgtgttaatttatatatctctagtcagtttaccttcattgttatagagcatttcatcctatgaatatgctgtaatttatttattttgtctccagttgatggacatttatattactgttagaaacaatgccatggccgggcgcggtggctcacgtctgtaatcccagcactttgggaggccgaggtgggcggatcacgaggtcaagagatcgatcccatcctggcccacatggtgaaaacccgtatctactaaaaatacaaaaattagctgggtgtggtggtgcgtgcctgtagtcccagctactcggcaggctgaggcagtagaatcgcttgaacctgggagttggaggttgcagtgagcctagatcgtgccactgcactccagcctgggcgacagagcgagactccgtctcaaaaaaaaaaaaaaaagaaagaaacaatgccatgattgcattctcacacgtttccttgttcacatatatgaaaatttctttagtatggtgtatatatagatagctagattttaaataggtgggccattgggtgtacttaccttcagcttgcctaggtcttaccaagttattttccaaagtgtgtcaatttaacttccatcattgtatatcaaggttcttgcttcctattcttacatgattgtattaatagagttattaaatttttgccagtttgataggtgtgaaatagtatcttgttctaattttatttcttggagcattgaggttaataaacattgaagttcattgaccagtgggatttcctctacattgctccctgatttttcatgttttaagttcatttgcattacacttatagatttgaaaggtctttattttattgcattgtattattattttttgagacagagtctcgctctgtcacccaggctggagtgcagtggcgcgatcttggctcactgcaacctccgccccccaggttcaagcaattatctacctcagcctcccaagtagctaggattacaggtgcctgtgaccacacccggttaatttttctatttttagtagagatggggtttcaccatcttggccaggctggtcttgaactcctggaaaggtctttatttttaatatcctggatgctaattcttacttgtatatatgcaattatttttttctagtttataacttccttttctttttgttgttatacaaaatatttaatatgatttttaattttaatgtgagatttgtaatcttttcctctgtgctttttattcttttgcatgaaaaatccttccatatcccattatcataaaaatattctcttctcatctagtagttttgtggtttgttttttacccttatgtctttcatccactttgaattattttaatggtctgacatagggattcaatttttttttcttaagggaaaatattctaacactatttattgactatattatttccccagtaattttgtagtgctacctctgtgtagtattatactcagttttcttgatccgaattgttttggaaataggtaatccattgcctgtggcttaaagttttaaaaatgttcattaaacttaatggcgtttgttataggtttgtttttttttaaggagtcataagtgtaccactatggttttttaaaaatttattttcctgttttcattttctttataggaaattcaagaagtgaaaactcctgaagaactagagacctttatgcttaaacatggagaaaatattattgatactttaggagctgaagtagatagacttgagaaggaactgaaagtaagatgtattcataaaaataacataatgataatggcagctatttttttgagtacttactctacagcagacactaagtgcatccatcacatgcatgctttaacccactcataactccacagtgtgtaggtatttataagcaagaaaatgactgggttagataagttgaataatttacccaaggaaatagggaaattgtgatttgaaccagattctttacttttaaacactattttatgcagcctgcttagtttctaaaatagtcaaagggggtttttttgtttgttaataaataagcattttgaaagttcctagagaaagatgaaaaggaaactttagactgtggtcaaaagttagaaaaaatagaatgtatatcttgcttttagcccatttgaaattattttctgtttttgtttgtttctattcagttggatgttattgtaatttattgattatgttactgaaatattacctgatcctgatcaggttgtcttttaaaatgtctcagtgttctcaaattgccatttattgacatttgaattctgtttgcaatgaataaaaacttgtaaatgatctttaatgtatataatttgttgaaggcagtgctttttctgcagttgatattgaccattctttaattttgtaaaaaattgaagaaaaaaacttccatctctacttttcaagttttcctttgagaatctggatatccgattagattaatacaagtacttcaaataagattttgttaatattatagttcatgagctttatctgacataatttttgaattttctagatgatattttggtcttaagacgctttcattcttaaaaattattgcagacctcaaagagattttatttatttgagttatagttattgatatttaccaaatcatgcatgaaagtagataaattttaaaatatttatcatttacttttaaaaacatacacctatttaatataaataactttttttttttttttaactaagaatctcactctgttgcctaggctggagtgcagtggcacgatctgggctcactgtaacctccgtctcctgggttcaagcagttctcctgcctctgcctcctgagtagctgggactacaggtgcctgccaccatgcccagctaatttttgtatttttagcagagatgaggtttcaccatgttggccaggctggtctcgaactcctgacctcaagtgatctgcctgccttggcctcccaaagtgctgtgaagtgctgggattacaggagtgagccaccccacccagtcacatttttttttttttttaactgagacggagtctcgcactgtcacccgtgctggagtgcagtggcacgatctcagctcaccgcagcctccgccttccaggttcaagggattctcctgcctcagcctcccaagtagctgggataacaggcacccaccaccacgcctggctaatttttgttttgttttgtacttttagtagagacagggtttcactatgttggccaggctggtcttgaactcctgaccttgtgatgtgcccacctcagcctcccaaagtgctgggattacaagcgtgagccaccatgccaagcccacatttttatataaatagttatattttccaaaatgaaaaaacgtagttagaagagtgatatttcacatttttgcaaaagtctcttatgcctggcttagtagaagacagctacattcccatatctgcttctgccttcagttgtagtgatttgattgtttggccgaagaacatgaaggaaagggagaactgttcctatagccttttgagataattgtgatactctcttttggtgttataacagctggtagaaaccaaatcaatgaatgaacttctcatatgctacttgtgaaggtagggggcacagtctacaagactgtccttccttctaataccaactgtgagttcaggaggttccctagagcaccttcagatttaataactcactaggactcttagaactcaccgaatcatgttatacccatcatggtttggtttattacagggaaaggatactgcttgaaatcagccaagggcagaagaagtgcatagggcagggtccaggaaagttccaaacatgaagtttcagttgtcttttctctgtaatgcatagtattactctcctggcaatgaagtgtgacagtagcatgacgtgttgccaaccgggaagctcatctgagacttgatgaccagagattttattgaggctccatagttgactgcataagtagctgaccttttgtctctagcccttctagaggtagagcagatactgtgtggccaaaggcccccatcatatatcacattctaaagttaatgcccccagataaacaaagacactcttaggcaggacatgtcaagggcctagaaattccctcccggttatggagaacaaaagccaaacctccctttgggtaagattaattctctactatacactgttatattaaaatctgttggtctatttttatactctgaatgaatcttttacccatgcatgattctataacattatgaattagtattttggaaaatactggttcacagaagtacttagatctttcagatgttgatacatttctaaatatgggtacactctcaggctgatggggtggatatgtttttcaacttaaatttccacttaaaagcttgcattttatcattagcaacaaatactgttgttttccttgaaataagactcattttgttcattttttaggagatgcctgccaaatacccaaatttgaataaaccgagtttgttaatctttcaaataaaaatgtactctagattaaaaagcagtttattcagctcacaacttaagcaatcaaagaagtacttttacgtactttccattttgtcacagtatttttaaaagtgaactcaagggtttaggtttaataaaatggatatatttgctatttcatgaaagacttttttaaatgaaactggctttttttttaatgtcaagtgtgggacagtagagacaatgactactggtattgtttgatgccatttgtgttgaattgtgcaaaggtgcaagcagttttacccaccattgtttttatgccatcaggaaatgtcagcatagtaaaaaaagcaaagaatgtcttacagttactgtgaaaatagttgtgaccttagagtccccctaaaaaggtctcaggaccccagcagtccttgaaccgcactttgcaaacaactaatctgtataaaatgtgagacaatggttatttttgtgcaaggtagcacaagattgaataaactttgctctttattctacttgtttttattttgctggcaaggaaaataatggactaaatatttgctttacattttagtagatacaagaaatcagaagccagatttaagaataatcaccaaattggtccttgtcacctacatttactcttacaacaatcagaccttattgtttttgtttagctaactttgtactttaactagaggctattaaatcattaataatgtttttgaattatgtaagtctttcaaaccaggaaggtaagtataatccatacattcaggtggaaacgtctttggctaagataataaagcatggccgggcgcgtgcggttgctcatgcctgtaatcccagcactttgggaggccgaggcgggtggatcacgaggtcaggagatcgagaccatcctggctaaaatgacgaaaccccgtctctactaaaaatacaaaatattagccgggcgtggtggcaggcacctgtagtctcagctactccggaggctgaggcaggagaatggcatgaacccaggaggcagagcttgcagtgagccgagttcgagccactgcactccagcctgggtgacaaaccgagactccgtctcaaaaaaaaaaaaaataaataaataaaataaaataaagataataaagcataattaatcttaagtcaaaggacatgttcatagttgaggtgccaaaccaaaagggaatgcatgaatgtaattgtttttcttagtcatgaaaataaggtgatttccttttgaaaactaaaactttgttcactggcatattccttcatttttagtatctcagtttaaattgtaattattattggattattttgggaggtcacactcatttatataattctgtaccagtggagtcatctctgttgagtaatgccattgagtgttgaaatagattatatttttggcttaaaattccagaacttgtggctgggcgcagtggctcacgcctgtcatcccagcactttgggaggccaaggcgggtggatcacctgaggtcaggagttcaagaccagcctgaccaatatggtgaaaccccatctctactaaaaatagaaaaattagcttggtatggtggcgggcccttctagtcccagctacttaggagtctgagacaggagaattgcttgaacctgggaggtggaggttgcagtgagccgagattgtgccactgcacttcagcctgggtgacagagcaagactccatctcaaaaaaaaaaaaaaaaattctagaacttttgtatagttatctgtaaaggtgttaaaaataatagagactaattcatagattcccatattacaagataggaactacaaaattaatataaaatatatcttgttattattttgaagttctttgacctgttaaacattttttgtcttatctctgtatttcagagtatagataaacctttctcctatccctccattaagttttttgtttatgatgattaatggaaattagttcattgggaggctgctgtagcattcataaattccttataaataatggctgaattaaatgctctgttctttactttgcctttgtttctccagtttctcttaaagcattgtttttaatgaatctgcagcattgtaaaataaattatgtaatttgggctttaactctctgcaagtattggaataaaatcctcatggtgtgtaaaatagcctaatcggtattgagcaatgcaaggaatatagattttaaagtatttgttgaataagtgggtgaaaattttaaattggataccaattattgattttcagttctgttcaataaatattagtttctactatacacatgatatcttgttaagcagtaaacattgaattttaaggatattaatcatatttattcattcagcatatattgtgtgctttgtattgtgcacatatacttttacaaatttgattagtttactctgaaaacttgattttaaaaagcagagcaaatttttaggcttttttttaagataaagcttttattagtacacatttatttatatcatgctttttagacagaataatgtcaaacttaatgaacaggtaaatttttcaagtcatattaggataggtaagggttgattggagtaggaagatacaatttagtttcatttctgtttggagaatttttttttaattctatattgagtttaaggagttctagagacagggaatagttttaaataaggaaaaagttgggaacaaaagtgtgccctccttgttaaaaggtccctggtcattcccacattaggatctaagaggaaagtacccccaggcacacctgagcgacactagttataagaaaaatccctgtgtgcactcagtagagtgttcttgctggagcaaaactccaatattctgccagattttgtttttataactggatgcctttaatacaagtaatatgcacatggtcctaggatatttttaagctaggaatcctaactgaatcatttacaggaacttttctcccctttttatttttgcaatttttatcaataatgcacaaagtttataaagtcaaatagaactgaaaagattataacagaaataactatcactgcctcacctgcctcagtacttatattttaagagataaccatttttaatacttttagtatgtctttatttattgccatatttctgcataaaagtcttatactacttctcttgatttaacagtatttcctctacgataggtgtagatttagttcttttatacactactttctgtcctcccttctcacagtattaatatgttacattttattatatttgtaattccccttaagttgatttaggtgcccttcctttattttattttattttttatttttttatttttttgagatggagtcccgctctgtcgccaggctggagtgcagtggcacaatcccggctcactgcaacctctgcctcccgggttcaagcgattctcctgcctcagcctcccgagtagctaggattacaggcatgcgccactatgcccagctaatttttgtactttttaatagagatggggtttcatcatgttggccaggatggtcttgatctcttgaccttgtgatccgcccgcctcggcctcccagagtgctgggattacaggcgtgagccaccgcgcccggccaggtgcccttcctttgtgcactcacaggaaaaagaaacccaaaatctttactttgctctgtggtagccgagtgttgtaattgcctacttaatttacctatatcacctcactaccaaacgtaagtccactgaaggcaaatactgtttgttcccagctcattgtcatatacacttcaatgcctggcacagagtaggcatgtaatagtagacagtattggttgttattgaattgaagttccttaagctagcatataagatttttaacaacctgatttctgcctgtctttccagcctcattaccaaccctaccctttttgcagcttctgtgctagctataccatagtgccagtgcacactttgcaggctgtctgactttgctgatgttgtgttttctgtctagacactcttcattatctacctggaaggctcatcatatgcagacctaccttagatattatatcctcagtgaaattttctagatctcatgagcaaaatggctgtctcatttttgctcccagtgttattatttagtacagtgtaataggagcttgggatctggaatcaggcctggagtcaggcctggaatcaatcctggctccatcacttactagcagtgtgacttcagacaggttagttaatttcttcgtacttcagttttccctgatgtatgtataagatggaaatagtaattaggttatgaggcttttaaaacacacatacatgtgctcatgtaacacagtacttgatacatgagtgagtaagcaataaatgttaactttttattattagctctaatactttaacttgtagatgattactgctatgctggtctccctagctaaactgagtcactcagggtcaggaacagagtcttatttaataatcatagctctgttttctagcacagggcccggcccaagaatatatggattgttgctaaagtatataaaatgagtggttgtcaatttactctttttgattattattgttttgcagtgattttgttttcaccacacaaaaatgtgtatttccagtgcttcgcaatgcttggcatgtactagatccttaatgcacttttgtattaacaaacacatgaacaaacttaggaatgtgatactacttattgtactgtttatagtatgtctatttacctattgatcttactttttttcttatgcaactatttctctcattagtatgctatagtgaaatagtttgcaaatgttttcattggctctaatgaccaaaaggaataaaaagaaacaagattttattttgctacaaataatgtggtggtgatttttctttccagaaacgaaatcctgaagttcgacatgtagatttggagatactgtgagtttgatggaatgaatcacctgggtggggaccttggaaacaagtttgtccgtccactctacaaagtttcctcctctcctacactgaaagactcagtgccatgcagaagccttttttttaagatgaaggaaatattttatgtaaagagcaactcagcaggacacagaactaaaactactacttacatctaacagacacactacaagttgaatcaatttgaaaatcatgtttttatgcttccata

SEQ ID NO: 14120 - DNA, 2217 bp, Homo sapiens
aaatgacgttgccgtttccgggtcacccaggcagcttgtggcggcgaagccatcggtgttcgctgatgtccagtctatggagtcagttggtaccggtggcggcgcggaggcagaaggcggtgtccgagtaggggcctctgccccaccaggatgttacccggcttggccgccgccgcggcccacagatgtagctggtcctccctgtgccggctccgtctgcgatgcagggcggcggcctgtaatcccagcgaccgccaggagtggcagaatttagtgacatttggaagcttttcaaacatggttccctgtagtcatccatatattggtaccctgagtcaagtaaagttgtactccacaaatgttcagaaagaaggacagggatcacaaacactcagagtggaaaaagtaccatcatttgaaacagcagaaggtataggcacagaactcaaagctccacttaagcaagaacctctccaagtaagagcccaagaaaggaataatggcaaataagaatcatcaattgcattatcatttttagaagagtaaggcaattaaagaacaagaggcccacacttttcagctactgcttattcaaatccagttaaagcagtccttaagaaaagggagtatggctcaaagtacactcagaataatttcatcactggagtcagagcgataaatgagttctgcctcaaatccagtgatctagaacaacttcgaaaaatcagacgacgaagtccccatgaagatactgagtcttttactgtatacttgagatcagatgtggaagcaaaatctttggaagtttggggaagccctgaagctcttgccagagagaaaaaattgcgtaaggaagcagaaatagaatacagagaaaggctatttagaaaccaaaaaatattaagagaatacagagatttcttgggaaataccaagccacgctccagaacagcatcagtgttttttaagggaccaggaaaagtggtgatggttgcaatttgcatcaatggattaaactgcttctttaaatttcttgcctggatttataccggttcagcaagtatgttctcagaagctatacactcattatctgatacttgtaatcagggtttactagcattgggcatcagtaagtctgttcaaacaccagatccttctcatccgtacggattttcaaatatgcgctatatttcttcgctaattagtggtgttggtattttcatgatgggtgcaggactatcttggtaccatggagtcatgggattgcttcatcctcaaccaatagaatcccttctatgggcatattgtattttagcaggatcattagtatctgaaggagcaacacttcttgttgctgtaaatgaacttcgtaggaatgctcgggctaaaggaatgtcattttacaagtatgtaatggaaagtcgtgatcctagtacaaatgtgatattattggaggatactgctgcagtcttgggagttataatagcagccacttgcatgggccttacttctataacaggcaatccactgtatgacagcctaggttctttgggtgtgggcaccttattaggcatggtctcagcattcctcatctacactaacacagaagcactcttagggcggtccatccagccagaacaagtacaacggctcactgaactcctggagaatgacccatcagtaagggcaattcatgatgttaaagccacagatctgggattaggtaaagtaagatttaaggcagaagtagattttgatgggcgagttgttacaagatcatatttggaaaaacaagattttgaccaaatgttacaagaaattcaagaagtgaaaactcctgaagaactagagacctttatgcttaaacatggagaaaatattattgatactttaggagctgaagtagatagacttgagaaggaactgaaaaaacgaaatcctgaagttcgacatgtagatttggagatactgtgagtttgatggaatgaatcacctgggtggggaccttggaaacaagtttgtccgtccactctacaaagtttcctcctctcctacactgaaagactcagtgccatgcagaagccttttttttaagatgaaggaaatattttatgtaaagagcaactcagcaggacacagaactaaaactactacttacatctaacagacacactacaagttgaatcaatttgaaaatcatgtttttatgcttccata

SEQ ID NO: 14121 - DNA, 15146 bp, Homo sapiens
actgcccccgccactcctttagactctggacgtgcggggactggtggcgctcggcctcgcgttataaaaagcggtggggcagggccggcgagacaatctgggaggcgggtaccgggcctcacggatccgcgccgcgccccccacctgtggctgcgcgcggggtgggctgcgctcccctgggcggcgccgggcgcccggggctggtggcgagatgggccgctactctggcaagacgtgccggctgctcttcatgctggtgctcaccgtcgccttcttcgtggcggagctggtctccggctacctgggcaactccatcgcgctgctctccgactccttcaacatgctctccgacctgatctcgctgtgcgtgggcctgagcgccggctacatcgcccggcgccccacccggggcttcagcgccacctacggctacgcccgcgccgaggtggtgggcgcgctgagcaacgcggtcttcctcaccgcgctctgcttcaccatcttcgtggaggccgtgctgcgcctggcccggcccgagcgcatcgatgaccccgagctggtgctcatcgtcggcgtcctggggctgttggtcaacgtggtggggctgctcatcttccaggactgcgccgcctggttcgcgtgctgcctccggggacgcagtcgccgcctgcagcagcggcagcagctggcggagggctgtgtccccggcgctttcggggggcctcagggcgcggaggacccgcggcgcgcggcggacccgacagccccaggctcggactcggccgtaaccctccgggggacctcggtggaaaggaagcgggagaagggggcgaccgtgttcgcaaacgtagcaggtgcctttcggttgcatcctttggaccgcttggcccttccttcctcctcccacccggtccctttcttctcaccccacgccctctttttcttctgcatgctttttttctgtttttttttttttgttgttgttgttttttttttttttttttttttttttttttaataaatccattccctttacaatcccgctttacttctcttctgccaatttaacatattccccatcccttcttttttctcctggatcctcgggtagccctggcctcttttcccttaccctattctctgtatatgagtattgattttcttggaaatcggtcactattattgggcaacaggcaggactctccaacccctcctccctctcattacttgctgtctgaattttgttgttctccccccctctttgcccatccgtttgtcttcttgggtgttacgggtttaggggctgcaggtgggctcccattcaccctctttttgttttaacttgaaaggatgtgtgaatgaagtccaaaggtggatcacaaggctatttcaaggccaaaatgtactgttctgagctgtgggtgtgcagaagggtctcccttaagctagtagaaatttaaaataacaaaactttattttgagtccattggtttttttttgtttgtttgtagaacttatacacaacacaaggtttcttctttgaatgcaggtgattccttcaacacccagaatgagccagaagacatgatgaaaaaagagaaaaagtctgaagctctgaatatcagaggtaggattgactttgggcctatttgaaatccctttctatgacacacatggactgtgttgtttatttctgtttgacttttaataaggcaaaggtgtgtttgaaagtaggccagttacatgcatagactatgacccaactctctttcgtaatcactgcattgatcctgagggagaaactggttgctaatgatttatcttagctccactgagacccatgctaatactgcctgctccagagctgcacatattaatattgtgttactactttacttggttttactggtccgtggatattgctaataaatcatgcaacccattttaattgaattgattttgataaaggtaggaaaagagtaggtgagctgctatccaaggttatgccctatctcgcattgctgagtgaccctattgcatcagctatttctgccagaaatctgcttttgtgaagggaccgttggctcactaaaacctccactcccaggaccaaagggagtgttctggtgaggcccaaggcaagcacctagctagcctctcaccatgtggtcaaggtcggaagcactggactaaggtcagcccagggctttttgagatgtgtttctcgctggacaccattgtagccaacatctctcccttccaacttcttgggcatagactttgcttcagagtgatcccagaaggggttaatccccaattttgactttgagaattccaacaaggattaagcaaccctctactttcctgtggtttggggaaagcctgtaagtggggctttgatggaaataatacaatgaaaaattaataattcaggagataccttcactttgagtgtctcacatctgttttacaaaggaattctcagagtgaacctatagggaaaatccagaagataacaacaataacatatgatctcctaaaaatttctaaattaatcaaacaaatttaaaggcaacaggggaatttgctctctgaaagagcttagtagtgagcttttaaaagagaatctgtaatgaaaaaaaaatcatcctttatctctcttttttaaggtccagtttaaaaatatatacattggggtgggcgcggtggctcacgcctgtaatcccagcactttgggaggctgaggtgggcagatcacctgaggtcgggagtttgagaccagcctggccaacatggtgaaaccccaccccatctctagtaaaaatacaaaaactagccaggcatggtggtgggtgcctgtaatcccagctactcgggaggctgaggcaggagaattgcttgaaccccagaggtggaggttgcagtgagccgagattgtaccactgcactccagcctgggagactgagctagattctgtctcaaaaaaaaaaaaaaaaaaaaaatatatatatatatatatatgtacacacacacacataaattttaaggtggagttcaccatcagaggctttaacttttcaaagcctgttctgttaagtatcctcattttttttcttctttgagatggagtcctgctctgtctcccaggctggagtgcagtggcgccatctctgctcactgcaacctctgcctaccaggttcaagtgatccttgtgcctcagcctcccaagtagctgggattacaggtgcgcaccaccacgcctggctgatttttgtatttttagcagaaacggggtttcaccatgttggccaggctggtctcgaactcctgacctcaggcaatctgcccgcctcggctgcccaaagtgctggaattacaggtgtgagccactgcacccggccaactatcctcattcttatgttacaaagttgagaaagagaataggtaggtggattgatgcaaagaagaagaagagtaggccctcatagttatagtgatcttgtttgggaaacttgtatgaacttgccaaattttagtcctaagctattgaagtttcttggtagaaaaatgtcagtagtagaatgccttgctatacctggctgggcctttggtttacagggactgacaccagtgcacctttagcttctgatagaggtgaatagtgcggtggctgaaaggttgggatttggcttcaaactgcctgagtgtgaatcatggctctgccacttaagaaccatgtgactttgggcaagttattgaacctctctaagcctccaatcccctcatctttaaaatgaggataataacagtacccaccttatgggattgctttgaaataaatgaaacatataaagtgtttaggcttatagtaggaaaactagctaacatttttattgagtatgtactttgtccctggtaccattcatgaatgagtgaactggtagtcacattaatcttactgagtggatacaattatcgtttaattagtgggtggaattgctgggctcaatccatagtgcttccgtgttagctgagatcattcctgctgcttttgatgagtacctgtactgtggctaataggagcctttacatattcccggctaagtgtgaggctggcctcccctttggtgctgtgttcttatcttggagccacagttcagggaaggatcacagaatgttagaactagaaggaccttagggaaattggacttcaacctttcacttcacagatgaggaagcagggtgtggagagtttgacgacttccccaagtcaccccagctcatagcagagacaaggctggaatcctgggctcctacatcacatttctggccctttccatgatcacacattgcctctagactccagacagggcttgcttctctagtacacagtccactgaatggttatatttctaacatttaagcaactgctttagaaagcaggactgtgtcccactctccagatctgcagaggtaacagcttacggggatctctgtgaacaaaaacaatttcttcactttctttactgtttctcttattccaatgggaatttaaaaaatgagtttttgtttgtttgtttgttttgttttttgagatgaagtctcactctgtagcccaggctggagtgcagtgtcgtggtattgactcaccacaaactgcctcccaggctcaagcgattctcctgcctcagcctacagagtagctgggattacaggcgcgcgccactgcacccggctaattttttttgtatttttagtacagacggggttttgccatgttggccaggctggtcttgaactcccaacctcaggtaatccgctggcctcggcctcccaaagtgctaggattataggcgtgagccaccgtgcctggcaaacaaatgagttctaaggaacacactctgtcttctactgtaaagtatggtaaaaacacaatcctcttaaaatgctcatcaatgtgctttgtagtggtcaattttatttaataggatcaaacatgatgtattaaaaatgttgtaacaatatgtcagaaagacaattagctttttaaagtttggtgtaaatagatgaatagccatcttgacatcccttgaaaagaaatcccctttgatgagatgtttctttgtaattccaataagaaagatctcagtttttcattaccatttgcccagtgcaaatgcactatttccagtcattcaacaaattcaacagcactgatggctttcctaagtgctgggacacatcagatttcaacttgtgtcaaattgccaatttatgttatatgcccgttttttgggggtttcgttttaatctaaaggcagcaagtgagggccaagtacagaggtttgctgtctttgcaaagctaccttgagagcattgtaacttagcaggtgattgagttgtctactaagtggtgctctttatgtctcagataatgctgccagatttatctttctgaatcatagatgtgatcacatcggagtctgctcaaagccttggccgcatacagggtatggtctaaacactgctgacattcagagcttgctgttccggtgccaatactcctttctagacatttctgcccttctcttcaccccttcatggcctcacctcccccatcagctcttcactgtctcccggcatacccatcaacatttaatgtacatctgtagtgaggtgagaagcacttacaccctgtgatcaggcagatctggtttgagttctgcctctcccttttcctagctaggtgaccttgggcaaggaacttcatctctttaatgttcagtcccgtcatctatataatggagataataggaccaacatcactgtgttgtgcggatcacatgggtggttagaatagcacagaggacccactcaacaaatggtgcctgttatcattatcatcacctcttggtcattctcagagggttttcagacatttttttacatactctacagaactagcctctgagggaggtgaggcagatattattactaccccatttcacagatgagaatcttgctcctcaaagaggttgactctcataaggtctttggctcatagcaacagcgtcagggtctgtgagtccaaatttagcacgtcagcctccagcgttgccccacgagcacgtcctccatcttcagtttcccacgagtctcccgtgaggtgtttctgtctgaaatgccttctcctgtggttgcctgttgaagtctgtctcctctccagagtcctgcccaaattacctacctctcaacaagactttcctgagatgtctcatcacaggagactcttttcctccctgaggagattatcgatgtatttatctcagaatcttccattttgagaggctgaggcaagaggattacttgaggccaggagtttgagaccagcccgggtaacatagcaaacccctgtctctgcaaaaaaaaaaaaaaaaaaaaaaaaaaaaaaaaaaaaaaaaaaaaaaaaaaaaaaacacacacacacacacacaaacaagaaggtaaaaaaattcttttaaaaagtaaaaaaattaaccagtgcagtggcacacatctgtagtcctagatacttgggaggctgagatggaaggatcatttgagcccaagagttcgaagttggagtgagctatgattgtgccactgtactccagcctgggtgacagagggagaccccattttttctctctctctgtctctctctctcggtctctctctctctctctctctctgtctctctctctctttcacacacacacacacacacacacacacacacactcagagacaccccacagaattttgccagtgcactgtagttaatggtcatgaccaggccttcttcatctttgcatgggcagccagaagatacattgcattattaaatgtcaggaattgagtgggatactgctttaaacagtttttcaaactgaaggctgcgacaatttgggccctagaattagtttagtagaaaattaattataattgaatgaaatagaatagataatattaagaagtcatatataaggatgagttttgctttcccatgaattatttgttgcaatttgtatctctgtgctaggatgcaaaacataattcttactgtggattatgggaaaaacaagttcaaaagttactattttatgtaattcttagggggtaatagtgggatttctcagaaggaaaagctgaaattgaattttagaacttacatgaggcaggatgcacagtagatctctggtcagaccacccagattgatatccccagttaacactttttagttgtgtgattttggacaagttacttatgtattctgtgcctcagtttcctcatttgtaaaatgaagagagtaccagccataaataatcaaaagggtcagattccagttttccagagtttattcaagtgaaaagttggcaatggccattccgggactcatcactccagagaaatggggatagggttccaaagttaaaagctaaattcttgcttatatataagacaaagaaatttagcagggttacaacattttgtatacaagcctggtttagtagttaaaaaaattagttacaatttgttttcttttccacgcggcttgttttctttatagctggttttcatttcctttccaacttaaaagagtgtatttaacattccatattaagggactgtgatagccatgatgtcttgtatgaaaaaggtaagagggagaatgaaaatcaacaggaagagagaagggggtcttccctggggccctttgccatttacaacattttacagagcaatgcaggtaaggaaaaagactgaattcagacatacaacagcttacagctgcctgtcacgtagctcaggccctgtaattcacattccttgaaggctcaaaatacttttgagttccaacagcttagattttgcattacttatttttacaagggtaaccaccttacagtccttaaaaggacttaatgggtaagtataatacgcttaaatcaatacctggagcatatgtgttagttagcataataataataatagttattattattaaagacaagagttactgtatgtcataggagttatgacaatcaaccagaagctactgttttattgaatgcctacattgctattatataaacaaaggcaatttggagtatggccctgatcctcatgttacttacggaggaaatggacctaacatgtatgagacaatcagagaataacagactgtctcacgcagtaaacatgacatcacatgtgtataggagatattaggctttcatatttttatggtagcattttgtactgtcctgaagcaagttaaagcttcgattcttagctccttgtagaggaacaaagtatttttgagtttcccttcagtggttcaggacagggactggggagttaaaagctcctttgggggtggggtgttgggagaaaggagcacagcattagaaaatgagaatgttaatgtatatattgaatcaagatcttattatcataagtaaacactcatccaaaaggaaatatgggaattctttttattcctgtatttttttggggaaaatttgaggcaactgcctcaaattacatttagtgttcacatgccattttacctatgatgttatttagaattgtggagttgttgccaagaggaggaattagctcaattaaagcaccttccaaatgagactgtttagtcttagccatgagtaagttgttagtaatttggattattattaattctactgcataagtctgtggaatacatggagagacaaagcagacctttcttaatatatatgctttcttctagagcagtgctttggaaacttgtatgtgcattccaatcatctgggcattttttttttttttttttgagacagagtttcactcttgttgcccaggctggagtacaatggcactatctcggctcactgcaacctctgcctcctgggttcaagcgattctcctgcctcagccttctgagtagctgggattacagatgcccccacaatgtccagctaattttttgtatttttagtagagatagggtttcaccatattggccaggctggtcttgaactcctgacttcagatgatctacctgccttggcctcccaaagtgctgggattacaggagtgagccaccacgcccagactcacctgggcatctttttaaaacgcaggttcagattctacagatctgaggtgggtcctgagatgcatcatttctaacaacctcctaggtgatgctgatgctgctggtttgcaaactatactttgaattgcaagattcagatgttgctttttgtaaaaaacaaacaaaatcccccaaaaccaaaacccaaaactttgtgtttatattttataatttttctgaccaaatttttacctaatttacttactgaatcccaatttagtctttggctaacaattgggcactcaaatctttgctgaggaatgcatgtgttctatatcataatcaatatctttagaaacaattcccttaattaaaggcacccacaatttttagtattatctgtagaattttaattttattttattgtgataaatggctctttatgcaatggaaatgttgccagagtccctgttcttggacacctcttaaaccaaatgccatttaaatgaccacagactaaatacaaagtaggtaaatgcttacagggaaaggggaaagtggatcaaggtagaaaaaagacaatttgttttaaacactcttaatacaacttgttctctctccccttaaacatgtttaaaacaacgtaaagcacagatgattgtctgaaagaaaaagaaatcatttgcacagcccctgttttccagcttggtgccctttgatgggtggtgagtggtagcgatgtggcccagtgagacggcacagtcgctcttcctgcaggtcagaatcttcctaggctgttgctcttccaaggtactctgagtcctgcgatggtggcctggggttttgtttcctaagaagtagttgccattattttgattcatcctactgttctaaccaaaacaaaaaccaaaaaactccaaatggtaacagatattcatatacccggacacccaagtcagtgagtgtcacgtggcttccagatttgcatctgtgctgcagtagtctttcttcctggcaggtgtacttttgcatgtgatgggagatgccctggggtccgtggttgtggtcatcacggccatcatattctatgtgcttcccctgaagagtgaggacccgtgtaactggcagtgttacattgaccccagcctgactgtcctcatggtcatcatcattttgtcatctgccttcccgcttatcaaggagaccgctgccattctgctacagatggtcccaaaaggagtcaacatggaagagctgagtaagtagactgaattttgatccagaaccactctcaatttaatgttattcaggccaaaggacaagcattatttaagagcagtgtttgagttatgtattctgaaacaccttaaatcaccaggtggtagagatgtcatcatatgttttatagcctattaagatgactcagctccaagtaccaaaggtcctttgcaatccgtgattctctgactcaactgcaaatttttaagaatgcaatacttggtctgggcatggtggctcacgcctgtaatcctggcactctgggaggcagaggtgggtgagtcacctgaggtcagaagttcaagaccagactgaccaacatggtgaaaccctgtctctactaaaaatacaaaaaaattagccaggcgtggtagcacgcgcctgtaatcccaactactcgggaggctgaggcaggagaatcgcttgaacccgggaggcggaggttgcagggagctgagattgcaccactgcactccaggctgggtgacagagtgagactctgactcaaaaaaaaaaaaaaaaaaaaggaaagaaaaaaaagaaaagaatgcaatgcttggataatacctattcctgggctacttactttcatgtcaaagatttattttaattcaaataaggccatttctgccaagaactttattttattctccttattctaaaaacacaaatcattcatattctagaccctgctttctagttaatgcgggcatgcaagtcactgtgtctctcacaacactgcccagagctgcaggcagagcaggtggtgggagagggaaggagacagaagagcagacatacagcattgcctttgccttcccaggagctagatcatttcccaattgaggaaataagataaacatatacaaagaaatttgtgatatatactggatatgtttttagtaaagtaatatatttaaaaacagatatttttaaaaatagagggctactttttgtgactcattcctgtaatctcaccactttgggaggctgaagtggaaggattgcataaggccaggagttcaagaccagcctgggcaacatagtgaggcctcatttttagaaaaataaaaaaattattttttataaataaataaaaaagtaaaggttgtagtgtgtgcctgtggtcccagctactcagtaggctgaggtgggaggatcactggagccctggagtttgaggctgtagagagccataaatatgccactgcactccagcctgggagacagggcaagactctgtctctaaaaaaaaaaaaaaaaaaaccccacaagatagtaataacaatagcaatattttcatagcgtttactacatgctagaaatgtaagtgttccaagtgctttacttataataattcattttaatccttaaaataatacaaaaaggtactattatcatttctattatacagataaggaaactgaggcacagagaggttaggtaattgcctaacgtcatgcagttagtaaatgtctaaactaggattcaaactagctgactgcaaagcctttgctcaaatcagcactgaataccatctctctaaatacatactcattttggaaagtatagaaaatacagaggagcctaaatgagataatagaaatctttcataatttgaccatggaaactaccactgttaatattttcttctatatgcggtgtaaaaagaaagatcataccatacacacagtttagcaatttgctttttcacttaaaaataccttatgtacattttctcatatccttaaatatgcaacttacttttaaacaactatatcctattccattacatcattgatttaactatttccttgttggttccatctttttaatgaacacaaggagcattgtccaaaccattcttgtacatacatatttggttatttcttttaggttaaacttttagtactagaattgctaggaaaggttttttttgatccatgttgccaaatcatcccttttaagaaaaggcattgcactttatcctactatgggaagttcattcaagtgtccattcccttgtatactcagcaaccctggggacttttttcttgtcgttgttagacttactttcttaaatgactttgtgtggactaacaatgtgtggagaaagaaggttaagggcaaatgtacccacagaggtagaactaatttcttccagctgttcgtagtaagtaggcagccattttggtgagaatgcttaacggaaccatatccctcctgtagttccatgtttcaaatgcagcgctcaccttggcttttgtttgctcttctctgttatagtgagtaaactctctgctgtgcctggaattagcagtgtacatgaagtgcacatctgggaacttgtaagtggaaagattattgccaccctgcacatcaagtatcctaaggacaggggatatcaagatgccagcacaaaaattcgagaaatcttccaccatgcgggaatccacaatgtgaccatccagtttgaaaatgtggacttgaaggaacccctggagcagaaggacttactgttgctctgcaactcaccctgcatctccaagggctgtgctaagcagctgtgttgtccccccggggcactgcctctggctcacgtcaatggctgtgctgagcacaatggtgggccctctctagacacatacggaagtgatggcctcagtagaagagacgcaagagaagtggctattgaagtgtctttggatagctgtctgagtgaccacggacaaagtcttaacaaaactcaggaggaccaatgttatgtcaacagaacgcatttttaatctggtactcacataatcagaccatatagacgaggcactttggaaccacaagcttggctcacaaaaagagctttctgggttgtaggcccagactagacttgcagcatgcatgctctgtgttcactaggggttggctgtttgggattttagttaaacgtgtctgtgaatttttatgtaactaactcctttccattcccctgggtgtctcatgctgctctttgactgtttcagcttgaacatgcattttctaaagcaaactgcactagtgtatatatcagggacattaaagtctgggactggggctcaatagctgcggatacagtgttcaaagaagttcttgtttctaaactgattagaacttctagctaatgctcaggtgagatcatagcttaaatacattgaaaaaactaaagtaccacaatagctgtatttttcccaatccccttaacgatcataaaagaggcaagttaagtatttctggcactgaagaaatatcttttttctttgattcatttttgaataaatataaaatgaataactattaaggtagaaaatattctcagaacattctagaggaggtaaaggttagtaggagggcgttggccatctctacattttgtgaggtgagagaaaactaatgtttactttctgctgtgaactgaactgcagctatagaatgtttcaaatgcttaaatatataatacatttttttccatggaagtgagggaatatttcagtttcctgaagtatgacacaaatactcatatactgtcttttagagtcagtatagttggagctgttttcatttagtgctttgataatgatttacttatttttccaaatttcgtttgaattttctttcatatgattgcattgatctatgcagcatttaccagaaaagagtattcctgggatagcagaatgcataacactgagtgttaattcttgtgaaataaataagctagactgccttctctttaattagacatattttaaagtatttattatagttgtcaactagtaactcaatgaaaaagttgatgcccaagggagaaatgagaattagcttaattgctgcctttaatgtgtttttgaggaacttaaaattttctttcatgtcgctgatccatattaccaagttcaaataaaatttttataatcggattcagacccataaccaaactatgttggtagtagagaagcatctgtcatgtttttaacacattgctcagacatcagtatttaaatcagaacagtctcacaggtatgagaaaatgggaagtgcctcactagacaactagtatcatctctggtagactgcaagattgtctgaaaataaccatctcttagtgtgtaaagtcctgttcagaatctgcacagggtttttcagaggtgctgggttgataatgaaggcagcatccacagaacaaacatcatatttaaacaatgtatcttagtcctaaatttgaaggctaaaataaataagcagctatgatccgtaggataggaaattattatttttttctttttttgtagagacagggtctcgctatgttgcccagctggccttgaactcctagcctcaagtgattctctcgccttggcctcccaaagcactgggagaacagtcatgagccactgcacctggccaggaaattctttattccttgaaaatgtattatctgagtttaaattggctgtgaagtaggtaaatagaaaaatgcctaaaaatgtttttatttctaggagcttattgggctaggttatatgccctttataagctcaaaggggttaataagtaagaatttctatttttagtattaaaagtgtggcatgtactcacacaaaacagtgcatcctcttaagaaacttggcatggagatcagtgggccagattctcctacataaacattggttgaaattccttagagccaaaaaagaaa

SEQ ID NO: 14122 - DNA, 3650 bp, Homo sapiens
actgcccccgccactcctttagactctggacgtgcggggactggtggcgctcggcctcgcgttataaaaagcggtggggcagggccggcgagacaatctgggaggcgggtaccgggcctcacggatccgcgccgcgccccccacctgtggctgcgcgcggggtgggctgcgctcccctgggcggcgccgggcgcccggggctggtggcgagatgggccgctactctggcaagacgtgccggctgctcttcatgctggtgctcaccgtcgccttcttcgtggcggagctggtctccggctacctgggcaactccatcgcgctgctctccgactccttcaacatgctctccgacctgatctcgctgtgcgtgggcctgagcgccggctacatcgcccggcgccccacccggggcttcagcgccacctacggctacgcccgcgccgaggtggtgggcgcgctgagcaacgcggtcttcctcaccgcgctctgcttcaccatcttcgtggaggccgtgctgcgcctggcccggcccgagcgcatcgatgaccccgagctggtgctcatcgtcggcgtcctggggctgttggtcaacgtggtggggctgctcatcttccaggactgcgccgcctggttcgcgtgctgcctccggggacgcagtcgccgcctgcagcagcggcagcagctggcggagggctgtgtccccggcgctttcggggggcctcagggcgcggaggacccgcggcgcgcggcggacccgacagccccaggctcggactcggccgtaaccctccgggggacctcggtggaaaggaagcgggagaagggggcgaccgtgttcgcaaacgtagcagaacttatacacaacacaaggtttcttctttgaatgcaggtgattccttcaacacccagaatgagccagaagacatgatgaaaaaagagaaaaagtctgaagctctgaatatcagaggtgtacttttgcatgtgatgggagatgccctggggtccgtggttgtggtcatcacggccatcatattctatgtgcttcccctgaagagtgaggacccgtgtaactggcagtgttacattgaccccagcctgactgtcctcatggtcatcatcattttgtcatctgccttcccgcttatcaaggagaccgctgccattctgctacagatggtcccaaaaggagtcaacatggaagagctgatgagtaaactctctgctgtgcctggaattagcagtgtacatgaagtgcacatctgggaacttgtaagtggaaagattattgccaccctgcacatcaagtatcctaaggacaggggatatcaagatgccagcacaaaaattcgagaaatcttccaccatgcgggaatccacaatgtgaccatccagtttgaaaatgtggacttgaaggaacccctggagcagaaggacttactgttgctctgcaactcaccctgcatctccaagggctgtgctaagcagctgtgttgtccccccggggcactgcctctggctcacgtcaatggctgtgctgagcacaatggtgggccctctctagacacatacggaagtgatggcctcagtagaagagacgcaagagaagtggctattgaagtgtctttggatagctgtctgagtgaccacggacaaagtcttaacaaaactcaggaggaccaatgttatgtcaacagaacgcatttttaatctggtactcacataatcagaccatatagacgaggcactttggaaccacaagcttggctcacaaaaagagctttctgggttgtaggcccagactagacttgcagcatgcatgctctgtgttcactaggggttggctgtttgggattttagttaaacgtgtctgtgaatttttatgtaactaactcctttccattcccctgggtgtctcatgctgctctttgactgtttcagcttgaacatgcattttctaaagcaaactgcactagtgtatatatcagggacattaaagtctgggactggggctcaatagctgcggatacagtgttcaaagaagttcttgtttctaaactgattagaacttctagctaatgctcaggtgagatcatagcttaaatacattgaaaaaactaaagtaccacaatagctgtatttttcccaatccccttaacgatcataaaagaggcaagttaagtatttctggcactgaagaaatatcttttttctttgattcatttttgaataaatataaaatgaataactattaaggtagaaaatattctcagaacattctagaggaggtaaaggttagtaggagggcgttggccatctctacattttgtgaggtgagagaaaactaatgtttactttctgctgtgaactgaactgcagctatagaatgtttcaaatgcttaaatatataatacatttttttccatggaagtgagggaatatttcagtttcctgaagtatgacacaaatactcatatactgtcttttagagtcagtatagttggagctgttttcatttagtgctttgataatgatttacttatttttccaaatttcgtttgaattttctttcatatgattgcattgatctatgcagcatttaccagaaaagagtattcctgggatagcagaatgcataacactgagtgttaattcttgtgaaataaataagctagactgccttctctttaattagacatattttaaagtatttattatagttgtcaactagtaactcaatgaaaaagttgatgcccaagggagaaatgagaattagcttaattgctgcctttaatgtgtttttgaggaacttaaaattttctttcatgtcgctgatccatattaccaagttcaaataaaatttttataatcggattcagacccataaccaaactatgttggtagtagagaagcatctgtcatgtttttaacacattgctcagacatcagtatttaaatcagaacagtctcacaggtatgagaaaatgggaagtgcctcactagacaactagtatcatctctggtagactgcaagattgtctgaaaataaccatctcttagtgtgtaaagtcctgttcagaatctgcacagggtttttcagaggtgctgggttgataatgaaggcagcatccacagaacaaacatcatatttaaacaatgtatcttagtcctaaatttgaaggctaaaataaataagcagctatgatccgtaggataggaaattattatttttttctttttttgtagagacagggtctcgctatgttgcccagctggccttgaactcctagcctcaagtgattctctcgccttggcctcccaaagcactgggagaacagtcatgagccactgcacctggccaggaaattctttattccttgaaaatgtattatctgagtttaaattggctgtgaagtaggtaaatagaaaaatgcctaaaaatgtttttatttctaggagcttattgggctaggttatatgccctttataagctcaaaggggttaataagtaagaatttctatttttagtattaaaagtgtggcatgtactcacacaaaacagtgcatcctcttaagaaacttggcatggagatcagtgggccagattctcctacataaacattggttgaaattccttagagccaaaaaagaaa

SEQ ID NO: 14123 - DNA, 13449 bp, Homo sapiens
ctcggcctcgcgttataaaaagcggtggggcagggccggcgagacaatctgggaggcgggtaccgggcctcacggatccgcgccgcgccccccacctgtggctgcgcgcggggtgggctgcgctcccctgggcggcgccgggcgcccggggctggtggcgagatgggccgctactctggcaagacgtgccggctgctcttcatgctggtgctcaccgtcgccttcttcgtggcggagctggtctccggctacctgggcaactccatcgcgctgctctccgactccttcaacatgctctccgacctgatctcgctgtgcgtgggcctgagcgccggctacatcgcccggcgccccacccggggcttcagcgccacctacggctacgcccgcgccgaggtggtgggcgcgctgagcaacgcggtcttcctcaccgcgctctgcttcaccatcttcgtggaggccgtgctgcgcctggcccggcccgagcgcatcgatgaccccgagctggtgctcatcgtcggcgtcctggggctgttggtcaacgtggtggggctgctcatcttccaggactgcgccgcctggttcgcgtgctgcctccggggacgcagtcgccgcctgcagcagcggcagcagctggcggagggctgtgtccccggcgctttcggggggcctcagggcgcggaggacccgcggcgcgcggcggacccgacagccccaggctcggactcggccgtaaccctccgggggacctcggtggaaaggaagcgggagaagggggcgaccgtgttcgcaaacgtagcaggtgcctttcggttgcatcctttggaccgcttggcccttccttcctcctcccacccggtccctttcttctcaccccacgccctctttttcttctgcatgctttttttctgtttttttttttttgttgttgttgttttttttttttttttttttttttttttttaataaatccattccctttacaatcccgctttacttctcttctgccaatttaacatattccccatcccttcttttttctcctggatcctcgggtagccctggcctcttttcccttaccctattctctgtatatgagtattgattttcttggaaatcggtcactattattgggcaacaggcaggactctccaacccctcctccctctcattacttgctgtctgaattttgttgttctccccccctctttgcccatccgtttgtcttcttgggtgttacgggtttaggggctgcaggtgggctcccattcaccctctttttgttttaacttgaaaggatgtgtgaatgaagtccaaaggtggatcacaaggctatttcaaggccaaaatgtactgttctgagctgtgggtgtgcagaagggtctcccttaagctagtagaaatttaaaataacaaaactttattttgagtccattggtttttttttgtttgtttgtagaacttatacacaacacaaggtttcttctttgaatgcaggtgattccttcaacacccagaatgagccagaagacatgatgaaaaaagagaaaaagtctgaagctctgaatatcagaggtaggattgactttgggcctatttgaaatccctttctatgacacacatggactgtgttgtttatttctgtttgacttttaataaggcaaaggtgtgtttgaaagtaggccagttacatgcatagactatgacccaactctctttcgtaatcactgcattgatcctgagggagaaactggttgctaatgatttatcttagctccactgagacccatgctaatactgcctgctccagagctgcacatattaatattgtgttactactttacttggttttactggtccgtggatattgctaataaatcatgcaacccattttaattgaattgattttgataaaggtaggaaaagagtaggtgagctgctatccaaggttatgccctatctcgcattgctgagtgaccctattgcatcagctatttctgccagaaatctgcttttgtgaagggaccgttggctcactaaaacctccactcccaggaccaaagggagtgttctggtgaggcccaaggcaagcacctagctagcctctcaccatgtggtcaaggtcggaagcactggactaaggtcagcccagggctttttgagatgtgtttctcgctggacaccattgtagccaacatctctcccttccaacttcttgggcatagactttgcttcagagtgatcccagaaggggttaatccccaattttgactttgagaattccaacaaggattaagcaaccctctactttcctgtggtttggggaaagcctgtaagtggggctttgatggaaataatacaatgaaaaattaataattcaggagataccttcactttgagtgtctcacatctgttttacaaaggaattctcagagtgaacctatagggaaaatccagaagataacaacaataacatatgatctcctaaaaatttctaaattaatcaaacaaatttaaaggcaacaggggaatttgctctctgaaagagcttagtagtgagcttttaaaagagaatctgtaatgaaaaaaaaatcatcctttatctctcttttttaaggtccagtttaaaaatatatacattggggtgggcgcggtggctcacgcctgtaatcccagcactttgggaggctgaggtgggcagatcacctgaggtcgggagtttgagaccagcctggccaacatggtgaaaccccaccccatctctagtaaaaatacaaaaactagccaggcatggtggtgggtgcctgtaatcccagctactcgggaggctgaggcaggagaattgcttgaaccccagaggtggaggttgcagtgagccgagattgtaccactgcactccagcctgggagactgagctagattctgtctcaaaaaaaaaaaaaaaaaaaaaatatatatatatatatatatgtacacacacacacataaattttaaggtggagttcaccatcagaggctttaacttttcaaagcctgttctgttaagtatcctcattttttttcttctttgagatggagtcctgctctgtctcccaggctggagtgcagtggcgccatctctgctcactgcaacctctgcctaccaggttcaagtgatccttgtgcctcagcctcccaagtagctgggattacaggtgcgcaccaccacgcctggctgatttttgtatttttagcagaaacggggtttcaccatgttggccaggctggtctcgaactcctgacctcaggcaatctgcccgcctcggctgcccaaagtgctggaattacaggtgtgagccactgcacccggccaactatcctcattcttatgttacaaagttgagaaagagaataggtaggtggattgatgcaaagaagaagaagagtaggccctcatagttatagtgatcttgtttgggaaacttgtatgaacttgccaaattttagtcctaagctattgaagtttcttggtagaaaaatgtcagtagtagaatgccttgctatacctggctgggcctttggtttacagggactgacaccagtgcacctttagcttctgatagaggtgaatagtgcggtggctgaaaggttgggatttggcttcaaactgcctgagtgtgaatcatggctctgccacttaagaaccatgtgactttgggcaagttattgaacctctctaagcctccaatcccctcatctttaaaatgaggataataacagtacccaccttatgggattgctttgaaataaatgaaacatataaagtgtttaggcttatagtaggaaaactagctaacatttttattgagtatgtactttgtccctggtaccattcatgaatgagtgaactggtagtcacattaatcttactgagtggatacaattatcgtttaattagtgggtggaattgctgggctcaatccatagtgcttccgtgttagctgagatcattcctgctgcttttgatgagtacctgtactgtggctaataggagcctttacatattcccggctaagtgtgaggctggcctcccctttggtgctgtgttcttatcttggagccacagttcagggaaggatcacagaatgttagaactagaaggaccttagggaaattggacttcaacctttcacttcacagatgaggaagcagggtgtggagagtttgacgacttccccaagtcaccccagctcatagcagagacaaggctggaatcctgggctcctacatcacatttctggccctttccatgatcacacattgcctctagactccagacagggcttgcttctctagtacacagtccactgaatggttatatttctaacatttaagcaactgctttagaaagcaggactgtgtcccactctccagatctgcagaggtaacagcttacggggatctctgtgaacaaaaacaatttcttcactttctttactgtttctcttattccaatgggaatttaaaaaatgagtttttgtttgtttgtttgttttgttttttgagatgaagtctcactctgtagcccaggctggagtgcagtgtcgtggtattgactcaccacaaactgcctcccaggctcaagcgattctcctgcctcagcctacagagtagctgggattacaggcgcgcgccactgcacccggctaattttttttgtatttttagtacagacggggttttgccatgttggccaggctggtcttgaactcccaacctcaggtaatccgctggcctcggcctcccaaagtgctaggattataggcgtgagccaccgtgcctggcaaacaaatgagttctaaggaacacactctgtcttctactgtaaagtatggtaaaaacacaatcctcttaaaatgctcatcaatgtgctttgtagtggtcaattttatttaataggatcaaacatgatgtattaaaaatgttgtaacaatatgtcagaaagacaattagctttttaaagtttggtgtaaatagatgaatagccatcttgacatcccttgaaaagaaatcccctttgatgagatgtttctttgtaattccaataagaaagatctcagtttttcattaccatttgcccagtgcaaatgcactatttccagtcattcaacaaattcaacagcactgatggctttcctaagtgctgggacacatcagatttcaacttgtgtcaaattgccaatttatgttatatgcccgttttttgggggtttcgttttaatctaaaggcagcaagtgagggccaagtacagaggtttgctgtctttgcaaagctaccttgagagcattgtaacttagcaggtgattgagttgtctactaagtggtgctctttatgtctcagataatgctgccagatttatctttctgaatcatagatgtgatcacatcggagtctgctcaaagccttggccgcatacagggtatggtctaaacactgctgacattcagagcttgctgttccggtgccaatactcctttctagacatttctgcccttctcttcaccccttcatggcctcacctcccccatcagctcttcactgtctcccggcatacccatcaacatttaatgtacatctgtagtgaggtgagaagcacttacaccctgtgatcaggcagatctggtttgagttctgcctctcccttttcctagctaggtgaccttgggcaaggaacttcatctctttaatgttcagtcccgtcatctatataatggagataataggaccaacatcactgtgttgtgcggatcacatgggtggttagaatagcacagaggacccactcaacaaatggtgcctgttatcattatcatcacctcttggtcattctcagagggttttcagacatttttttacatactctacagaactagcctctgagggaggtgaggcagatattattactaccccatttcacagatgagaatcttgctcctcaaagaggttgactctcataaggtctttggctcatagcaacagcgtcagggtctgtgagtccaaatttagcacgtcagcctccagcgttgccccacgagcacgtcctccatcttcagtttcccacgagtctcccgtgaggtgtttctgtctgaaatgccttctcctgtggttgcctgttgaagtctgtctcctctccagagtcctgcccaaattacctacctctcaacaagactttcctgagatgtctcatcacaggagactcttttcctccctgaggagattatcgatgtatttatctcagaatcttccattttgagaggctgaggcaagaggattacttgaggccaggagtttgagaccagcccgggtaacatagcaaacccctgtctctgcaaaaaaaaaaaaaaaaaaaaaaaaaaaaaaaaaaaaaaaaaaaaaaaaaaaaaaacacacacacacacacacaaacaagaaggtaaaaaaattcttttaaaaagtaaaaaaattaaccagtgcagtggcacacatctgtagtcctagatacttgggaggctgagatggaaggatcatttgagcccaagagttcgaagttggagtgagctatgattgtgccactgtactccagcctgggtgacagagggagaccccattttttctctctctctgtctctctctctcggtctctctctctctctctctctctgtctctctctctctttcacacacacacacacacacacacacacacacactcagagacaccccacagaattttgccagtgcactgtagttaatggtcatgaccaggccttcttcatctttgcatgggcagccagaagatacattgcattattaaatgtcaggaattgagtgggatactgctttaaacagtttttcaaactgaaggctgcgacaatttgggccctagaattagtttagtagaaaattaattataattgaatgaaatagaatagataatattaagaagtcatatataaggatgagttttgctttcccatgaattatttgttgcaatttgtatctctgtgctaggatgcaaaacataattcttactgtggattatgggaaaaacaagttcaaaagttactattttatgtaattcttagggggtaatagtgggatttctcagaaggaaaagctgaaattgaattttagaacttacatgaggcaggatgcacagtagatctctggtcagaccacccagattgatatccccagttaacactttttagttgtgtgattttggacaagttacttatgtattctgtgcctcagtttcctcatttgtaaaatgaagagagtaccagccataaataatcaaaagggtcagattccagttttccagagtttattcaagtgaaaagttggcaatggccattccgggactcatcactccagagaaatggggatagggttccaaagttaaaagctaaattcttgcttatatataagacaaagaaatttagcagggttacaacattttgtatacaagcctggtttagtagttaaaaaaattagttacaatttgttttcttttccacgcggcttgttttctttatagctggttttcatttcctttccaacttaaaagagtgtatttaacattccatattaagggactgtgatagccatgatgtcttgtatgaaaaaggtaagagggagaatgaaaatcaacaggaagagagaagggggtcttccctggggccctttgccatttacaacattttacagagcaatgcaggtaaggaaaaagactgaattcagacatacaacagcttacagctgcctgtcacgtagctcaggccctgtaattcacattccttgaaggctcaaaatacttttgagttccaacagcttagattttgcattacttatttttacaagggtaaccaccttacagtccttaaaaggacttaatgggtaagtataatacgcttaaatcaatacctggagcatatgtgttagttagcataataataataatagttattattattaaagacaagagttactgtatgtcataggagttatgacaatcaaccagaagctactgttttattgaatgcctacattgctattatataaacaaaggcaatttggagtatggccctgatcctcatgttacttacggaggaaatggacctaacatgtatgagacaatcagagaataacagactgtctcacgcagtaaacatgacatcacatgtgtataggagatattaggctttcatatttttatggtagcattttgtactgtcctgaagcaagttaaagcttcgattcttagctccttgtagaggaacaaagtatttttgagtttcccttcagtggttcaggacagggactggggagttaaaagctcctttgggggtggggtgttgggagaaaggagcacagcattagaaaatgagaatgttaatgtatatattgaatcaagatcttattatcataagtaaacactcatccaaaaggaaatatgggaattctttttattcctgtatttttttggggaaaatttgaggcaactgcctcaaattacatttagtgttcacatgccattttacctatgatgttatttagaattgtggagttgttgccaagaggaggaattagctcaattaaagcaccttccaaatgagactgtttagtcttagccatgagtaagttgttagtaatttggattattattaattctactgcataagtctgtggaatacatggagagacaaagcagacctttcttaatatatatgctttcttctagagcagtgctttggaaacttgtatgtgcattccaatcatctgggcattttttttttttttttttgagacagagtttcactcttgttgcccaggctggagtacaatggcactatctcggctcactgcaacctctgcctcctgggttcaagcgattctcctgcctcagccttctgagtagctgggattacagatgcccccacaatgtccagctaattttttgtatttttagtagagatagggtttcaccatattggccaggctggtcttgaactcctgacttcagatgatctacctgccttggcctcccaaagtgctgggattacaggagtgagccaccacgcccagactcacctgggcatctttttaaaacgcaggttcagattctacagatctgaggtgggtcctgagatgcatcatttctaacaacctcctaggtgatgctgatgctgctggtttgcaaactatactttgaattgcaagattcagatgttgctttttgtaaaaaacaaacaaaatcccccaaaaccaaaacccaaaactttgtgtttatattttataatttttctgaccaaatttttacctaatttacttactgaatcccaatttagtctttggctaacaattgggcactcaaatctttgctgaggaatgcatgtgttctatatcataatcaatatctttagaaacaattcccttaattaaaggcacccacaatttttagtattatctgtagaattttaattttattttattgtgataaatggctctttatgcaatggaaatgttgccagagtccctgttcttggacacctcttaaaccaaatgccatttaaatgaccacagactaaatacaaagtaggtaaatgcttacagggaaaggggaaagtggatcaaggtagaaaaaagacaatttgttttaaacactcttaatacaacttgttctctctccccttaaacatgtttaaaacaacgtaaagcacagatgattgtctgaaagaaaaagaaatcatttgcacagcccctgttttccagcttggtgccctttgatgggtggtgagtggtagcgatgtggcccagtgagacggcacagtcgctcttcctgcaggtcagaatcttcctaggctgttgctcttccaaggtactctgagtcctgcgatggtggcctggggttttgtttcctaagaagtagttgccattattttgattcatcctactgttctaaccaaaacaaaaaccaaaaaactccaaatggtaacagatattcatatacccggacacccaagtcagtgagtgtcacgtggcttccagatttgcatctgtgctgcagtagtctttcttcctggcaggtgtacttttgcatgtgatgggagatgccctggggtccgtggttgtggtcatcacggccatcatattctatgtgcttcccctgaagagtgaggacccgtgtaactggcagtgttacattgaccccagcctgactgtcctcatggtcatcatcattttgtcatctgccttcccgcttatcaaggagaccgctgccattctgctacagatggtcccaaaaggagtcaacatggaagagctgagtaagtagactgaattttgatccagaaccactctcaatttaatgttattcaggccaaaggacaagcattatttaagagcagtgtttgagttatgtattctgaaacaccttaaatcaccaggtggtagagatgtcatcatatgttttatagcctattaagatgactcagctccaagtaccaaaggtcctttgcaatccgtgattctctgactcaactgcaaatttttaagaatgcaatacttggtctgggcatggtggctcacgcctgtaatcctggcactctgggaggcagaggtgggtgagtcacctgaggtcagaagttcaagaccagactgaccaacatggtgaaaccctgtctctactaaaaatacaaaaaaattagccaggcgtggtagcacgcgcctgtaatcccaactactcgggaggctgaggcaggagaatcgcttgaacccgggaggcggaggttgcagggagctgagattgcaccactgcactccaggctgggtgacagagtgagactctgactcaaaaaaaaaaaaaaaaaaaaggaaagaaaaaaaagaaaagaatgcaatgcttggataatacctattcctgggctacttactttcatgtcaaagatttattttaattcaaataaggccatttctgccaagaactttattttattctccttattctaaaaacacaaatcattcatattctagaccctgctttctagttaatgcgggcatgcaagtcactgtgtctctcacaacactgcccagagctgcaggcagagcaggtggtgggagagggaaggagacagaagagcagacatacagcattgcctttgccttcccaggagctagatcatttcccaattgaggaaataagataaacatatacaaagaaatttgtgatatatactggatatgtttttagtaaagtaatatatttaaaaacagatatttttaaaaatagagggctactttttgtgactcattcctgtaatctcaccactttgggaggctgaagtggaaggattgcataaggccaggagttcaagaccagcctgggcaacatagtgaggcctcatttttagaaaaataaaaaaattattttttataaataaataaaaaagtaaaggttgtagtgtgtgcctgtggtcccagctactcagtaggctgaggtgggaggatcactggagccctggagtttgaggctgtagagagccataaatatgccactgcactccagcctgggagacagggcaagactctgtctctaaaaaaaaaaaaaaaaaaaccccacaagatagtaataacaatagcaatattttcatagcgtttactacatgctagaaatgtaagtgttccaagtgctttacttataataattcattttaatccttaaaataatacaaaaaggtactattatcatttctattatacagataaggaaactgaggcacagagaggttaggtaattgcctaacgtcatgcagttagtaaatgtctaaactaggattcaaactagctgactgcaaagcctttgctcaaatcagcactgaataccatctctctaaatacatactcattttggaaagtatagaaaatacagaggagcctaaatgagataatagaaatctttcataatttgaccatggaaactaccactgttaatattttcttctatatgcggtgtaaaaagaaagatcataccatacacacagtttagcaatttgctttttcacttaaaaataccttatgtacattttctcatatccttaaatatgcaacttacttttaaacaactatatcctattccattacatcattgatttaactatttccttgttggttccatctttttaatgaacacaaggagcattgtccaaaccattcttgtacatacatatttggttatttcttttaggttaaacttttagtactagaattgctaggaaaggttttttttgatccatgttgccaaatcatcccttttaagaaaaggcattgcactttatcctactatgggaagttcattcaagtgtccattcccttgtatactcagcaaccctggggacttttttcttgtcgttgttagacttactttcttaaatgactttgtgtggactaacaatgtgtggagaaagaaggttaagggcaaatgtacccacagaggtagaactaatttcttccagctgttcgtagtaagtaggcagccattttggtgagaatgcttaacggaaccatatccctcctgtagttccatgtttcaaatgcagcgctcaccttggcttttgtttgctcttctctgttatagtgagtaaactctctgctgtgcctggaattagcagtgtacatgaagtgcacatctgggaacttgtaagtggaaagattattgccaccctgcacatcaagtatcctaaggacaggggatatcaagatgccagcacaaaaattcgagaaatcttccaccatgcgggaatccacaatgtgaccatccagtttgaaaatgtggacttgaaggaacccctggagcagaaggacttactgttgctctgcaactcaccctgcatctccaagggctgtgctaagcagctgtgttgtccccccggggcactgcctctggctcacgtcaatggctgtgctgagcacaatggtgggccctctctagacacatacggaagtgatggcctcagtagaagagacgcaagagaagtggctattgaagtgtctttggatagctgtctgagtgaccacggacaaagtcttaacaaaactcaggaggaccaatgttatgtcaacagaacgcatttttaatctggtactcacataatcagaccatatagacgaggcactttggaaccacaagcttggctcacaaaaagagctttctgggttgtaggcccagactagacttgcagcatgcatgctctgtgttcactaggggttggctgtttgggattttagttaaacgtgtctgtgaatttttatgtaactaactcctttccattcccctgggtgtctcatgctgctctttgactgtttcagcttgaacatgcattttctaaagcaaactgcactagtgtatatatcagggacattaaagtctggg

SEQ ID NO: 14124 - DNA, 1915 bp, Homo sapiens
ctcggcctcgcgttataaaaagcggtggggcagggccggcgagacaatctgggaggcgggtaccgggcctcacggatccgcgccgcgccccccacctgtggctgcgcgcggggtgggctgcgctcccctgggcggcgccgggcgcccggggctggtggcgagatgggccgctactctggcaagacgtgccggctgctcttcatgctggtgctcaccgtcgccttcttcgtggcggagctggtctccggctacctgggcaactccatcgcgctgctctccgactccttcaacatgctctccgacctgatctcgctgtgcgtgggcctgagcgccggctacatcgcccggcgccccacccggggcttcagcgccacctacggctacgcccgcgccgaggtggtgggcgcgctgagcaacgcggtcttcctcaccgcgctctgcttcaccatcttcgtggaggccgtgctgcgcctggcccggcccgagcgcatcgatgaccccgagctggtgctcatcgtcggcgtcctggggctgttggtcaacgtggtggggctgctcatcttccaggactgcgccgcctggttcgcgtgctgcctccggggacgcagtcgccgcctgcagcagcggcagcagctggcggagggctgtgtccccggcgctttcggggggcctcagggcgcggaggacccgcggcgcgcggcggacccgacagccccaggctcggactcggccgtaaccctccgggggacctcggtggaaaggaagcgggagaagggggcgaccgtgttcgcaaacgtagcaggtgattccttcaacacccagaatgagccagaagacatgatgaaaaaagagaaaaagtctgaagctctgaatatcagaggtgtacttttgcatgtgatgggagatgccctggggtccgtggttgtggtcatcacggccatcatattctatgtgcttcccctgaagagtgaggacccgtgtaactggcagtgttacattgaccccagcctgactgtcctcatggtcatcatcattttgtcatctgccttcccgcttatcaaggagaccgctgccattctgctacagatggtcccaaaaggagtcaacatggaagagctgatgagtaaactctctgctgtgcctggaattagcagtgtacatgaagtgcacatctgggaacttgtaagtggaaagattattgccaccctgcacatcaagtatcctaaggacaggggatatcaagatgccagcacaaaaattcgagaaatcttccaccatgcgggaatccacaatgtgaccatccagtttgaaaatgtggacttgaaggaacccctggagcagaaggacttactgttgctctgcaactcaccctgcatctccaagggctgtgctaagcagctgtgttgtccccccggggcactgcctctggctcacgtcaatggctgtgctgagcacaatggtgggccctctctagacacatacggaagtgatggcctcagtagaagagacgcaagagaagtggctattgaagtgtctttggatagctgtctgagtgaccacggacaaagtcttaacaaaactcaggaggaccaatgttatgtcaacagaacgcatttttaatctggtactcacataatcagaccatatagacgaggcactttggaaccacaagcttggctcacaaaaagagctttctgggttgtaggcccagactagacttgcagcatgcatgctctgtgttcactaggggttggctgtttgggattttagttaaacgtgtctgtgaatttttatgtaactaactcctttccattcccctgggtgtctcatgctgctctttgactgtttcagcttgaacatgcattttctaaagcaaactgcactagtgtatatatcagggacattaaagtctggg

SEQ ID NO: 14125 - DNA, 4767 bp, Homo sapiens
ctcttaaaccaaatgccatttaaatgaccacagactaaatacaaagtaggtaaatgcttacagggaaaggggaaagtggatcaaggtagaaaaaagacaatttgttttaaacactcttaatacaacttgttctctctccccttaaacatgtttaaaacaacgtaaagcacagatgattgtctgaaagaaaaagaaatcatttgcacagcccctgttttccagcttggtgccctttgatgggtggtgagtggtagcgatgtggcccagtgagacggcacagtcgctcttcctgcaggtcagaatcttcctaggctgttgctcttccaaggtactctgagtcctgcgatggtggcctggggttttgtttcctaagaagtagttgccattattttgattcatcctactgttctaaccaaaacaaaaaccaaaaaactccaaatggtaacagatattcatatacccggacacccaagtcagtgagtgtcacgtggcttccagatttgcatctgtgctgcagtagtctttcttcctggcaggtgtacttttgcatgtgatgggagatgccctggggtccgtggttgtggtcatcacggccatcatattctatgtgcttcccctgaagagtgaggacccgtgtaactggcagtgttacattgaccccagcctgactgtcctcatggtcatcatcattttgtcatctgccttcccgcttatcaaggagaccgctgccattctgctacagatggtcccaaaaggagtcaacatggaagagctgagtaagtagactgaattttgatccagaaccactctcaatttaatgttattcaggccaaaggacaagcattatttaagagcagtgtttgagttatgtattctgaaacaccttaaatcaccaggtggtagagatgtcatcatatgttttatagcctattaagatgactcagctccaagtaccaaaggtcctttgcaatccgtgattctctgactcaactgcaaatttttaagaatgcaatacttggtctgggcatggtggctcacgcctgtaatcctggcactctgggaggcagaggtgggtgagtcacctgaggtcagaagttcaagaccagactgaccaacatggtgaaaccctgtctctactaaaaatacaaaaaaattagccaggcgtggtagcacgcgcctgtaatcccaactactcgggaggctgaggcaggagaatcgcttgaacccgggaggcggaggttgcagggagctgagattgcaccactgcactccaggctgggtgacagagtgagactctgactcaaaaaaaaaaaaaaaaaaaaggaaagaaaaaaaagaaaagaatgcaatgcttggataatacctattcctgggctacttactttcatgtcaaagatttattttaattcaaataaggccatttctgccaagaactttattttattctccttattctaaaaacacaaatcattcatattctagaccctgctttctagttaatgcgggcatgcaagtcactgtgtctctcacaacactgcccagagctgcaggcagagcaggtggtgggagagggaaggagacagaagagcagacatacagcattgcctttgccttcccaggagctagatcatttcccaattgaggaaataagataaacatatacaaagaaatttgtgatatatactggatatgtttttagtaaagtaatatatttaaaaacagatatttttaaaaatagagggctactttttgtgactcattcctgtaatctcaccactttgggaggctgaagtggaaggattgcataaggccaggagttcaagaccagcctgggcaacatagtgaggcctcatttttagaaaaataaaaaaattattttttataaataaataaaaaagtaaaggttgtagtgtgtgcctgtggtcccagctactcagtaggctgaggtgggaggatcactggagccctggagtttgaggctgtagagagccataaatatgccactgcactccagcctgggagacagggcaagactctgtctctaaaaaaaaaaaaaaaaaaaccccacaagatagtaataacaatagcaatattttcatagcgtttactacatgctagaaatgtaagtgttccaagtgctttacttataataattcattttaatccttaaaataatacaaaaaggtactattatcatttctattatacagataaggaaactgaggcacagagaggttaggtaattgcctaacgtcatgcagttagtaaatgtctaaactaggattcaaactagctgactgcaaagcctttgctcaaatcagcactgaataccatctctctaaatacatactcattttggaaagtatagaaaatacagaggagcctaaatgagataatagaaatctttcataatttgaccatggaaactaccactgttaatattttcttctatatgcggtgtaaaaagaaagatcataccatacacacagtttagcaatttgctttttcacttaaaaataccttatgtacattttctcatatccttaaatatgcaacttacttttaaacaactatatcctattccattacatcattgatttaactatttccttgttggttccatctttttaatgaacacaaggagcattgtccaaaccattcttgtacatacatatttggttatttcttttaggttaaacttttagtactagaattgctaggaaaggttttttttgatccatgttgccaaatcatcccttttaagaaaaggcattgcactttatcctactatgggaagttcattcaagtgtccattcccttgtatactcagcaaccctggggacttttttcttgtcgttgttagacttactttcttaaatgactttgtgtggactaacaatgtgtggagaaagaaggttaagggcaaatgtacccacagaggtagaactaatttcttccagctgttcgtagtaagtaggcagccattttggtgagaatgcttaacggaaccatatccctcctgtagttccatgtttcaaatgcagcgctcaccttggcttttgtttgctcttctctgttatagtgagtaaactctctgctgtgcctggaattagcagtgtacatgaagtgcacatctgggaacttgtaagtggaaagattattgccaccctgcacatcaagtatcctaaggacaggggatatcaagatgccagcacaaaaattcgagaaatcttccaccatgcgggaatccacaatgtgaccatccagtttgaaaatgtggacttgaaggaacccctggagcagaaggacttactgttgctctgcaactcaccctgcatctccaagggctgtgctaagcagctgtgttgtccccccggggcactgcctctggctcacgtcaatggctgtgctgagcacaatggtgggccctctctagacacatacggaagtgatggcctcagtagaagagacgcaagagaagtggctattgaagtgtctttggatagctgtctgagtgaccacggacaaagtcttaacaaaactcaggaggaccaatgttatgtcaacagaacgcatttttaatctggtactcacataatcagaccatatagacgaggcactttggaaccacaagcttggctcacaaaaagagctttctgggttgtaggcccagactagacttgcagcatgcatgctctgtgttcactaggggttggctgtttgggattttagttaaacgtgtctgtgaatttttatgtaactaactcctttccattcccctgggtgtctcatgctgctctttgactgtttcagcttgaacatgcattttctaaagcaaactgcactagtgtatatatcagggacattaaagtctgggactggggctcaatagctgcggatacagtgttcaaagaagttcttgtttctaaactgattagaacttctagctaatgctcaggtgagatcatagcttaaatacattgaaaaaactaaagtaccacaatagctgtatttttcccaatccccttaacgatcataaaagaggcaagttaagtatttctggcactgaagaaatatcttttttctttgattcatttttgaataaatataaaatgaataactattaaggtagaaaatattctcagaacattctagaggaggtaaaggttagtaggagggcgttggccatctctacattttgtgaggtgagagaaaactaatgtttactttctgctgtgaactgaactgcagctatagaatgtttcaaatgcttaaatatataatacatttttttccatggaagtgagggaatatttcagtttcctgaagtatgacacaaatactcatatactgtcttttagagtcagtatagttggagctgttttcatttagtgctttgataatgatttacttatttttccaaatttcgtttgaattttctttcatatgattgcattgatctatgcagcatttaccagaaaagagtattcctgggatagcagaatgcataacactgagtgttaattcttgtgaaataaataagctagactgccttctctttaattagacatattttaaagtatttattatagttgtcaactagtaactcaatgaaaaagttgatgcccaagggagaaatgagaattagcttaattgctgcctttaatgtgtttttgaggaacttaaaattttctttcatgtcgctgatccatattaccaagttcaaataaaatttttataatcggattcagacccataaccaaacta

SEQ ID NO: 14126 - DNA, 2461 bp, Homo sapiens
ctcttaaaccaaatgccatttaaatgaccacagactaaatacaaagtaggtaaatgcttacagggaaaggggaaagtggatcaaggtagaaaaaagacaatttgttttaaacactcttaatacaacttgttctctctccccttaaacatgtttaaaacaacgtaaagcacagatgattgtctgaaagaaaaagaaatcatttgcacagcccctgttttccagcttggtgccctttgatgggtggtgagtggtagcgatgtggcccagtgagacggcacagtcgctcttcctgcaggtcagaatcttcctaggctgttgctcttccaaggtactctgagtcctgcgatggtggcctggggttttgtttcctaagaagtagttgccattattttgattcatcctactgttctaaccaaaacaaaaaccaaaaaactccaaatggtaacagatattcatatacccggacacccaagtcagtgagtgtcacgtggcttccagatttgcatctgtgctgcagtagtctttcttcctggcaggtgtacttttgcatgtgatgggagatgccctggggtccgtggttgtggtcatcacggccatcatattctatgtgcttcccctgaagagtgaggacccgtgtaactggcagtgttacattgaccccagcctgactgtcctcatggtcatcatcattttgtcatctgccttcccgcttatcaaggagaccgctgccattctgctacagatggtcccaaaaggagtcaacatggaagagctgatgagtaaactctctgctgtgcctggaattagcagtgtacatgaagtgcacatctgggaacttgtaagtggaaagattattgccaccctgcacatcaagtatcctaaggacaggggatatcaagatgccagcacaaaaattcgagaaatcttccaccatgcgggaatccacaatgtgaccatccagtttgaaaatgtggacttgaaggaacccctggagcagaaggacttactgttgctctgcaactcaccctgcatctccaagggctgtgctaagcagctgtgttgtccccccggggcactgcctctggctcacgtcaatggctgtgctgagcacaatggtgggccctctctagacacatacggaagtgatggcctcagtagaagagacgcaagagaagtggctattgaagtgtctttggatagctgtctgagtgaccacggacaaagtcttaacaaaactcaggaggaccaatgttatgtcaacagaacgcatttttaatctggtactcacataatcagaccatatagacgaggcactttggaaccacaagcttggctcacaaaaagagctttctgggttgtaggcccagactagacttgcagcatgcatgctctgtgttcactaggggttggctgtttgggattttagttaaacgtgtctgtgaatttttatgtaactaactcctttccattcccctgggtgtctcatgctgctctttgactgtttcagcttgaacatgcattttctaaagcaaactgcactagtgtatatatcagggacattaaagtctgggactggggctcaatagctgcggatacagtgttcaaagaagttcttgtttctaaactgattagaacttctagctaatgctcaggtgagatcatagcttaaatacattgaaaaaactaaagtaccacaatagctgtatttttcccaatccccttaacgatcataaaagaggcaagttaagtatttctggcactgaagaaatatcttttttctttgattcatttttgaataaatataaaatgaataactattaaggtagaaaatattctcagaacattctagaggaggtaaaggttagtaggagggcgttggccatctctacattttgtgaggtgagagaaaactaatgtttactttctgctgtgaactgaactgcagctatagaatgtttcaaatgcttaaatatataatacatttttttccatggaagtgagggaatatttcagtttcctgaagtatgacacaaatactcatatactgtcttttagagtcagtatagttggagctgttttcatttagtgctttgataatgatttacttatttttccaaatttcgtttgaattttctttcatatgattgcattgatctatgcagcatttaccagaaaagagtattcctgggatagcagaatgcataacactgagtgttaattcttgtgaaataaataagctagactgccttctctttaattagacatattttaaagtatttattatagttgtcaactagtaactcaatgaaaaagttgatgcccaagggagaaatgagaattagcttaattgctgcctttaatgtgtttttgaggaacttaaaattttctttcatgtcgctgatccatattaccaagttcaaataaaatttttataatcggattcagacccataaccaaacta

SEQ ID NO: 14127 - DNA, 273221 bp, Homo sapiens; identical to SEQ ID NO: 1265

SEQ ID NO: 14128 - DNA, 1902 bp, Homo sapiens
cttcaatgttcttaactatgtcatcttcttggactgctgttactgcgcagcacccaagccccagggagacatggaagcaggtgattccttcaacacccagaatgagccagaagacatgatgaaaaaagagaaaaagtctgaagctctgaatatcagaggtgtacttttgcatgtgatgggagatgccctggggtccgtggttgtggtcatcacggccatcatattctatgtgcttcccctgaagagtgaggacccgtgtaactggcagtgttacattgaccccagcctgactgtcctcatggtcatcatcattttgtcatctgccttcccgcttatcaaggagaccgctgccattctgctacagatggtcccaaaaggagtcaacatggaagagctgatctggtaacaaatagttaatggactgacactggtatgcagaccaaggctttgagtggcactgcgtgcatggaaaagagaagagaatcaaggacggagccctggggcactctgacctttggagatctggcagctgggggaggagccaacaaaaaagctggaggaagagcagccatgagtccagcctgaggaatgcctgctcaactggtttgatcattttgactgaaacaagcggtcatttcatgtcctatgggatgcttgctgaggacattaaacacagaaacaagtagaacatgaattcagagtgaaggagatgttaaagggatggagaaatggagaaagagagttgaaataactctcctattaccatcaagcaaatcaaacacagaatgggaccagcatgccacattccctctgtgaagccttggagtgcaactgcattagctcaatggtgcatttcacaacgtcacaacttcatctcagatcatcacaaattgtccatattgaaacctgggtgcaatgagaataatcacttaaattttctctggtcccacttttctgctttacagtggtagttgagaatgtcatacccctaaggacatggggaagatgtgtccttgactgattgatccctgtgacacagtctgacactttgcttttgttcagcaattctcaaagcactggattgcaatgatgccctgttgacagcactgttcaaaagtcgacctgttgttgctggaacctccaagaatacagtgtttgatctcagccaggatcctgtcttggaagaggagagggaatcccaaaaactacttgtgaagaagatcccattgttcaatcaaatcctcgtcactgtagcaatccatgcatgccattgcagttggcattctgacacgtgtacacagtgttttcatctcttccctggagttgcagccaaagcctgagattcctttcgacacgaccctgaaaaaactctgggtttgtgctcccctctgctctgcaataacataccagctctgtgatgtggccaatgtttacctagttggtgggaggactttttaatatcaaaaggaaaacatttcttctgcattccacatagaatctgccaaggacattcccaaagatctacttacttattagagaaaccaagagagtcccagcagcacagagggatcgagaagactgagaacagaactggagaacaaaagtgaagtggtggcaaagtgctggaccagatgttagaagtctccaatttgctctcgacaacaacaatccacaagtaaccctgagaaaagtcatctctgtttccccactggtaaataatggtaagaaaaatagtgcctagtggggcttacgtagaggactgggaagctgaactgtgaaaaatgattccaaggtttctggtcaccatggctactactcttttgtacccagttctttgctcctcaaggagccttgttttctatacttgtgaatatttcaaccaactaataaagatttaatggc

SEQ ID NO: 14129 - DNA, 4523 bp, Homo sapiens
agtcagccgactacagagaagggtaatcgggtgtccccggcgccgcccggggccctgagggctggctagggtccaggccgggggggacgggacagacgaaccagccccgtgtaggaagcgcgacaatgccccgctacggagcgtcactccgccagagctgccccaggtccggccgggagcagggacaagacgggaccgccggagcccccggactcctttggatgggcctggtgctggcgctggcgctggcgctggcgctggcgctggctctgtctgactctcgggttctctgggctccggcagaggctcaccctctttctccccaaggccatcctgccaggttacatcgcatagtgccccggctccgagatgtctttgggtgggggaacctcacctgcccaatctgcaaaggtctattcaccgccatcaacctcgggctgaaggtgagcactgaaggggctgcagtggaggaggccgaaaggagtgctggggctgggggctggggctgatgctggtgcgctgggctcagaatgcatccctgatggagagggtggcatctacaatccatcactgagtttgctcccctttggggacacccatggctacatgccaccatcaccccattgtgacctttgtgaagtaagaaaataatgcagacagtgcctgaggaagtcagcttgccaagcaaaggcctcatgccacaggccgctgagctaaagaagaagcgatggcctggtgctgcctgagttacagggcaatatctggaaggcaaaggtgtgcactgagcttggtgcactgagtcctgcccagccccagtttggaaatggaggcccaaggggtggtggccaggggttggcctggttcctctgctctgcctctgatttctcaccatgcgctcctcccactgcagaaggaacccaatgtggctcgcgtgggctccgtggccatcaagctgtgcaatctgctgaagatagcaccacctgccgtgtgccaatccattgtccacctctttgaggatgacatggtggaggtgtggagacgctcagtgctgagcccatctgaggcctgtggcctgctcctgggctccacctgtgggcactgggacattttctcatcttggaacatctctttgcctactgtgccgaagccgccccccaaaccccctagccccccagccccaggtgcccctgtcagccgcatcctcttcctcactgacctgcactgggatcatgactacctggagggcacggaccctgactgtgcagacccactgtgctgccgccggggttctggcctgccgcccgcatcccggccaggtgccggatactggggcgaatacagcaagtgtgacctgcccctgaggaccctggagagcctgttgagtgggctgggcccagccggcccttttgatatggtgtactggacaggagacatccccgcacatgatgtctggcaccagactcgtcaggaccaactgcgggccctgaccaccgtcacagcacttgtgaggaagttcctggggccagtgccagtgtaccctgctgtgggtaaccatgaaagcacacctgtcaatagcttccctccccccttcattgagggcaaccactcctcccgctggctctatgaagcgatggccaaggcttgggagccctggctgcctgccgaagccctgcgcaccctcaggtacttatcgtccgtggaaacccaggaagggaaaagaaaggtgaatgaaagtgaagggagaagggaacctggggcattgtctctgattgctctagcatgagtccttagtgctcttcatttggctcccctaatctgactcctccttccctttctactgttttgccgcaccaggctttttttttttttttttttttagtttagtttttgtagagacaagatcttgctatgttgcccaggctggtctcaaacacctaacctcaagcaatcctcccgcctcggcctcccaaaatgctgggaccacaggcatcagctactgctcctggccctccctttttttttttttttttttttttttttttgagatggaatcttgctctgttgcccaggctggagtgcagtggcaccatctcagctcactacagcctccacctcctgggttcaagcaattctgcctcagcctcccaagtacctgggactacaggtgcacgccaccacacccagctaatttttgtatttttagtagagatggggtttcaccatgttggccaagatggtcttgatctcctgacctcatgatctgcccacctcggcctcccaaagtgctgggattacaggcatgaaccactgcacccagctttccagccctccctttctactcttatctccagccaccctccttcaaaggtctggcagcataacctctctatgccccagctgtgtctttgctcatgttggccctctggaaatgatttcccccttttttttaagtgctccagtttttcccaccttatccatcccatgtcatcttccctctgtgtggtccttgcttcccattctagctaactcttatccctcccccatactcctggagccctctgccctcagagtcttttgtgtcacacagacccaataattagaactgtttggtctctggctagactgtgagctccttgcaggtggggaagatgtcatgtatgcttttaccctccacccaaatgcccagcacaggaggaccaggattggaacaagtgttgacctctcatgtttactttgtttcagaattggggggttctatgctctttccccataccccggtctccgcctcatctctctcaatatgaatttttgttcccgtgagaacttctggctcttgatcaactccacggatcccgcaggacagctccagtggctggtgggggagcttcaggctgctgaggatcgaggagacaaagtgagggccagtagtgggaacacggtggtgctgggggacaagcaggctcctgttgagctggagcacctctgggcacagaagttttattttcctggcattcccaacaagtgttccctggggattcagctcatggtcactgttgaaagccttcattcagtccccctttctctagccagggctgcctggacccctggatgccctgattaccatccttaattctccctactaggtgcatataattggccacattcccccagggcactgtctgaagagctggagctggaattattaccgaattgtagccaggtaggacggagatgagggtgggaatagggacagggtgagtgtctgaaggctgaaaattcccttgagcatctcaccatccctgttgtcccatggagtggggaggctcctcactagaacaggttggagaaagagggcatcctatctccccagatgtcttcctacccctccctagaatcttctgaatgtagtaccttctggccaggtatgagaacaccctggctgctcagttctttggccacactcatgtggatgaatttgaggtcttctatgatgaagagactctgagccggccgctggctgtagccttcctggcacccagtgcaactacctacatcggccttaatcctggtgagtgaggcagaagggagcctcccttatcctggagttggtgggataggggaaggaggttggagccagagcctgcaaagcatgggcaggatgtgtggcccctccctggagttacccttgctccttgcccctccagtcagccccacatccttgcaggttaccgtgtgtaccaaatagatggaaactactccgggagctctcacgtggtcctggaccatgagacctacatcctgaatctgacccaggcaaacataccgggagccataccgcactggcagcttctctacagggctcgagaaacctatgggctgcccaacacactgcctaccgcctggcacaacctggtatatcgcatgcggggcgacatgcaacttttccagaccttctggtttctctaccataagggccacccaccctcggagccctgtggcacgccctgccgtctggctactctttgtgcccagctctctgcccgtgctgacagccctgctctgtgccgccacctgatgccagatgggagcctcccagaggcccagagcctgtggccaaggccactgttttgctagggccccagggcccacatttgggaaagttcttgatgtaggaaagggtgaaaaagcccaaatgctgctgtggttcaaccaggcaagatcatccggtgaaagaaccagtccctgggccccaaggatgccggggaaacaggaccttctcctttcctggagctggtttagctggatatgggagggggtttggctgcctgtgcccaggagctagactgccttgaggctgctgtcctttcacagccatggagtagaggcctaagttgacactgccctgggcagacaagacaggagctgtcgccccaggcctgtgctgcccagccaggaaccctgtactgctgctgcgacctgatgctgccagtctgttaaaataaagataagagacttggactcca

SEQ ID NO: 14130 - DNA, 2410 bp, Homo sapiens
agtcagccgactacagagaagggtaatcgggtgtccccggcgccgcccggggccctgagggctggctagggtccaggccgggggggacgggacagacgaaccagccccgtgtaggaagcgcgacaatgccccgctacggagcgtcactccgccagagctgccccaggtccggccgggagcagggacaagacgggaccgccggagcccccggactcctttggatgggcctggtgctggcgctggcgctggcgctggcgctggcgctggctctgtctgactctcgggttctctgggctccggcagaggctcaccctctttctccccaaggccatcctgccaggttacatcgcatagtgccccggctccgagatgtctttgggtgggggaacctcacctgcccaatctgcaaaggtctattcaccgccatcaacctcgggctgaagaaggaacccaatgtggctcgcgtgggctccgtggccatcaagctgtgcaatctgctgaagatagcaccacctgccgtgtgccaatccattgtccacctctttgaggatgacatggtggaggtgtggagacgctcagtgctgagcccatctgaggcctgtggcctgctcctgggctccacctgtgggcactgggacattttctcatcttggaacatctctttgcctactgtgccgaagccgccccccaaaccccctagccccccagccccaggtgcccctgtcagccgcatcctcttcctcactgacctgcactgggatcatgactacctggagggcacggaccctgactgtgcagacccactgtgctgccgccggggttctggcctgccgcccgcatcccggccaggtgccggatactggggcgaatacagcaagtgtgacctgcccctgaggaccctggagagcctgttgagtgggctgggcccagccggcccttttgatatggtgtactggacaggagacatccccgcacatgatgtctggcaccagactcgtcaggaccaactgcgggccctgaccaccgtcacagcacttgtgaggaagttcctggggccagtgccagtgtaccctgctgtgggtaaccatgaaagcacacctgtcaatagcttccctccccccttcattgagggcaaccactcctcccgctggctctatgaagcgatggccaaggcttgggagccctggctgcctgccgaagccctgcgcaccctcagaattggggggttctatgctctttccccataccccggtctccgcctcatctctctcaatatgaatttttgttcccgtgagaacttctggctcttgatcaactccacggatcccgcaggacagctccagtggctggtgggggagcttcaggctgctgaggatcgaggagacaaagtgcatataattggccacattcccccagggcactgtctgaagagctggagctggaattattaccgaattgtagccaggtatgagaacaccctggctgctcagttctttggccacactcatgtggatgaatttgaggtcttctatgatgaagagactctgagccggccgctggctgtagccttcctggcacccagtgcaactacctacatcggccttaatcctggttaccgtgtgtaccaaatagatggaaactactccgggagctctcacgtggtcctggaccatgagacctacatcctgaatctgacccaggcaaacataccgggagccataccgcactggcagcttctctacagggctcgagaaacctatgggctgcccaacacactgcctaccgcctggcacaacctggtatatcgcatgcggggcgacatgcaacttttccagaccttctggtttctctaccataagggccacccaccctcggagccctgtggcacgccctgccgtctggctactctttgtgcccagctctctgcccgtgctgacagccctgctctgtgccgccacctgatgccagatgggagcctcccagaggcccagagcctgtggccaaggccactgttttgctagggccccagggcccacatttgggaaagttcttgatgtaggaaagggtgaaaaagcccaaatgctgctgtggttcaaccaggcaagatcatccggtgaaagaaccagtccctgggccccaaggatgccggggaaacaggaccttctcctttcctggagctggtttagctggatatgggagggggtttggctgcctgtgcccaggagctagactgccttgaggctgctgtcctttcacagccatggagtagaggcctaagttgacactgccctgggcagacaagacaggagctgtcgccccaggcctgtgctgcccagccaggaaccctgtactgctgctgcgacctgatgctgccagtctgttaaaataaagataagagacttggactcca

SEQ ID NO: 14131 - DNA, 3122 bp, Homo sapiens
cttttgatatggtgtactggacaggagacatccccgcacatgatgtctggcaccagactcgtcaggaccaactgcgggccctgaccaccgtcacagcacttgtgaggaagttcctggggccagtgccagtgtaccctgctgtgggtaaccatgaaagcacacctgtcaatagcttccctccccccttcattgagggcaaccactcctcccgctggctctatgaagcgatggccaaggcttgggagccctggctgcctgccgaagccctgcgcaccctcaggtacttatcgtccgtggaaacccaggaagggaaaagaaaggtgaatgaaagtgaagggagaagggaacctggggcattgtctctgattgctctagcatgagtccttagtgctcttcatttggctcccctaatctgactcctccttccctttctactgttttgccgcaccaggctttttttttttttttttttttagtttagtttttgtagagacaagatcttgctatgttgcccaggctggtctcaaacacctaacctcaagcaatcctcccgcctcggcctcccaaaatgctgggaccacaggcatcagctactgctcctggccctccctttttttttttttttttttttttttttttgagatggaatcttgctctgttgcccaggctggagtgcagtggcaccatctcagctcactacagcctccacctcctgggttcaagcaattctgcctcagcctcccaagtacctgggactacaggtgcacgccaccacacccagctaatttttgtatttttagtagagatggggtttcaccatgttggccaagatggtcttgatctcctgacctcatgatctgcccacctcggcctcccaaagtgctgggattacaggcatgaaccactgcacccagctttccagccctccctttctactcttatctccagccaccctccttcaaaggtctggcagcataacctctctatgccccagctgtgtctttgctcatgttggccctctggaaatgatttcccccttttttttaagtgctccagtttttcccaccttatccatcccatgtcatcttccctctgtgtggtccttgcttcccattctagctaactcttatccctcccccatactcctggagccctctgccctcagagtcttttgtgtcacacagacccaataattagaactgtttggtctctggctagactgtgagctccttgcaggtggggaagatgtcatgtatgcttttaccctccacccaaatgcccagcacaggaggaccaggattggaacaagtgttgacctctcatgtttactttgtttcagaattggggggttctatgctctttccccataccccggtctccgcctcatctctctcaatatgaatttttgttcccgtgagaacttctggctcttgatcaactccacggatcccgcaggacagctccagtggctggtgggggagcttcaggctgctgaggatcgaggagacaaagtgagggccagtagtgggaacacggtggtgctgggggacaagcaggctcctgttgagctggagcacctctgggcacagaagttttattttcctggcattcccaacaagtgttccctggggattcagctcatggtcactgttgaaagccttcattcagtccccctttctctagccagggctgcctggacccctggatgccctgattaccatccttaattctccctactaggtgcatataattggccacattcccccagggcactgtctgaagagctggagctggaattattaccgaattgtagccaggtaggacggagatgagggtgggaatagggacagggtgagtgtctgaaggctgaaaattcccttgagcatctcaccatccctgttgtcccatggagtggggaggctcctcactagaacaggttggagaaagagggcatcctatctccccagatgtcttcctacccctccctagaatcttctgaatgtagtaccttctggccaggtatgagaacaccctggctgctcagttctttggccacactcatgtggatgaatttgaggtcttctatgatgaagagactctgagccggccgctggctgtagccttcctggcacccagtgcaactacctacatcggccttaatcctggtgagtgaggcagaagggagcctcccttatcctggagttggtgggataggggaaggaggttggagccagagcctgcaaagcatgggcaggatgtgtggcccctccctggagttacccttgctccttgcccctccagtcagccccacatccttgcaggttaccgtgtgtaccaaatagatggaaactactccgggagctctcacgtggtcctggaccatgagacctacatcctgaatctgacccaggcaaacataccgggagccataccgcactggcagcttctctacagggctcgagaaacctatgggctgcccaacacactgcctaccgcctggcacaacctggtatatcgcatgcggggcgacatgcaacttttccagaccttctggtttctctaccataagggccacccaccctcggagccctgtggcacgccctgccgtctggctactctttgtgcccagctctctgcccgtgctgacagccctgctctgtgccgccacctgatgccagatgggagcctcccagaggcccagagcctgtggccaaggccactgttttgctagggccccagggcccacatttgggaaagttcttgatgtaggaaagggtgaaaaagcccaaatgctgctgtggttcaaccaggcaagatcatccggtgaaagaaccagtccctgggccccaaggatgccggggaaacaggaccttctcctttcctggagctggtttagctggatatgggagggggtttggctgcctgtgcccaggagctagactgccttgaggctgctgtcctttcacagccatggagtagaggcctaagttgacactgccctgggcagacaagacaggagctgtcgccccaggcctgtgctgcccagccaggaaccctgtactgctgctgcgacctgatgctgccagtctgttaaaataaagataagagacttggactccaga

SEQ ID NO: 14132 - DNA, 1344 bp, Homo sapiens
cttttgatatggtgtactggacaggagacatccccgcacatgatgtctggcaccagactcgtcaggaccaactgcgggccctgaccaccgtcacagcacttgtgaggaagttcctggggccagtgccagtgtaccctgctgtgggtaaccatgaaagcacacctgtcaatagcttccctccccccttcattgagggcaaccactcctcccgctggctctatgaagcgatggccaaggcttgggagccctggctgcctgccgaagccctgcgcaccctcaggtacttatcgtccgtggaaacccaggaagggaaaagaaaggtgcatataattggccacattcccccagggcactgtctgaagagctggagctggaattattaccgaattgtagccaggtatgagaacaccctggctgctcagttctttggccacactcatgtggatgaatttgaggtcttctatgatgaagagactctgagccggccgctggctgtagccttcctggcacccagtgcaactacctacatcggccttaatcctggttaccgtgtgtaccaaatagatggaaactactccgggagctctcacgtggtcctggaccatgagacctacatcctgaatctgacccaggcaaacataccgggagccataccgcactggcagcttctctacagggctcgagaaacctatgggctgcccaacacactgcctaccgcctggcacaacctggtatatcgcatgcggggcgacatgcaacttttccagaccttctggtttctctaccataagggccacccaccctcggagccctgtggcacgccctgccgtctggctactctttgtgcccagctctctgcccgtgctgacagccctgctctgtgccgccacctgatgccagatgggagcctcccagaggcccagagcctgtggccaaggccactgttttgctagggccccagggcccacatttgggaaagttcttgatgtaggaaagggtgaaaaagcccaaatgctgctgtggttcaaccaggcaagatcatccggtgaaagaaccagtccctgggccccaaggatgccggggaaacaggaccttctcctttcctggagctggtttagctggatatgggagggggtttggctgcctgtgcccaggagctagactgccttgaggctgctgtcctttcacagccatggagtagaggcctaagttgacactgccctgggcagacaagacaggagctgtcgccccaggcctgtgctgcccagccaggaaccctgtactgctgctgcgacctgatgctgccagtctgttaaaataaagataagagacttggactccaga

SEQ ID NO: 14133 - DNA, 4304 bp, Homo sapiens
gtcagccgactacagagaagggtaatcgggtgtccccggcgccgcccggggccctgagggctggctagggtccaggccgggggggacgggacagacgaaccagccccgtgtaggaagcgcgacaatgccccgctacggagcgtcactccgccagagctgccccaggtccggccgggagcagggacaagacgggaccgccggagcccccggactcctttggatgggcctggtgctggcgctggcgctggcgctggcgctggcgctggctctgtctgactctcgggttctctgggctccggcagaggctcaccctctttctccccaaggccatcctgccaggttacatcgcatagtgccccggctccgagatgtctttgggtgggggaacctcacctgcccaatctgcaaaggtctattcaccgccatcaacctcgggctgaaggtgagcactgaaggggctgcagtggaggaggccgaaaggagtgctggggctgggggctggggctgatgctggtgcgctgggctcagaatgcatccctgatggagagggtggcatctacaatccatcactgagtttgctcccctttggggacacccatggctacatgccaccatcaccccattgtgacctttgtgaagtaagaaaataatgcagacagtgcctgaggaagtcagcttgccaagcaaaggcctcatgccacaggccgctgagctaaagaagaagcgatggcctggtgctgcctgagttacagggcaatatctggaaggcaaaggtgtgcactgagcttggtgcactgagtcctgcccagccccagtttggaaatggaggcccaaggggtggtggccaggggttggcctggttcctctgctctgcctctgatttctcaccatgcgctcctcccactgcagaaggaacccaatgtggctcgcgtgggctccgtggccatcaagctgtgcaatctgctgaagatagcaccacctgccgtgtgccaatccattgtccacctctttgaggatgacatggtggaggtgtggagacgctcagtgctgagcccatctgaggcctgtggcctgctcctgggctccacctgtgggcactgggacattttctcatcttggaacatctctttgcctactgtgccgaagccgccccccaaaccccctagccccccagccccaggtgcccctgtcagccgcatcctcttcctcactgacctgcactgggatcatgactacctggagggcacggaccctgactgtgcagacccactgtgctgccgccggggttctggcctgccgcccgcatcccggccaggtgccggatactggggcgaatacagcaagtgtgacctgcccctgaggaccctggagagcctgttgagtgggctgggcccagccggcccttttgatatggtgtactggacaggagacatccccgcacatgatgtctggcaccagactcgtcaggaccaactgcgggccctgaccaccgtcacagcacttgtgaggaagttcctggggccagtgccagtgtaccctgctgtgggtaaccatgaaagcacacctgtcaatagcttccctccccccttcattgagggcaaccactcctcccgctggctctatgaagcgatggccaaggcttgggagccctggctgcctgccgaagccctgcgcaccctcaggtacttatcgtccgtggaaacccaggaagggaaaagaaaggtgaatgaaagtgaagggagaagggaacctggggcattgtctctgattgctctagcatgagtccttagtgctcttcatttggctcccctaatctgactcctccttccctttctactgttttgccgcaccaggctttttttttttttttttttttagtttagtttttgtagagacaagatcttgctatgttgcccaggctggtctcaaacacctaacctcaagcaatcctcccgcctcggcctcccaaaatgctgggaccacaggcatcagctactgctcctggccctccctttttttttttttttttttttttttttttgagatggaatcttgctctgttgcccaggctggagtgcagtggcaccatctcagctcactacagcctccacctcctgggttcaagcaattctgcctcagcctcccaagtacctgggactacaggtgcacgccaccacacccagctaatttttgtatttttagtagagatggggtttcaccatgttggccaagatggtcttgatctcctgacctcatgatctgcccacctcggcctcccaaagtgctgggattacaggcatgaaccactgcacccagctttccagccctccctttctactcttatctccagccaccctccttcaaaggtctggcagcataacctctctatgccccagctgtgtctttgctcatgttggccctctggaaatgatttcccccttttttttaagtgctccagtttttcccaccttatccatcccatgtcatcttccctctgtgtggtccttgcttcccattctagctaactcttatccctcccccatactcctggagccctctgccctcagagtcttttgtgtcacacagacccaataattagaactgtttggtctctggctagactgtgagctccttgcaggtggggaagatgtcatgtatgcttttaccctccacccaaatgcccagcacaggaggaccaggattggaacaagtgttgacctctcatgtttactttgtttcagaattggggggttctatgctctttccccataccccggtctccgcctcatctctctcaatatgaatttttgttcccgtgagaacttctggctcttgatcaactccacggatcccgcaggacagctccagtggctggtgggggagcttcaggctgctgaggatcgaggagacaaagtgagggccagtagtgggaacacggtggtgctgggggacaagcaggctcctgttgagctggagcacctctgggcacagaagttttattttcctggcattcccaacaagtgttccctggggattcagctcatggtcactgttgaaagccttcattcagtccccctttctctagccagggctgcctggacccctggatgccctgattaccatccttaattctccctactaggtgcatataattggccacattcccccagggcactgtctgaagagctggagctggaattattaccgaattgtagccaggtaggacggagatgagggtgggaatagggacagggtgagtgtctgaaggctgaaaattcccttgagcatctcaccatccctgttgtcccatggagtggggaggctcctcactagaacaggttggagaaagagggcatcctatctccccagatgtcttcctacccctccctagaatcttctgaatgtagtaccttctggccaggtatgagaacaccctggctgctcagttctttggccacactcatgtggatgaatttgaggtcttctatgatgaagagactctgagccggccgctggctgtagccttcctggcacccagtgcaactacctacatcggccttaatcctggtgagtgaggcagaagggagcctcccttatcctggagttggtgggataggggaaggaggttggagccagagcctgcaaagcatgggcaggatgtgtggcccctccctggagttacccttgctccttgcccctccagtcagccccacatccttgcaggttaccgtgtgtaccaaatagatggaaactactccgggagctctcacgtggtcctggaccatgagacctacatcctgaatctgacccaggcaaacataccgggagccataccgcactggcagcttctctacagggctcgagaaacctatgggctgcccaacacactgcctaccgcctggcacaacctggtatatcgcatgcggggcgacatgcaacttttccagaccttctggtttctctaccataagggccacccaccctcggagccctgtggcacgccctgccgtctggctactctttgtgcccagctctctgcccgtgctgacagccctgctctgtgccgccacctgatgccagatgggagcctcccagaggcccagagcctgtggccaaggccactgttttgctagggccccagggcccacatttgggaaagttcttgatgtaggaaagggtgaaaaagcccaaatgctgctgtggttcaaccaggcaagatcatccggtgaaagaaccagtccctgggccccaaggatgccggggaaacaggaccttctcctttcctggagctggtttagctggat

SEQ ID NO: 14134 - DNA, 2188 bp, Homo sapiens
gtcagccgactacagagaagggtaatcgggtgtccccggcgccgcccggggccctgagggctggctagggtccaggccgggggggacgggacagacgaaccagccccgtgtaggaagcgcgacaatgccccgctacggagcgtcactccgccagagctgccccaggtccggccgggagcagggacaagacgggaccgccggagcccccggactcctttggatgggcctggtgctggcgctggcgctggcgctggcgctggcgctggctctgtctgactctcgggttctctgggctccggcagaggctcaccctctttctccccaaggccatcctgccaggttacatcgcatagtgccccggctccgagatgtctttgggtgggggaacctcacctgcccaatctgcaaaggtctattcaccgccatcaacctcgggctgaaggaacccaatgtggctcgcgtgggctccgtggccatcaagctgtgcaatctgctgaagatagcaccacctgccgtgtgccaatccattgtccacctctttgaggatgacatggtggaggtgtggagacgctcagtgctgagcccatctgaggcctgtggcctgctcctgggctccacctgtgggcactgggacattttctcatcttggaacatctctttgcctactgtgccgaagccgccccccaaaccccctagccccccagccccaggtgcccctgtcagccgcatcctcttcctcactgacctgcactgggatcatgactacctggagggcacggaccctgactgtgcagacccactgtgctgccgccggggttctggcctgccgcccgcatcccggccaggtgccggatactggggcgaatacagcaagtgtgacctgcccctgaggaccctggagagcctgttgagtgggctgggcccagccggcccttttgatatggtgtactggacaggagacatccccgcacatgatgtctggcaccagactcgtcaggaccaactgcgggccctgaccaccgtcacagcacttgtgaggaagttcctggggccagtgccagtgtaccctgctgtgggtaaccatgaaagcacacctgtcaatagcttccctccccccttcattgagggcaaccactcctcccgctggctctatgaagcgatggccaaggcttgggagccctggctgcctgccgaagccctgcgcaccctcagaattggggggttctatgctctttccccataccccggtctccgcctcatctctctcaatatgaatttttgttcccgtgagaacttctggctcttgatcaactccacggatcccgcaggacagctccagtggctggtgggggagcttcaggctgctgaggatcgaggagacaaagtgcatataattggccacattcccccagggcactgtctgaagagctggagctggaattattaccgaattgtagccaggtatgagaacaccctggctgctcagttctttggccacactcatgtggatgaatttgaggtcttctatgatgaagagactctgagccggccgctggctgtagccttcctggcacccagtgcaactacctacatcggccttaatcctggttaccgtgtgtaccaaatagatggaaactactccgggagctctcacgtggtcctggaccatgagacctacatcctgaatctgacccaggcaaacataccgggagccataccgcactggcagcttctctacagggctcgagaaacctatgggctgcccaacacactgcctaccgcctggcacaacctggtatatcgcatgcggggcgacatgcaacttttccagaccttctggtttctctaccataagggccacccaccctcggagccctgtggcacgccctgccgtctggctactctttgtgcccagctctctgcccgtgctgacagccctgctctgtgccgccacctgatgccagatgggagcctcccagaggcccagagcctgtggccaaggccactgttttgctagggccccagggcccacatttgggaaagttcttgatgtaggaaagggtgaaaaagcccaaatgctgctgtggttcaaccaggcaagatcatccggtgaaagaaccagtccctgggccccaaggatgccggggaaacaggaccttctcctttcctggagctggtttagctggat

SEQ ID NO: 14135 - DNA, 1597 bp, Homo sapiens
ggagctgctttgcggccggccgcggagcagtcagccgactacagagaagggtaatcgggtgtccccggcgccgcccggggccctgagggctggctagggtccaggccgggggggacgggacagacgaaccagccccgtgtaggaagcgcgacaatgccccgctacggagcgtcactccgccagagctgccccaggtccggccgggagcagggacaagacgggaccgccggagcccccggactcctttggatgggcctggtgctggcgctggcgctggcgctggcgctggcgctggctctgtctgactctcgggttctctgggctccggcagaggctcaccctctttctccccaaggccatcctgccaggttacatcgcatagtgccccggctccgagatgtctttgggtgggggaacctcacctgcccaatctgcaaaggtctattcaccgccatcaacctcgggctgaaggtgagcactgaaggggctgcagtggaggaggccgaaaggagtgctggggctgggggctggggctgatgctggtgcgctgggctcagaatgcatccctgatggagagggtggcatctacaatccatcactgagtttgctcccctttggggacacccatggctacatgccaccatcaccccattgtgacctttgtgaagtaagaaaataatgcagacagtgcctgaggaagtcagcttgccaagcaaaggcctcatgccacaggccgctgagctaaagaagaagcgatggcctggtgctgcctgagttacagggcaatatctggaaggcaaaggtgtgcactgagcttggtgcactgagtcctgcccagccccagtttggaaatggaggcccaaggggtggtggccaggggttggcctggttcctctgctctgcctctgatttctcaccatgcgctcctcccactgcagaaggaacccaatgtggctcgcgtgggctccgtggccatcaagctgtgcaatctgctgaagatagcaccacctgccgtgtgccaatccattgtccacctctttgaggatgacatggtggaggtgtggagacgctcagtgctgagcccatctgaggcctgtggcctgctcctgggctccacctgtgggcactgggacattttctcatcttggaacatctctttgcctactgtgccgaagccgccccccaaaccccctagccccccagccccaggtgcccctgtcagccgcatcctcttcctcactgacctgcactgggatcatgactacctggagggcacggaccctgactgtgcagacccactgtgctgccgccggggttctggcctgccgcccgcatcccggccaggtgccggatactggggcgaatacagcaagtgtgacctgcccctgaggaccctggagagcctgttgagtgggctgggcccagccggcccttttgatatggtgtactggacaggagacatccccgcacatgatgtctggcaccagactcgtcaggaccaactgcgggccctgaccaccgtcacagcacttgtgaggaagttcctggggccagtgccagtgtaccctgctgtgggtaaccatgaaagcacacctgt

SEQ ID NO: 14136 - DNA, 447 bp, Homo sapiens
ggagctgctttgcggccggccgcggagcagtcagccgactacagagaagggtaatcgggtgtccccggcgccgcccggggccctgagggctggctagggtccaggccgggggggacgggacagacgaaccagccccgtgtaggaagcgcgacaatgccccgctacggagcgtcactccgccagagctgccccaggtgccggatactggggcgaatacagcaagtgtgacctgcccctgaggaccctggagagcctgttgagtgggctgggcccagccggcccttttgatatggtgtactggacaggagacatccccgcacatgatgtctggcaccagactcgtcaggaccaactgcgggccctgaccaccgtcacagcacttgtgaggaagttcctggggccagtgccagtgtaccctgctgtgggtaaccatgaaagcacacctgt

SEQ ID NO: 14137 - DNA, 4197 bp, Homo sapiens
gtgtaggaagcgcgacaatgccccgctacggagcgtcactccgccagagctgccccaggtccggccgggagcagggacaagacgggaccgccggagcccccggactcctttggatgggcctggtgctggcgctggcgctggcgctggcgctggcgctggctctgtctgactctcgggttctctgggctccggcagaggctcaccctctttctccccaaggccatcctgccaggttacatcgcatagtgccccggctccgagatgtctttgggtgggggaacctcacctgcccaatctgcaaaggtctattcaccgccatcaacctcgggctgaaggtgagcactgaaggggctgcagtggaggaggccgaaaggagtgctggggctgggggctggggctgatgctggtgcgctgggctcagaatgcatccctgatggagagggtggcatctacaatccatcactgagtttgctcccctttggggacacccatggctacatgccaccatcaccccattgtgacctttgtgaagtaagaaaataatgcagacagtgcctgaggaagtcagcttgccaagcaaaggcctcatgccacaggccgctgagctaaagaagaagcgatggcctggtgctgcctgagttacagggcaatatctggaaggcaaaggtgtgcactgagcttggtgcactgagtcctgcccagccccagtttggaaatggaggcccaaggggtggtggccaggggttggcctggttcctctgctctgcctctgatttctcaccatgcgctcctcccactgcagaaggaacccaatgtggctcgcgtgggctccgtggccatcaagctgtgcaatctgctgaagatagcaccacctgccgtgtgccaatccattgtccacctctttgaggatgacatggtggaggtgtggagacgctcagtgctgagcccatctgaggcctgtggcctgctcctgggctccacctgtgggcactgggacattttctcatcttggaacatctctttgcctactgtgccgaagccgccccccaaaccccctagccccccagccccaggtgcccctgtcagccgcatcctcttcctcactgacctgcactgggatcatgactacctggagggcacggaccctgactgtgcagacccactgtgctgccgccggggttctggcctgccgcccgcatcccggccaggtgccggatactggggcgaatacagcaagtgtgacctgcccctgaggaccctggagagcctgttgagtgggctgggcccagccggcccttttgatatggtgtactggacaggagacatccccgcacatgatgtctggcaccagactcgtcaggaccaactgcgggccctgaccaccgtcacagcacttgtgaggaagttcctggggccagtgccagtgtaccctgctgtgggtaaccatgaaagcacacctgtcaatagcttccctccccccttcattgagggcaaccactcctcccgctggctctatgaagcgatggccaaggcttgggagccctggctgcctgccgaagccctgcgcaccctcaggtacttatcgtccgtggaaacccaggaagggaaaagaaaggtgaatgaaagtgaagggagaagggaacctggggcattgtctctgattgctctagcatgagtccttagtgctcttcatttggctcccctaatctgactcctccttccctttctactgttttgccgcaccaggctttttttttttttttttttttagtttagtttttgtagagacaagatcttgctatgttgcccaggctggtctcaaacacctaacctcaagcaatcctcccgcctcggcctcccaaaatgctgggaccacaggcatcagctactgctcctggccctccctttttttttttttttttttttttttttttgagatggaatcttgctctgttgcccaggctggagtgcagtggcaccatctcagctcactacagcctccacctcctgggttcaagcaattctgcctcagcctcccaagtacctgggactacaggtgcacgccaccacacccagctaatttttgtatttttagtagagatggggtttcaccatgttggccaagatggtcttgatctcctgacctcatgatctgcccacctcggcctcccaaagtgctgggattacaggcatgaaccactgcacccagctttccagccctccctttctactcttatctccagccaccctccttcaaaggtctggcagcataacctctctatgccccagctgtgtctttgctcatgttggccctctggaaatgatttcccccttttttttaagtgctccagtttttcccaccttatccatcccatgtcatcttccctctgtgtggtccttgcttcccattctagctaactcttatccctcccccatactcctggagccctctgccctcagagtcttttgtgtcacacagacccaataattagaactgtttggtctctggctagactgtgagctccttgcaggtggggaagatgtcatgtatgcttttaccctccacccaaatgcccagcacaggaggaccaggattggaacaagtgttgacctctcatgtttactttgtttcagaattggggggttctatgctctttccccataccccggtctccgcctcatctctctcaatatgaatttttgttcccgtgagaacttctggctcttgatcaactccacggatcccgcaggacagctccagtggctggtgggggagcttcaggctgctgaggatcgaggagacaaagtgagggccagtagtgggaacacggtggtgctgggggacaagcaggctcctgttgagctggagcacctctgggcacagaagttttattttcctggcattcccaacaagtgttccctggggattcagctcatggtcactgttgaaagccttcattcagtccccctttctctagccagggctgcctggacccctggatgccctgattaccatccttaattctccctactaggtgcatataattggccacattcccccagggcactgtctgaagagctggagctggaattattaccgaattgtagccaggtaggacggagatgagggtgggaatagggacagggtgagtgtctgaaggctgaaaattcccttgagcatctcaccatccctgttgtcccatggagtggggaggctcctcactagaacaggttggagaaagagggcatcctatctccccagatgtcttcctacccctccctagaatcttctgaatgtagtaccttctggccaggtatgagaacaccctggctgctcagttctttggccacactcatgtggatgaatttgaggtcttctatgatgaagagactctgagccggccgctggctgtagccttcctggcacccagtgcaactacctacatcggccttaatcctggtgagtgaggcagaagggagcctcccttatcctggagttggtgggataggggaaggaggttggagccagagcctgcaaagcatgggcaggatgtgtggcccctccctggagttacccttgctccttgcccctccagtcagccccacatccttgcaggttaccgtgtgtaccaaatagatggaaactactccgggagctctcacgtggtcctggaccatgagacctacatcctgaatctgacccaggcaaacataccgggagccataccgcactggcagcttctctacagggctcgagaaacctatgggctgcccaacacactgcctaccgcctggcacaacctggtatatcgcatgcggggcgacatgcaacttttccagaccttctggtttctctaccataagggccacccaccctcggagccctgtggcacgccctgccgtctggctactctttgtgcccagctctctgcccgtgctgacagccctgctctgtgccgccacctgatgccagatgggagcctcccagaggcccagagcctgtggccaaggccactgttttgctagggccccagggcccacatttgggaaagttcttgatgtaggaaagggtgaaaaagcccaaatgctgctgtggttcaaccaggcaagatcatccggtgaaagaaccagtccctgggccccaaggatgccggggaaacaggaccttctcctttcctggagctggtttagctggat

SEQ ID NO: 14138 - DNA, 1451 bp, Homo sapiens
gtgtaggaagcgcgacaatgccccgctacggagcgtcactccgccagagctgccccaggtccggccgggagcagggacaagacgggaccgccggagcccccggactcctttggatgggcctggtgctggcgctggcgctggcgctggcgctggcgctggctctgtctgactctcgggttctctgggctccggcagaggctcaccctctttctccccaaggccatcctgccaggttacatcgcatagtgccccggctccgagatgtctttgggtgggggaacctcacctgcccaatctgcaaaggtctattcaccgccatcaacctcgggctgaagaaggaacccaatgtggctcgcgtgggctccgtggccatcaagctgtgcaatctgctgaagatagcaccacctgccgtgtgccaatccattgtccacctctttgaggatgacatggtggagaattggggggttctatgctctttccccataccccggtctccgcctcatctctctcaatatgaatttttgttcccgtgagaacttctggctcttgatcaactccacggatcccgcaggacagctccagtggctggtgggggagcttcaggctgctgaggatcgaggagacaaagtgcatataattggccacattcccccagggcactgtctgaagagctggagctggaattattaccgaattgtagccaggtatgagaacaccctggctgctcagttctttggccacactcatgtggatgaatttgaggtcttctatgatgaagagactctgagccggccgctggctgtagccttcctggcacccagtgcaactacctacatcggccttaatcctgtcagccccacatccttgcaggttaccgtgtgtaccaaatagatggaaactactccgggagctctcacgtggtcctggaccatgagacctacatcctgaatctgacccaggcaaacataccgggagccataccgcactggcagcttctctacagggctcgagaaacctatgggctgcccaacacactgcctaccgcctggcacaacctggtatatcgcatgcggggcgacatgcaacttttccagaccttctggtttctctaccataagggccacccaccctcggagccctgtggcacgccctgccgtctggctactctttgtgcccagctctctgcccgtgctgacagccctgctctgtgccgccacctgatgccagatgggagcctcccagaggcccagagcctgtggccaaggccactgttttgctagggccccagggcccacatttgggaaagttcttgatgtaggaaagggtgaaaaagcccaaatgctgctgtggttcaaccaggcaagatcatccggtgaaagaaccagtccctgggccccaaggatgccggggaaacaggaccttctcctttcctggagctggtttagctggat

SEQ ID NO: 14139 - DNA, 1081 bp, Homo sapiens
agaacttctggctcttgatcaactccacggatcccgcaggacagctccagtggctggtgggggagcttcaggctgctgaggatcgaggagacaaagtgagggccagtagtgggaacacggtggtgctgggggacaagcaggctcctgttgagctggagcacctctgggcacagaagttttattttcctggcattcccaacaagtgttccctggggattcagctcatggtcactgttgaaagccttcattcagtccccctttctctagccagggctgcctggacccctggatgccctgattaccatccttaattctccctactaggtgcatataattggccacattcccccagggcactgtctgaagagctggagctggaattattaccgaattgtagccaggtaggacggagatgagggtgggaatagggacagggtgagtgtctgaaggctgaaaattcccttgagcatctcaccatccctgttgtcccatggagtggggaggctcctcactagaacaggttggagaaagagggcatcctatctccccagatgtcttcctacccctccctagaatcttctgaatgtagtaccttctggccaggtatgagaacaccctggctgctcagttctttggccacactcatgtggatgaatttgaggtcttctatgatgaagagactctgagccggccgctggctgtagccttcctggcacccagtgcaactacctacatcggccttaatcctggtgagtgaggcagaagggagcctcccttatcctggagttggtgggataggggaaggaggttggagccagagcctgcaaagcatgggcaggatgtgtggcccctccctggagttacccttgctccttgcccctccagtcagccccacatccttgcaggttaccgtgtgtaccaaatagatggaaactactccgggagctctcacgtggtcctggaccatgagacctacatcctgaatctgacccaggcaaacataccgggagccataccgcactggcagcttctctacagggctcgagaaacctatgggctgcccaacacactgcctaccgcc

SEQ ID NO: 14140 - DNA, 650 bp, Homo sapiens
agaacttctggctcttgatcaactccacggatcccgcaggacagctccagtggctggtgggggagcttcaggctgctgaggatcgaggagacaaagtgcatataattggccacattcccccagggcactgtctgaagagctggagctggaattattaccgaattgtagccaggtatgagaacaccctggctgctcagttctttggccacactcatgtggatgaatttgaggtcttctatgatgaagagactctgagccggccgctggctgtagccttcctggcacccagtgcaactacctacatcggccttaatcctggtgagtgaggcagaagggagcctcccttatcctggagttggtgggataggggaaggaggttggagccagagcctgcaaagcatgggcaggatgtgtggcccctccctggagttacccttgctccttgcccctccagtcagccccacatccttgcaggttaccgtgtgtaccaaatagatggaaactactccgggagctctcacgtggtcctggaccatgagacctacatcctgaatctgacccaggcaaacataccgggagccataccgcactggcagcttctctacagggctcgagaaacctatgggctgcccaacacactgcctaccgcc

SEQ ID NO: 14141 - DNA, 611 bp, Homo sapiens
tggtcactgttgaaagccttcattcagtccccctttctctagccagggctgcctggacccctggatgccctgattaccatccttaattctccctactaggtgcatataattggccacattcccccagggcactgtctgaagagctggagctggaattattaccgaattgtagccaggtaggacggagatgagggtgggaatagggacagggtgagtgtctgaaggctgaaaattcccttgagcatctcaccatccctgttgtcccatggagtggggaggctcctcactagaacaggttggagaaagagggcatcctatctccccagatgtcttcctacccctccctagaatcttctgaatgtagtaccttctggccaggtatgagaacaccctggctgctcagttctttggccacactcatgtggatgaatttgaggtcttctatgatgaagagactctgagccggccgctggctgtagccttcctggcacccagtgcaactacctacatcggccttaatcctggtgagtgaggcagaagggagcctcccttatcctggagttggtgggataggggaaggaggttggagccagagcctgcaaagcatgggc

SEQ ID NO: 14142 - DNA, 409 bp, Homo sapiens
tggtcactgttgaaagccttcattcagtccccctttctctagccagggctgcctggacccctggatgccctgattaccatccttaattctccctactaggtgcatataattggccacattcccccagggcactgtctgaagagctggagctggaattattaccgaattgtagccaggtatgagaacaccctggctgctcagttctttggccacactcatgtggatgaatttgaggtcttctatgatgaagagactctgagccggccgctggctgtagccttcctggcacccagtgcaactacctacatcggccttaatcctggtgagtgaggcagaagggagcctcccttatcctggagttggtgggataggggaaggaggttggagccagagcctgcaaagcatgggc

SEQ ID NO: 14143 - DNA, 4496 bp, Homo sapiens
ggtgtccccggcgccgcccggggccctgagggctggctagggtccaggccgggggggacgggacagacgaaccagccccgtgtaggaagcgcgacaatgccccgctacggagcgtcactccgccagagctgccccaggtccggccgggagcagggacaagacgggaccgccggagcccccggactcctttggatgggcctggtgctggcgctggcgctggcgctggcgctggcgctggctctgtctgactctcgggttctctgggctccggcagaggctcaccctctttctccccaaggccatcctgccaggttacatcgcatagtgccccggctccgagatgtctttgggtgggggaacctcacctgcccaatctgcaaaggtctattcaccgccatcaacctcgggctgaaggtgagcactgaaggggctgcagtggaggaggccgaaaggagtgctggggctgggggctggggctgatgctggtgcgctgggctcagaatgcatccctgatggagagggtggcatctacaatccatcactgagtttgctcccctttggggacacccatggctacatgccaccatcaccccattgtgacctttgtgaagtaagaaaataatgcagacagtgcctgaggaagtcagcttgccaagcaaaggcctcatgccacaggccgctgagctaaagaagaagcgatggcctggtgctgcctgagttacagggcaatatctggaaggcaaaggtgtgcactgagcttggtgcactgagtcctgcccagccccagtttggaaatggaggcccaaggggtggtggccaggggttggcctggttcctctgctctgcctctgatttctcaccatgcgctcctcccactgcagaaggaacccaatgtggctcgcgtgggctccgtggccatcaagctgtgcaatctgctgaagatagcaccacctgccgtgtgccaatccattgtccacctctttgaggatgacatggtggaggtgtggagacgctcagtgctgagcccatctgaggcctgtggcctgctcctgggctccacctgtgggcactgggacattttctcatcttggaacatctctttgcctactgtgccgaagccgccccccaaaccccctagccccccagccccaggtgcccctgtcagccgcatcctcttcctcactgacctgcactgggatcatgactacctggagggcacggaccctgactgtgcagacccactgtgctgccgccggggttctggcctgccgcccgcatcccggccaggtgccggatactggggcgaatacagcaagtgtgacctgcccctgaggaccctggagagcctgttgagtgggctgggcccagccggcccttttgatatggtgtactggacaggagacatccccgcacatgatgtctggcaccagactcgtcaggaccaactgcgggccctgaccaccgtcacagcacttgtgaggaagttcctggggccagtgccagtgtaccctgctgtgggtaaccatgaaagcacacctgtcaatagcttccctccccccttcattgagggcaaccactcctcccgctggctctatgaagcgatggccaaggcttgggagccctggctgcctgccgaagccctgcgcaccctcaggtacttatcgtccgtggaaacccaggaagggaaaagaaaggtgaatgaaagtgaagggagaagggaacctggggcattgtctctgattgctctagcatgagtccttagtgctcttcatttggctcccctaatctgactcctccttccctttctactgttttgccgcaccaggctttttttttttttttttttttagtttagtttttgtagagacaagatcttgctatgttgcccaggctggtctcaaacacctaacctcaagcaatcctcccgcctcggcctcccaaaatgctgggaccacaggcatcagctactgctcctggccctccctttttttttttttttttttttttttttttgagatggaatcttgctctgttgcccaggctggagtgcagtggcaccatctcagctcactacagcctccacctcctgggttcaagcaattctgcctcagcctcccaagtacctgggactacaggtgcacgccaccacacccagctaatttttgtatttttagtagagatggggtttcaccatgttggccaagatggtcttgatctcctgacctcatgatctgcccacctcggcctcccaaagtgctgggattacaggcatgaaccactgcacccagctttccagccctccctttctactcttatctccagccaccctccttcaaaggtctggcagcataacctctctatgccccagctgtgtctttgctcatgttggccctctggaaatgatttcccccttttttttaagtgctccagtttttcccaccttatccatcccatgtcatcttccctctgtgtggtccttgcttcccattctagctaactcttatccctcccccatactcctggagccctctgccctcagagtcttttgtgtcacacagacccaataattagaactgtttggtctctggctagactgtgagctccttgcaggtggggaagatgtcatgtatgcttttaccctccacccaaatgcccagcacaggaggaccaggattggaacaagtgttgacctctcatgtttactttgtttcagaattggggggttctatgctctttccccataccccggtctccgcctcatctctctcaatatgaatttttgttcccgtgagaacttctggctcttgatcaactccacggatcccgcaggacagctccagtggctggtgggggagcttcaggctgctgaggatcgaggagacaaagtgagggccagtagtgggaacacggtggtgctgggggacaagcaggctcctgttgagctggagcacctctgggcacagaagttttattttcctggcattcccaacaagtgttccctggggattcagctcatggtcactgttgaaagccttcattcagtccccctttctctagccagggctgcctggacccctggatgccctgattaccatccttaattctccctactaggtgcatataattggccacattcccccagggcactgtctgaagagctggagctggaattattaccgaattgtagccaggtaggacggagatgagggtgggaatagggacagggtgagtgtctgaaggctgaaaattcccttgagcatctcaccatccctgttgtcccatggagtggggaggctcctcactagaacaggttggagaaagagggcatcctatctccccagatgtcttcctacccctccctagaatcttctgaatgtagtaccttctggccaggtatgagaacaccctggctgctcagttctttggccacactcatgtggatgaatttgaggtcttctatgatgaagagactctgagccggccgctggctgtagccttcctggcacccagtgcaactacctacatcggccttaatcctggtgagtgaggcagaagggagcctcccttatcctggagttggtgggataggggaaggaggttggagccagagcctgcaaagcatgggcaggatgtgtggcccctccctggagttacccttgctccttgcccctccagtcagccccacatccttgcaggttaccgtgtgtaccaaatagatggaaactactccgggagctctcacgtggtcctggaccatgagacctacatcctgaatctgacccaggcaaacataccgggagccataccgcactggcagcttctctacagggctcgagaaacctatgggctgcccaacacactgcctaccgcctggcacaacctggtatatcgcatgcggggcgacatgcaacttttccagaccttctggtttctctaccataagggccacccaccctcggagccctgtggcacgccctgccgtctggctactctttgtgcccagctctctgcccgtgctgacagccctgctctgtgccgccacctgatgccagatgggagcctcccagaggcccagagcctgtggccaaggccactgttttgctagggccccagggcccacatttgggaaagttcttgatgtaggaaagggtgaaaaagcccaaatgctgctgtggttcaaccaggcaagatcatccggtgaaagaaccagtccctgggccccaaggatgccggggaaacaggaccttctcctttcctggagctggtttagctggatatgggagggggtttggctgcctgtgcccaggagctagactgccttgaggctgctgtcctttcacagccatggagtagaggcctaagttgacactgccctgggcagacaagacaggagctgtcgccccaggcctgtgctgcccagccaggaaccctgtactgctgctgcgacctgatgctgccagtctgttaaaataaagataagagacttggactccaga

SEQ ID NO: 14144 - DNA, 2211 bp, Homo sapiens
ggtgtccccggcgccgcccggggccctgagggctggctagggtccaggccgggggggacgggacagacgaaccagccccgtgtaggaagcgcgacaatgccccgctacggagcgtcactccgccagagctgccccaggtccggccgggagcagggacaagacgggaccgccggagcccccggactcctttggatgggcctggtgctggcgctggcgctggcgctggcgctggcgctggctctgtctgactctcgggttctctgggctccggcagaggctcaccctctttctccccaaggccatcctgccaggttacatcgcatagtgccccggctccgagatgtctttgggtgggggaacctcacctgcccaatctgcaaaggtctattcaccgccatcaacctcgggctgaagaaggaacccaatgtggctcgcgtgggctccgtggccatcaagctgtgcaatctgctgaagatagcaccacctgccgtgtgccaatccattgtccacctctttgaggatgacatggtggaggtgtggagacgctcagtgctgagcccatctgaggcctgtggcctgctcctgggctccacctgtgggcactgggacattttctcatcttggaacatctctttgcctactgtgccgaagccgccccccaaaccccctagccccccagccccaggtgcccctgtcagccgcatcctcttcctcactgacctgcactgggatcatgactacctggagggcacggaccctgactgtgcagacccactgtgctgccgccggggttctggcctgccgcccgcatcccggccaggtgccggatactggggcgaatacagcaagtgtgacctgcccctgaggaccctggagagcctgttgagtgggctgggcccagccggcccttttgatatggtgtactggacaggagacatccccgcacatgatgtctggcaccagactcgtcaggaccaactgcgggccctgaccaccgtcacagcacttgtgaggaagttcctggggccagtgccagtgtaccctgctgtgggtaaccatgaaagcacacctgtcaatagcttccctccccccttcattgagggcaaccactcctcccgctggctctatgaagcgatggccaaggcttgggagccctggctgcctgccgaagccctgcgcaccctcaggtgcatataattggccacattcccccagggcactgtctgaagagctggagctggaattattaccgaattgtagccaggtatgagaacaccctggctgctcagttctttggccacactcatgtggatgaatttgaggtcttctatgatgaagagactctgagccggccgctggctgtagccttcctggcacccagtgcaactacctacatcggccttaatcctggttaccgtgtgtaccaaatagatggaaactactccgggagctctcacgtggtcctggaccatgagacctacatcctgaatctgacccaggcaaacataccgggagccataccgcactggcagcttctctacagggctcgagaaacctatgggctgcccaacacactgcctaccgcctggcacaacctggtatatcgcatgcggggcgacatgcaacttttccagaccttctggtttctctaccataagggccacccaccctcggagccctgtggcacgccctgccgtctggctactctttgtgcccagctctctgcccgtgctgacagccctgctctgtgccgccacctgatgccagatgggagcctcccagaggcccagagcctgtggccaaggccactgttttgctagggccccagggcccacatttgggaaagttcttgatgtaggaaagggtgaaaaagcccaaatgctgctgtggttcaaccaggcaagatcatccggtgaaagaaccagtccctgggccccaaggatgccggggaaacaggaccttctcctttcctggagctggtttagctggatatgggagggggtttggctgcctgtgcccaggagctagactgccttgaggctgctgtcctttcacagccatggagtagaggcctaagttgacactgccctgggcagacaagacaggagctgtcgccccaggcctgtgctgcccagccaggaaccctgtactgctgctgcgacctgatgctgccagtctgttaaaataaagataagagacttggactccaga

SEQ ID NO: 14145 - DNA, 1617 bp, Homo sapiens
aggggcggagctgctttgcggccggccgcggagcagtcagccgactacagagaagggtaatcgggtgtccccggcgccgcccggggccctgagggctggctagggtccaggccgggggggacgggacagacgaaccagccccgtgtaggaagcgcgacaatgccccgctacggagcgtcactccgccagagctgccccaggtccggccgggagcagggacaagacgggaccgccggagcccccggactcctttggatgggcctggtgctggcgctggcgctggcgctggcgctggcgctggctctgtctgactctcgggttctctgggctccggcagaggctcaccctctttctccccaaggccatcctgccaggttacatcgcatagtgccccggctccgagatgtctttgggtgggggaacctcacctgcccaatctgcaaaggtctattcaccgccatcaacctcgggctgaaggtgagcactgaaggggctgcagtggaggaggccgaaaggagtgctggggctgggggctggggctgatgctggtgcgctgggctcagaatgcatccctgatggagagggtggcatctacaatccatcactgagtttgctcccctttggggacacccatggctacatgccaccatcaccccattgtgacctttgtgaagtaagaaaataatgcagacagtgcctgaggaagtcagcttgccaagcaaaggcctcatgccacaggccgctgagctaaagaagaagcgatggcctggtgctgcctgagttacagggcaatatctggaaggcaaaggtgtgcactgagcttggtgcactgagtcctgcccagccccagtttggaaatggaggcccaaggggtggtggccaggggttggcctggttcctctgctctgcctctgatttctcaccatgcgctcctcccactgcagaaggaacccaatgtggctcgcgtgggctccgtggccatcaagctgtgcaatctgctgaagatagcaccacctgccgtgtgccaatccattgtccacctctttgaggatgacatggtggaggtgtggagacgctcagtgctgagcccatctgaggcctgtggcctgctcctgggctccacctgtgggcactgggacattttctcatcttggaacatctctttgcctactgtgccgaagccgccccccaaaccccctagccccccagccccaggtgcccctgtcagccgcatcctcttcctcactgacctgcactgggatcatgactacctggagggcacggaccctgactgtgcagacccactgtgctgccgccggggttctggcctgccgcccgcatcccggccaggtgccggatactggggcgaatacagcaagtgtgacctgcccctgaggaccctggagagcctgttgagtgggctgggcccagccggcccttttgatatggtgtactggacaggagacatccccgcacatgatgtctggcaccagactcgtcaggaccaactgcgggccctgaccaccgtcacagcacttgtgaggaagttcctggggccagtgccagtgtaccctgctgtgggtaaccatgaaagcacacctgtcaatagcttccctc

SEQ ID NO: 14146 - DNA, 425 bp, Homo sapiens
aggggcggagctgctttgcggccggccgcggagcagtcagccgactacagagaagggtaatcgggtgtccccggcgccgcccggggccctgagggctggctagggtccaggccgggggggacgggacagacgaaccagccccgtgtaggaagcgcgacaatgccccgctacggagcgtcactccgccagagctgccccaggtccggccgggagcagggacaagacgggaccgccggagcccccggactcctttggatgggcctggtgctggcgctggcgctggcgctggcgctggcgctggctctgtctgactctcgggttctctgggctccggcagaggctcaccctctttctccccaaggccatcctgccagtgtaccctgctgtgggtaaccatgaaagcacacctgtcaatagcttccctc

SEQ ID NO: 14147 - DNA, 4519 bp, Homo sapiens
cagtcagccgactacagagaagggtaatcgggtgtccccggcgccgcccggggccctgagggctggctagggtccaggccgggggggacgggacagacgaaccagccccgtgtaggaagcgcgacaatgccccgctacggagcgtcactccgccagagctgccccaggtccggccgggagcagggacaagacgggaccgccggagcccccggactcctttggatgggcctggtgctggcgctggcgctggcgctggcgctggcgctggctctgtctgactctcgggttctctgggctccggcagaggctcaccctctttctccccaaggccatcctgccaggttacatcgcatagtgccccggctccgagatgtctttgggtgggggaacctcacctgcccaatctgcaaaggtctattcaccgccatcaacctcgggctgaaggtgagcactgaaggggctgcagtggaggaggccgaaaggagtgctggggctgggggctggggctgatgctggtgcgctgggctcagaatgcatccctgatggagagggtggcatctacaatccatcactgagtttgctcccctttggggacacccatggctacatgccaccatcaccccattgtgacctttgtgaagtaagaaaataatgcagacagtgcctgaggaagtcagcttgccaagcaaaggcctcatgccacaggccgctgagctaaagaagaagcgatggcctggtgctgcctgagttacagggcaatatctggaaggcaaaggtgtgcactgagcttggtgcactgagtcctgcccagccccagtttggaaatggaggcccaaggggtggtggccaggggttggcctggttcctctgctctgcctctgatttctcaccatgcgctcctcccactgcagaaggaacccaatgtggctcgcgtgggctccgtggccatcaagctgtgcaatctgctgaagatagcaccacctgccgtgtgccaatccattgtccacctctttgaggatgacatggtggaggtgtggagacgctcagtgctgagcccatctgaggcctgtggcctgctcctgggctccacctgtgggcactgggacattttctcatcttggaacatctctttgcctactgtgccgaagccgccccccaaaccccctagccccccagccccaggtgcccctgtcagccgcatcctcttcctcactgacctgcactgggatcatgactacctggagggcacggaccctgactgtgcagacccactgtgctgccgccggggttctggcctgccgcccgcatcccggccaggtgccggatactggggcgaatacagcaagtgtgacctgcccctgaggaccctggagagcctgttgagtgggctgggcccagccggcccttttgatatggtgtactggacaggagacatccccgcacatgatgtctggcaccagactcgtcaggaccaactgcgggccctgaccaccgtcacagcacttgtgaggaagttcctggggccagtgccagtgtaccctgctgtgggtaaccatgaaagcacacctgtcaatagcttccctccccccttcattgagggcaaccactcctcccgctggctctatgaagcgatggccaaggcttgggagccctggctgcctgccgaagccctgcgcaccctcaggtacttatcgtccgtggaaacccaggaagggaaaagaaaggtgaatgaaagtgaagggagaagggaacctggggcattgtctctgattgctctagcatgagtccttagtgctcttcatttggctcccctaatctgactcctccttccctttctactgttttgccgcaccaggctttttttttttttttttttttagtttagtttttgtagagacaagatcttgctatgttgcccaggctggtctcaaacacctaacctcaagcaatcctcccgcctcggcctcccaaaatgctgggaccacaggcatcagctactgctcctggccctccctttttttttttttttttttttttttttttgagatggaatcttgctctgttgcccaggctggagtgcagtggcaccatctcagctcactacagcctccacctcctgggttcaagcaattctgcctcagcctcccaagtacctgggactacaggtgcacgccaccacacccagctaatttttgtatttttagtagagatggggtttcaccatgttggccaagatggtcttgatctcctgacctcatgatctgcccacctcggcctcccaaagtgctgggattacaggcatgaaccactgcacccagctttccagccctccctttctactcttatctccagccaccctccttcaaaggtctggcagcataacctctctatgccccagctgtgtctttgctcatgttggccctctggaaatgatttcccccttttttttaagtgctccagtttttcccaccttatccatcccatgtcatcttccctctgtgtggtccttgcttcccattctagctaactcttatccctcccccatactcctggagccctctgccctcagagtcttttgtgtcacacagacccaataattagaactgtttggtctctggctagactgtgagctccttgcaggtggggaagatgtcatgtatgcttttaccctccacccaaatgcccagcacaggaggaccaggattggaacaagtgttgacctctcatgtttactttgtttcagaattggggggttctatgctctttccccataccccggtctccgcctcatctctctcaatatgaatttttgttcccgtgagaacttctggctcttgatcaactccacggatcccgcaggacagctccagtggctggtgggggagcttcaggctgctgaggatcgaggagacaaagtgagggccagtagtgggaacacggtggtgctgggggacaagcaggctcctgttgagctggagcacctctgggcacagaagttttattttcctggcattcccaacaagtgttccctggggattcagctcatggtcactgttgaaagccttcattcagtccccctttctctagccagggctgcctggacccctggatgccctgattaccatccttaattctccctactaggtgcatataattggccacattcccccagggcactgtctgaagagctggagctggaattattaccgaattgtagccaggtaggacggagatgagggtgggaatagggacagggtgagtgtctgaaggctgaaaattcccttgagcatctcaccatccctgttgtcccatggagtggggaggctcctcactagaacaggttggagaaagagggcatcctatctccccagatgtcttcctacccctccctagaatcttctgaatgtagtaccttctggccaggtatgagaacaccctggctgctcagttctttggccacactcatgtggatgaatttgaggtcttctatgatgaagagactctgagccggccgctggctgtagccttcctggcacccagtgcaactacctacatcggccttaatcctggtgagtgaggcagaagggagcctcccttatcctggagttggtgggataggggaaggaggttggagccagagcctgcaaagcatgggcaggatgtgtggcccctccctggagttacccttgctccttgcccctccagtcagccccacatccttgcaggttaccgtgtgtaccaaatagatggaaactactccgggagctctcacgtggtcctggaccatgagacctacatcctgaatctgacccaggcaaacataccgggagccataccgcactggcagcttctctacagggctcgagaaacctatgggctgcccaacacactgcctaccgcctggcacaacctggtatatcgcatgcggggcgacatgcaacttttccagaccttctggtttctctaccataagggccacccaccctcggagccctgtggcacgccctgccgtctggctactctttgtgcccagctctctgcccgtgctgacagccctgctctgtgccgccacctgatgccagatgggagcctcccagaggcccagagcctgtggccaaggccactgttttgctagggccccagggcccacatttgggaaagttcttgatgtaggaaagggtgaaaaagcccaaatgctgctgtggttcaaccaggcaagatcatccggtgaaagaaccagtccctgggccccaaggatgccggggaaacaggaccttctcctttcctggagctggtttagctggatatgggagggggtttggctgcctgtgcccaggagctagactgccttgaggctgctgtcctttcacagccatggagtagaggcctaagttgacactgccctgggcagacaagacaggagctgtcgccccaggcctgtgctgcccagccaggaaccctgtactgctgctgcgacctgatgctgccagtctgttaaaataaagataagagacttgga

SEQ ID NO: 14148 - DNA, 2446 bp, Homo sapiens
cagtcagccgactacagagaagggtaatcgggtgtccccggcgccgcccggggccctgagggctggctagggtccaggccgggggggacgggacagacgaaccagccccgtgtaggaagcgcgacaatgccccgctacggagcgtcactccgccagagctgccccaggtccggccgggagcagggacaagacgggaccgccggagcccccggactcctttggatgggcctggtgctggcgctggcgctggcgctggcgctggcgctggctctgtctgactctcgggttctctgggctccggcagaggctcaccctctttctccccaaggccatcctgccaggttacatcgcatagtgccccggctccgagatgtctttgggtgggggaacctcacctgcccaatctgcaaaggtctattcaccgccatcaacctcgggctgaagaaggaacccaatgtggctcgcgtgggctccgtggccatcaagctgtgcaatctgctgaagatagcaccacctgccgtgtgccaatccattgtccacctctttgaggatgacatggtggaggtgtggagacgctcagtgctgagcccatctgaggcctgtggcctgctcctgggctccacctgtgggcactgggacattttctcatcttggaacatctctttgcctactgtgccgaagccgccccccaaaccccctagccccccagccccaggtgcccctgtcagccgcatcctcttcctcactgacctgcactgggatcatgactacctggagggcacggaccctgactgtgcagacccactgtgctgccgccggggttctggcctgccgcccgcatcccggccaggtgccggatactggggcgaatacagcaagtgtgacctgcccctgaggaccctggagagcctgttgagtgggctgggcccagccggcccttttgatatggtgtactggacaggagacatccccgcacatgatgtctggcaccagactcgtcaggaccaactgcgggccctgaccaccgtcacagcacttgtgaggaagttcctggggccagtgccagtgtaccctgctgtgggtaaccatgaaagcacacctgtcaatagcttccctccccccttcattgagggcaaccactcctcccgctggctctatgaagcgatggccaaggcttgggagccctggctgcctgccgaagccctgcgcaccctcaggtacttatcgtccgtggaaacccaggaagggaaaagaaagaattggggggttctatgctctttccccataccccggtctccgcctcatctctctcaatatgaatttttgttcccgtgagaacttctggctcttgatcaactccacggatcccgcaggacagctccagtggctggtgggggagcttcaggctgctgaggatcgaggagacaaagtgcatataattggccacattcccccagggcactgtctgaagagctggagctggaattattaccgaattgtagccaggtatgagaacaccctggctgctcagttctttggccacactcatgtggatgaatttgaggtcttctatgatgaagagactctgagccggccgctggctgtagccttcctggcacccagtgcaactacctacatcggccttaatcctggttaccgtgtgtaccaaatagatggaaactactccgggagctctcacgtggtcctggaccatgagacctacatcctgaatctgacccaggcaaacataccgggagccataccgcactggcagcttctctacagggctcgagaaacctatgggctgcccaacacactgcctaccgcctggcacaacctggtatatcgcatgcggggcgacatgcaacttttccagaccttctggtttctctaccataagggccacccaccctcggagccctgtggcacgccctgccgtctggctactctttgtgcccagctctctgcccgtgctgacagccctgctctgtgccgccacctgatgccagatgggagcctcccagaggcccagagcctgtggccaaggccactgttttgctagggccccagggcccacatttgggaaagttcttgatgtaggaaagggtgaaaaagcccaaatgctgctgtggttcaaccaggcaagatcatccggtgaaagaaccagtccctgggccccaaggatgccggggaaacaggaccttctcctttcctggagctggtttagctggatatgggagggggtttggctgcctgtgcccaggagctagactgccttgaggctgctgtcctttcacagccatggagtagaggcctaagttgacactgccctgggcagacaagacaggagctgtcgccccaggcctgtgctgcccagccaggaaccctgtactgctgctgcgacctgatgctgccagtctgttaaaataaagataagagacttgga

SEQ ID NO: 14149 - DNA, 23306 bp, Homo sapiens
cagaatccaggggacggttgctgagcgggcctgggacagcgggtcgcggcacctccggcctgcgcgtgtctaatccgtctgtcgggtcccgaaagagctaagccgagcctgcgccggacgggtgggctggactgagaggtgggtgtgcggacctcgggggggatcctggtgctgccccaacgtgtccgggggtggaacccggatgtctagacaggagttctggaacgtccagacctgggagcccccacccatacgagaggtctaagccatgggataaagttatgagactgttgggggaagacgcccccggattcctaagagactccacgccccacaggggcgctagtctgtggcggcagaaaccctggggaagctgccacagaatcctgaggcccctcacaatgtccggcgaccccagactgtgtgacagggagattggagaagagcagcggcagggatcttcttataatcccatgggtgtcctagattaggcattagggtcagctgccccatagaagaacagacatggggggaatcagaatgtccgcagaacctaaggctggtgaccactggacagtcttgaagaggtttaacccagacagagtaactaggtaagaggcaaggatcctaacaggcagagattgggaggttgacacctctgagcctaccaggatgggagggggaacaagcagtgacttgaacaggctgggacccacacaccccaactgtgtggagcggtaaccctcaccccccacccatgcaccgtatggggtgacttcccaagtgactgttctgaagagagggaagggatgattgaaagatgaatcaacaggaggtggggggcaggcctggggccacacattagtcagtcaccatacattaactaagcatccacagtgtgccagaccagggcccctcaaattccagacagacattagttggggctacaggaggaaggagagatctgcgctgggaggctgggccaggatttaggggtccattttgatgggcagcactggggcaagatggggctcttgcctctgtcactgagagtgttccaggcccttgagggcactttggaagggagcttcggaagccggagatgacgaagattttgattacatccttctctgccctctaagtctttggcttcctccttgctcagtgacaaatccttggccctctccaatcttctcagtttgcctgaaatccaggggttgggcaggtcagcttctgaaagcccttccaggtggggaattgaattctgtatgaattggcaggaggtgctgggtgcctggacacctggcttcaggaggtctggacagcagagctggctccaagaatcggaagacacagtgtaccttcctatacctgggggaatgacagtggtggtggcagcaagaactacgggttcagcccacagccagaagctgagcctgcggagtgggtgggggctgggtaggccctgtggatgggtgggtggggcaggaaactggagactggagtgcaccccctggtggtaagcacagcttgggtgggtcttgccaggccctggcttctcaatccaggtccctgccctccctgttttgaggtttagacaggatgagagtccatcccaggccacacagcagactggcggccaagctggcagggctggaaccagagaccccctaccctgggtttggtgagttttccagcaaaccaccctagggcagagggcagcttccagccaggagccacattataggatgggacagtaatggacgctcctaggttagagagggaaagtaaggcacagagcctaagtgcctgtggtttctggaagccccagcatgcctgattcatgtctgtcccctgcagaattctctgagctggtgacaggtgccacaggcactggggatctcaccagaaaggaaccgacggagctaggggccagcgagatggcggacgaggccttagctgggctggatgagggagcccttcggaagctggtaagtggccccatcacccactgtggggacaggaaagccaagccagagaggcagggtcaatccagggtacctctcagctgacaggaagaagtgatgggggaaaggtcaggaggagggggacatgggaacaggggtaggccagttccatgtggctgatgcagaggcccttgtggcatgtgcctgtccatgcctggtactgaagcctagtccctcccaaccctccacagccaccacctgtttaaacagtaactgctgtagactcgcccgtatgcagccacaggtgtggggaggctggatatgcctctccagagcaatagctcgggcaatgcccacccctggaagctggcccagtgataatggtagcagcaatgattaataatgccaaggcctggcagggggcaggctgggtactgggtataccatgtcacagaataatcacagcagctctgaaagcctgggcactgcgactcaagagagttaaaatcacctgctcaaggacacccatctaagaaggagctgtgccaaaatcccaaccccatagtgggccacgggggaccagagtcctgggaaagtcaaggctggacgaggccataagagagagacaggttttgtgggcccttatggattctgtggcttctcatctcatttttctactcttgagtctcagttcctctacctgtaaaatgaagggagggagggagatgtgtttgcacacaagctctaggtcctagagttggcatggggacagaatgaggcatggacccagatctcaggtggaggaaagatgagcccactccatcccctttcttgttcctcttcctgagagccctgtctacctccatgcacagaggccgtagggcaacccagtggggcagggctccttccccaaccccaaaggccaggcagcctgacctggaggaggggccagaggagctccatctcctcagtccctgacccttgtccatgggggtaaattaaagatttactttacctagaagacaagtgacccaccccactctcataccttcccccgcaggcagaggctggaaccaaccagcgtagcccagccactgggcagtgcccagctgctgccatgacctccccaaggcactctgcctgtatgttctcggaccagcgcattagactctctgggtgtctgcctctccactatcaccgcaggatgtgtgcagcctggaggggatgaggttaggtttccaaaggtgcccgccagtcagttcgaccttccctcaggaagtccaagtcccagtgggggtcgtagaggcagcacagtccaaaaagagggaatgccaggcctggttcccgcacatcctcatctcaaggtatccacaggcaggctcagggttcttcagccgccacctccctctcttaagcgaggctcgggcggcgctggaaaagagttttggagagaagctggagcagtggttgaatctctgggaaaggacagatgagaacctgccccggtctcgggatcggtgcctctcgaagtctttccgaccccgggagcggctcctccagcacccggcgcccgccattactgcgccccgcgcgccggcccggcccccgctggcctcgtggcaagaacgggggcgtcccgagccgggctcctccccgcggggccgggccatataaggaaaagctaggcccgctccgcccgccctgcgccccagcgtctggccgatttggggacgcgggcagtcgcttccggccccggctcccgcacattcttgaggattgggccggggatgggaggaatggggacgcctggggacttgcacgccgcgtgcccctccaccacccgccgggacgccctctgcctcggtcccgagttcgagttcgacctccgccactcagctgggtgtcctggggaccttggtttcttccctttagatccggacactgaagcaggcggtagcgggtgtcttcctacctggctaccccttcggcgcctagcgcgaggcagggtgggcgaggcgagggcggcgccctgcgagggagggcggtcgcagaacctgcgggccttcagcgccccctggcgaggcttccctccaccgccggcgggacccccatgggcaaccgggggagctgggactgaaagcctggagagccccctccgttgtgctgttggggagactgaggcccagtgagacctcagggcctgccaggcgttcccaacagcgagggcagagagtacacggagagccggctccccagggggaggaagcaccctctttcctcccgggagaatttcactgggcagtttcggaaaccgccccatccccttccccttccccctcggtagacaatggcgctttgtacttccttccctccctcccacagctccctccttacacagcggtggggcctgggcgggtggaactcgggacacacagaggagacactgtggtccaacctttgcctccaggcccaaagggaagggtcgtgccagagggtgaccagtggaatgaggttgtcagtctccagccttgcccacccactttgggggatcagagggaggctcccattttccagatggggacactgaagctccgggggttgtgctgtagaggtggccaagttcctacatcaggcttttgtcagagacaaggaccccatctccgagcccagagcactgagaatggggacctaggagacaaaaggctagcccttgcccctctgggcctctttaccctctgtacagaaggggctggaccctctgtcccctccagcccccagcctccaaatgtaccacagaaggctctaggcctgagacacagccagcaccgggggctggggagtgagcctcattccccccgcctctgctataaggcctccttaggcctcagagcatctctagtccaggctagaggggtctccaacacagtgccaggatccctgaggtccccaccatgacacacagaccccagtagcagagctatcttcagcctagggcaggccctggagtcagagagacctgggttcaaatcctggctcaggtcatttgaccatgagcaaatcacatgtcctccctggacttcaatctcctcatctgtcaaatgggaataacagtagtatctagggtttttgtgggcttaggacaagtagggggctcagcacagggtttgactcacaggctctccataaatgttactgatgcctcggggtatcctgcccttcccatttgcccccttgtctctctccctcctcctgactggctagaaccaagtatgggggtgatgcttattgcaactgcagctatgtacaggagaggccaagtcactgttcccaaccccacccactggcaaatgaaaaaaccaagacacagagagtttaagggatatgctcttgatcacccagccaggattggactagggctggaaccaactaagggctctggcctgagtttcagggggtcttctcataattcctcaggaatgtggagcctggagggctcttcccccaagactctccctgctctcttcagactaggacaagctggctcatggctgagttgggccagcccacactccctgctgaaaactatctccatcccatccccacccttgccacctggccttcccgctaagcagaaaggaatgacgggggggcgctaaaaagggagatgatagagggttctttggccctacccctgaatgatttggggggtggggacagaggaaatcaccccgcctttactggctcccgtctggttatcagacccacactggaggcttatctctgccactatcttccaggggaaccctgggccagtcctctctcccttgagccacggaggatctgtatgtagcaggtggctctacatggtggaggtgtgggggaggcaacaggattggctgactcactccagagaaggtgttctttcctgaacctggttagaccagtcacccccaatttcccgggaactgaggggttgagaaccggtagaagcagctgtcacccagggatgccctctataaggccctggggtggcccctagtgccagccaccttatatgtctgggggattggtcctcccactctgcaccctggcttcttccatggtggctaggtccaggccagtgcagtggggacaatagccctcagccaggcaggactcctgagcacctgtcctcagtttccccatctgtggatgaagcagtcaacccccagctgggctgtggtgtttggtgactagaccagggagcctcccttgctcagagggtggacttcatctgtcacctttccctctagggaccctgttagtgacccacagggtggcctccctcctcctcctacaatagctccctgacttttggggatctgggctctgagaggcaggaatcgagttgtagaaaggagtgcctggcttggcacctggcacaagtgggcagtttctggctgtccactcacagttgtgtgctctgtgaaccacaatgcaaagtggactacccaagatccctgaaacagtgggctgggtctacccccgggaccctgcgtgggcaggcaggcacgtgaagagcttgggacacagggagtggacacaggccacacattgtgccctaggcagagccgtgggcagctggtgccagccctccgcccctggcagccaaaatgacctgcctctcgcacccactgcagctggaggtcacagcagatctggcagagcggcggcgcatccgctcagccatccgggaactgcagcggcaggagctggagcgcgaggaggaggccctggcatccaagcgtttccgtgccgagcggcaggacaacaaggagaactggctgcagtgagtagcggggggtggaacatgcgggtgagaaggtgagtgtgagccctggctcagctcatgtgtgcaggcaggcgtgagcacaagtgtatctgtggattgcatgtgctaatggcagtacgtccacacacgcttctggaaaaacagagatgtttgtgggcatggagcatgtactgattgtggcgtcgcggccgtgctgatgtagccagcacgtctgagtgtgtggtattagtgcccacgtccatgggcatatgtgtatcagtgtgcagttagagggtgtgcacagccacatgcccttctgccaaggttctgggtactctgttctggctcctacccttagcccacatcctccacgacctggccatggcagtggtggttacagtcatgatgtctctgcagctctcagcagcgggaagctgagcagcgggctgccctggcacggctggcagggcagctggagtccatgaacgatgtggaggaattgactgcactggtgaggcccaggctggggcaggggatgggggcagggcaggtgaagacctggactccacagcccaacacccgcgacctgtctcttacccacagttgcgaagcgctggtgagtatgaggagcgcaagctgatccgagctgccatccgccgtgtacgggctcaggagattgagggtatgtggcctgtcccggccccacccctgccctgctgtctgctgtccacagcacctccctgtcactcacctgccacttgctccttcccttccagctgccaccttggctgggaggttgtacagcgggcgtcccaacagtggctcaagagaggacagcaaggggctagcggcacacaggctggaacagtgtgaggtaaggagggtgggagagtggcccagtgtcctgtgcccatggataccggtagcacagagtgcctgagtgtctttgctaggctggtatttcactgtaaggggcccacccctgccatccagcctctatttagcagtcagagggatctcccagaaatgcaaatccggccctggcacctcccctgcttcaacccgtcccagggctgcccctcaccctccacacagcccacatctttaccttggcttatggggcctgcatgtcagaccccagctggctcacagttcactctattttccagagtgtgggtgagaggtcaggccatgcaggttccccaagtggccagcagaggccgctgggtccacggtcctggcaggaccccactcccactccagatgaaccaggctgaggccaggagtcaggaacctccactccagggatctattaaggctcccgtccccaataggtctcctgccatacccacccactgacatcaggacctggtcctctctgaacccctttggctaggtagtgccaagagattgggaagtggggatcagagactgcccttagcatgccagtgccagtgcttgcgcaggtgtgcctacaggaagccatgccccaccactctgctttgcatgccctgccctgggcacttgccagcctggccctcagtggtgggggtggcgttcaaagcctagggagccttggttgcatcctgtgggtcccttacaggtgccagagcgagaggaacaggaacagcaggcagaggtttcaaagccaacccccacccctgaaggcaccagccaggatgtgaccacagtgacactcctgctgcgagccccacctgggagcacatccagctcacctgcctcacccagcagttcacccacccctgcctctcctgagcctccattggagcctgccgaggcccagtgccttacagctgaggttccaggcagcccagagccaccccccagcccacccaagaccaccagccctgagcctcaggagtctccaacgctccccagcactgagggccaggtggtcaacaaggtgagtctggatgaggggcagggatgccaggcaagtgagcaggtctgggagtcaggccttgctcaggccctgttcttctcccttgcagcttctgtctggccccaaagagacccctgctgcccagagccccaccagaggcccctctgacaccaagagagcaggtgagggtcccagcaggggtagtcacaggcatctttcttcccctccccctgcctccctttccctgcctagaaaatgggctcttgtgcctggcagctctagcttcctcaggtccatgcagtccctgatactgcaccccacccctgaagtgtccccgcccccagctaggccagcctccccctccacccccatggctagaggcctcccctgcagccttgaaaggcaacgggcctcaggcacattcttctccccaataagggagtccacccatctcccagctggagctgtgggcagcactggccaggagggctgtcccccctccccatctgcagaaaggatctgggcacccttcctccagcctaagcctcgcctggcccccaggagtgtccaagtcatcctagggtcagtgtggcaggagaaggaggtgcctgtaggagagatgcagccgagtggggatgccggagtgtgggagatccaggaggggatggagaggtggggtgggggttgagtacaggaaagggtgggaagctagggaggtgtagaggagaggattatgaaaggtggacacccactatcccctgtcttttctctttccccacatggccatcaccccctccccaacctgccagacgtggctggaccccgaccctgccaacgctccctgtcggtgctcagcccccgccaaccagcccagaaccgaggtactacctattctcaccctgcctaggatctgtgcagaccctgtcccacccagttgctgacagccctcctgttccttctagagtccaccccccttgccagcggaccttcctcattccagcgggctggctctgtgcgggatcgtgtccacaagttcacatctgattctcctatggctgctaggctccaggatggcacaccccaggctgccctaagtcccctgacccccgcaaggctcctgggcccctccctcaccagcaccacccctgcctcctcctccagcggctcctcctctcggggccccagtgatacctcctcccggttcagcaaggagcaacgaggagtagcccagcccctggcccagcttcgaagctgcccccaggaggagggccccagggggcggggcttggctgctaggccccttgaaaacagagcaggggggcctgtggcacgttcagaggagcctggtgccccgctgcccgtggccgtcggcactgccgagccagggggcagtatgaagaccacattcaccatcgagatcaaggacggccgtggccaggcctccacaggccgggtgctgctgcccacaggcaaccagagggcaggtaggcgccccccactgcctccccaatggggatgagtgcctgcaaccgcacttctgcatgcaggacaggtgctgcggccaggactcagggtgtctccaaagggtgtgctgggagcgagggcattatcaaccttgtctggcactgccctcactccacctgatcctcctgacagccacctttctccccactcagaactgacactggggctgcgggcgcccccgaccctactcagcaccagtagtgggggcaagagcaccatcacccgtgtcaacagccctgggaccctggctcggctgggcagtgtcactcatgtcaccagcttcagccatgccccccccagtagccgaggaggctgcagcatcaaggtgagcccctcctcaccccaccagcctcaccatccgtcagcctcacatacactgcttcagggtgtagggctagcagggttcctctgctcctcccctactgcacacacagagaaaccgaggcccagagagggaaggtggctgctcacagaccacagccagtcggtggcagagctaaggccagaccctagcatatcagtccctaagtgtgtcggaagcttactctgtactggcgttaagcttcctggatgctgatctctgatccttagttcgaaattggttggttcattcctggtgaacagatggggaaactgaggctcagagagggtggtaagggcttgctcccctcttcctgtggcagccccagtgcccctgcgcccacccacactggacatcagccccgaggtatagagcagctcatctgctcatccaagatcagcctggcccattaggagattggagattagtgattagcatctgcgtcaacctccctgtgggggttgggcagaagctctgaggggggacagacaggcagaggggcgccaatcaggtgaggcagcagcctagcaggtgccttgggaactgaatacgcagcacccttccattattcattcccaagcccaggatccactagccgggagctcagccgggaaagggatccccaagcgggccacccggctgcccaggtaatgccctctgtgctaaaccagggactgaatgggactttggctgaggtgagatggctagaccagctttgggccttctcaggggagacagggagagagtgagggaaataaagcacccttcctttccaaaaaagcaggatccagctgccctctgacaagggattgtgtggggtggggtggggggacccgctgaggcccttgaggtggatgggaggtgccacagtgagacctgggtctgacaccaccaacttgcctcagtttacccatctggaaccaaaggggacaggtgatgtacccataatgtgcttgctcaaagtctgtggttggacgtgagcaccatgggcaggccagagggcatttatgtaagaccaagacactttttatagcagatcactcaaagtcctgcctccctgtgcctccatttcccccatctgttccagctgtctaaaacagctggagttagggtaaagggtaaaggagtacaggctgtggagtccagcagactgattctcacagctaatgtacatggtggctaggccaggtccattccctgttccctgcctcagtttccccacctgtgaggcatggggccccgatctcagtgatcttcagaacccatgcagtcttactgtgctgcaggcctatgatttctgtagggctatagccaggcctggcgatccgcctgcttgggcaggccccccctcccccactgccccttccacggaggagcccagaataggtttctatttgggctgcagctccagctggctggtggcgggctgggaggcaggggcggggcaggcccgctgcccttgcctttgccctcggaccagctgcaaagactcagacactcagccagagacagcagcccctgccactgccccaccattaccccccatagagtccccaccagcaccatgccgggggtaccagggcctgggcctgagctggccgcagcccttgaggagcagttgggccgggcactggaggagctgcgggcggtggctgaagcaggccgggtggcagtgacccaggcagccgaggtagctgtagccaccgtggagccggtggcccgggcagctgaagagctgcgggcagagagagcagcactgagccggcggctggatgcactgagcaggcaggtggaggtgctgagcctacggctgggggtcccacttgtgtccggccttgagcctgagctggagcccagcgagctgctcctggctgccgccgaccccgaggccctctttcaggctgccgaggatgccgggacccccgtggcccacccacctgccttcagcacccgccgccgctcctccaccggcaccacccgcagcactagtctcgtaagtgcttctgggttggtgggaggggtagttttgagccaggctctgcctcctcttgactttaggtatgtcaccaccttctctgagcctcagtttatctatcttgacaggggactggggcactagtgctctaagactagggcaagagggtgccaggctccagccctgaggcatgtgtggcagctgccttggcagcccctggcatgacccaggccccagcccccagctccctgccgccctgcaccctggccagaccaagcctccctgaaacagctgccacctcagctctccttacccttatagcagacggagaggccctgccaggagaggaagggccataatagttggcttggggccttgtcttcaaggggctagggagatgccctgggagggctgcagggctagagactccttagaggatggtttccagcaggggcgaggcagggggaggtggtacagaggagagcttcatagaggtcttggctcagggcagccccagtcagacacctggtcaggagcctacaggccccgggccagccctcttggcaaggtagcaggcagatggggggcaacatgtgctgcctgggcactggcccaggaggacctaggcctcgggaactggcagcacagagcagagcctgcctgggagggggctgggaacaaagcagcaaaatgaactaaggttcaggagttaggctgccttcagctcagatcccaggctgcatcacacttagagagagactgtgggcaagtcagttagctgccctgagcctcagtttccccttctgttttttttttttttttttccggtcttgttttctttgcaacagggtcttactctcttgcccagactggagtgcagctgcatgatcatagctctctgcagcctctaactcctgggctcaagtaatcctcctacctcagctttctgagtaggtgggactacaggtgcacaccaccatgcctagctaattttttatttttgtttttgtagagatgcggtctcgctatgttacccaggttggtctcaaactgctggcaacaagtgatccctcccacctcggcctcccaaactgttgacattacaggcatgagccactgcgcccggccttcccttctgttaaatagggacagtaaagtccctagtgtttatacaacacttactatggactggaaatcatcattattatcactatccattgtattaatacaattcggggtacgtgggaagccctacaacaaaactgtcagtgcctcttccctgactgacgctgacatggccatctttgggcaggcaggctggcaggctagtggttatttccaaggcgtgccagcaaccctaggatctgcttccctatccattggagacatgatgagtttcacccatacccctgcttaaagtccatgccctctccccaccctgcagatggaagcagagccagcagagcctctcgctgcagcagtggaagcggccaatggggctgagcagacccgagtgaacaaagcaccagaagggcggagccctctgagcgctgaggagctgatgactattgaggatgaaggagtcttggacaagatggtatagccagatccggtgggctgggggttggcagaggccagcaggcaccaggtaggcaatgatgggctctatatgcagctggatcagagcacggactttgaagagcggaagctcatccgggctgcacttcgtgagctccgacaaaggaagagaggtagagagccagttgccctaccctagatccagctgccccattccccagctgctcccctcatactctggggtccatttgtggacaccccagcttaataactgccctacccagcttctccttctctagacccagcagttcccttggctattccctgctggatccagctgctccttccctagctccttctctcccgctggtgaccccagttattctccccaaccagcttctcttctccttcctagacccagatactccctcccgcagctactctctccttggatccagttgcctctcaaagtactgtcaacgactccttccctgaatccagatactccttctccctgctgctcctctctccctgaagtccattgatggccatcttagcctctgccccatccagcttcccttttcctggacacaactacttcctcccccagatagttcttccctggacacatctattcattcccttagattctgggttcaattgcttctcctctcaaacactctcaattactcctctgaatctagctgcttctgccagggcccactgatggccaccccagtctctatctctacccacctacttctattttaagcccagttaacccccttcactagcttctctcccagctactcttcccctggatcagattgcttctcagatcccatcaattgctcccttcctggatctaaatattcctgcctccagctgctcttctcctccaaccaaagacctgctgatggcccacccagctacttcctcactcagcttctccttccttggactcagctaccccctcactagatctagatacccctcctgacttagctactcatgcctatagaaaccctttttggatccatacccctttgagtttagctactccgtattctctagtttctgcctgagtccatcaaacccttcccacactccattccctgtcaagttatggctgtcccctcaccccagctgctcctagagaggcccttgttacctgtgtcattcatgtttctaacaagccaccctccaccccgtcttgtgtgccccatgcacctgtgcatctgtgctgtgtgggtgttggtggcccttttgcgcatgcatggggcatcccctgcccagaccagcgggacaaggagcgggaacggcggctgcaggaggcacggggccggccaggggaggggcgcggcaacacagccactgagaccaccacgaggcacagccagcgggcagctgatggctctgctgtcagcactgttaccaagactgagcggctcgtccactccagtaaggggccaaatggggccggcccagggctcagggtgggaacacatcctcccccagccccctgtgcctttcacatccttctcatcccctgcccctgcagatgatggcacacggacggcccgcaccaccacagtggagtcgagtttcgtgaggcgctcggagagtaaggccacctggtgtcgccctgtgcctgcctgcctgtccgcccacctcctccggctcttccttgagctctctctccgtgtcttcaactgtgccgtcactttctcttctctgcctgcggctatcaccacccctccatacagcctcccatcccatctcctgatgtccagcccaggccctcacctggtgccccttccccttttttgcagatggcagtggcagcaccatgatgcaaaccaagaccttctcctcttcctcctcatccaagaagatgggcaggtgagcaccagcacccaatccctgaccatagaggagtcagtgccacaggggacctaactgcaaacccgttttacagaggggtgggctgggcacagtggctcttgcctgtaatcccagcactttgggaggccgaggtgggcggatcacttgaggtcaggagttcaagaccagcctggccaacatggtaaaacctcatctctactaaaaatacaaaaattagccgggcgtggtggcaggcacctgtaatcccaactactggggaggccgaggcacaagaatcacttgaacctgggaggcggaggttgcagtgagctgagatcactccactgcactccagtctgggcaacagagcgagactcagtctcaaaaataaatagataaataaataaataaataaataaataaataaataaaacagaggggtagactgggatgctgggaggtaataggtctatagccagggaggggcaaagtgagagttaaggatcctgctctccttgggatctcattttattctcaaccacaccacaggagaggtggatgctcagggaggccagtgagttgcttaggggctcacatctctgagtggctgcaatagcattgaacacttacagaggcctacctaccacactgagctgcctggtggcactgccacttcccagtatctgcaaaccatgtcccaggtcacacagcacctttataccttagccccatgagaaaggagggtacccccatgtaacagaggctgttggggctggcagaaagcaggaacaggatcagaatccaggatgagaaccaaaggggtccagagactctgaatcagagagaccttgttcaagttctagttccgcccatcacgtcctctgaaatcttaggcaagttactgccagaggtctcagtttcctcacctttagtggaattggtaaggcccctccctgctcttgtgaagtttaaaatggcacacaggaaaggatcaacagagatgaattattattattactattattatgctagtcatcatttttattatcggatagtgcccagaagctgaactcccctgtaacttgagggtacaatgaggcttctcagagaactactcgtgggtgggggagggggaggcggaaacctgttgaaaaccttgctgtcatttgagactcagtgtactcctctaaaatgcgtgtgatgaggacgcctccctccctggcaggcgtttgtggcagtggagatactagtgtgctacaagaccccccctcctcctcgcgagtggtggtccaggctggggagcagccctgctctccctgcctaacatgcgcctccccaacccctagcatcttcgaccgcgaggaccaggccagcccacgggccggcagcctggcggcgctcgagaaacggcaggccgagaagaagaaagagctgatgaaggcgcagagtctgcccaagacctcagcctcccaggcgcgcaaggccatgattgagaagctggagaaggagggcgcggccgggtgagctgcagaagtgggctgggcagtggggggcggggcgtgataggcagtggggggcggggcttgatagttggcccggcagaggcgggaagaccgcgcggctagatctgtggtgcaaaggcccgaaggtcatggaaggcggggcctgggatccactgggtgggcccaccgaggcatgccccttatagtcgtgtgacctggtcctgacaccgcccctacagcagccctggcggaccccgcgcagccgtgcagcgatccaccagcttcggggtccccaacgccaacagcatcaagcagatgctgctggactggtgtcgagccaagactcgcggctacgaggtgagccccgggaggccagggggcctggaggcctccccagaccccagctcaacacctccttcttagcagagctcctattacccagtacacttcctgccactgtgtggcctcacagggaacatggaaaggctcttggggtgaggaaactgaggctcaaagaggacacaaggcaagccctagattccagaatcagtgatgaagtaacagggcctcttgggtggtgggcagggttcaaggccggatcccactcttggagtcccctccttgttgctctgtaggaggccctgagtcaatttctctaaatgagggaaggagtgatgaggcatgaccatagccttagctgggtggcgctgggcctctcagtagctctgtcccttgaaattgcaaatatgggagttgacaggctgacttggaggaggctcatgttccaactattcactcattgtgcaagctacggggcctctttgtgcccagtgccctaggtctggaataacagaatgctgaggggtagacagcaggggggagttgcccccaggttcctgaccagtcctcctacggcttatagcacgtcgacatccagaacttctcctccagctggagtgatgggatggccttctgtgccctggtgcacaacttcttccctgaggccttcgactatgggcagcttagccctcagaaccgacgccagaacttcgaggtggccttctcatctgcggagtaagtgtgggccctggccctgctaatgttgctgcacatctggggctggacatcgggaccaggcccagttgccctgagaacccctggagcgggccagccacattgtcagtcagcggctgagacccccttccccagagagtccccgtccttctccatccccacccccccgctgctgagcgtgccaggtgcccgccggaacgaaggagccgcaggccggcctaccagcccgggccaaagcccaccaggtggccctgtccatatcccctccatcctccctctgcccccttctccctctctctccctttctctgtcctgctctcctcccactatcaccagagcttcctgctcccacgggatcccggctggagattccaaaaggaggctcctggcccgggcaccgtgcccgcccagcctatatagtgctgccagaggcttatataggacctcagcaagccctccactttggaatcgttgccccgtctgctcacctcaccctcagcacccttctccatctgtcttcccttctttccccttctctttctggtttccctcaaatttcttcctcctcctccttctcctcttcctcctccccccacctcctctcacgcctccctcaccccctctccccggggcacagccctcctctccaaccttggtgccaacgccatcgcccccaccccgcgttcccgcttgcccctagagttctctgcacctgtgactggtttggcccccacccttgtctgcattgcacaccattagtgatgggtagtgagcggcacgtccacagtggggaggaggcatgcggggggctggcagactgcagcactggaatcgtaattgaactcatgtctctgtgtgtgtgtgtgtatgtgtgtgtgtctctgtttcctcccctctctcttctctgcctcttccctctcttccccacccggggccctggcctcctgcccccgtcccccaccccttcccggccccctaccctccccaggacccatgcggactgcccgcagctcctggatacagaggacatggtgcggcttcgagagcctgactggaagtgcgtgtacacgtacatccaggaattctaccgctgtctggtccagaaggggctggtaaaaaccaaaaagtcctaacccctgctcggggccccacggtgagaaacgccgcctctaccacctgccccgtttcaccagaatctgctcagcaaggccagagagggtccagggaggcgggtgggggaagtaaggggggcatttagtcaagccagaggagccagacatagccctgtcttctggcagttcagggcccagcaggtgagaccattctaaatgggcagtgatgacccaggtgggcagcactgtgatgggggaagcccaggggagatgcctgacccaggctgcaggtctgggccccccatctgaaaaaagtgcaaactaagctgggatctgaacaagttcaggctaaaggagggagagggagttccaggcagaggaatcagcctaggcttagcagggcaagagagctggagagcacagcacatcaggaagggaagaaacttgagtctggatatgagggaggagggggccacagttagaagtttgaccttctggccgagcacggtggctcatgcctgtaatcccagcactttgggaggccaaggtgggcagatcacgaggtcatgagttcgagaccagcctgaccaacatggtgaaaccccatctctactaaaaatacaaaaattagccaggcgtgtggcgcacacctgtaatcctagcgactcaggaggctgaggtaggagaatcacttgaacccaggaggcgaaggttgcaatgagctgaaatcatgccactgcactccagcctgggtgacagagcgagactccatctcaaaaaaaaaaaaaaaaaaaaaaaagtttgaccttcctcctgaggacaacaggagttataaagggtttccaaacagagaagggatggatatagcattctaggaccttcctcggatgaggcttggatgagagatgggatggactagatgactggaatagcttaagagctagagagacaggcttcccaatagatctggtttggagagggagagggaaggtcaagaagtctgccaggctcctgtgtgggcactggggagttggtggtgccatactccaaagtggggagctcaggagcaggaccagttcaacaggaagatgtttctggctggggactctggatcctaagccagctgtggcatttcctctctggtcacctcacctcagtaccaaagtaaagaattcagatcctaaactaactaccccattacagacaaggagctcagagagagacgtgggctaagactgtcctgggggtgggagggagagggaagatggttaggtcagagctggggccagaaactgagactccaaactccccacttagtggctgttttccttgccccatcactgtgttcccgcccattttgtagagaggattgaaaatagaggcccagaaggagcaaggggattggctgaaggaatgtgagtcagtgacaggtaggggcacactcagatgcccctcagggcctggagccattgtggggggcagtccacatgtgcacacacacactcagagaaggagcacagatgagtggcggatgggcttggtgctatctccagatcatatatggacttaggagctgctgcccagcaagccagcttggagggagaggggcccagcccagccctgatccagttggaaagtgtgactcagccgtgctgttgctcaagttgcctggtgtttggcctgtcactggggcagcctgagccctgagccctgagccccagtgtaaacaatggctttataaggtctccagggaagggagtggggcgggagggagcaccaggttggagagggcggtcgggatccccaggacgatagccacagctggaagaagcttcagagagaggctgcctttgcatcatggtacagctcgggaaacaagcccagtctgggatagggatgaccctaggggcacgtggcacatcagcagcagacccagaaccctctcactcatcctaaattcttgtaaggtctcaaatgagatagagaataactgtcctgttctaaagagggggaaacagtcatagaaaagggccttatctagcacccacaactggttagggatacagtctggactaaaacagaggtgttcggtgttctgcctcccaggtttcttctctgaaggagtccaggtgagctgggggtaggcccagccctaccacagttctgagtttgtccataagggcacgagatgggaggtggtcttgggttctcaggtgtcttgagaataaggagcaattgttgccattatgccttccctgccataggaaactcattcagcaacattgaatgcttgctatgtcccaggtatggcagataggagggatcaaggcagaagaggtcttgctctgggggttgagggacaggggaaaaggagccagagagcagactccagcttcagagctctgggagctgtcagttgcttaataggcacaacccactcactccagagtggggaaaaggctttgccaacacccagaactgggggcctgggtcccatgcggcctagcctgcacttactaagccatggggcttgaaacaaatggctcctctgctctgtgactcagtttccttatctgtgaagggcagctagcattctgaaggatggccagaagggtggtccccccgagcatggcatagatggtccattggtattggctgggatcctcatctgcctcctctgctctacccaaggcaggtgataagggttagagaacccctctgctgcccacacgttccctggcctccatctccagcagcagggttatccccaccccctgtcaaagaataggggtccctgggcctctcaacaggaagtaccagatcaggcagctagcagacaatcatcggtggaccacagggccactagagtgagacctatccatagataaagattggccagtgatgaagcccatctgggtgcaaaggccgagctgagaggcttctaccaactggagtgtgccagtgagggtgagcagaaggtggtctccagggagaacatgggcagggtttggagccagcacctccccagggttggaggaagcagacccaggacctgcctgactgggatggggctctcttctgccatctccgcctccacctgcctagctctgctcccccgccccgagagatgcctccaggcttgggtagatgaagccaggggcttcctgccttcctggaaggcttttccctgtctggagtttatgaaagaccagcaggcaatgcggcaataaaaaagaccttggggtagaggggcgccacgagaggcgggtctggcgctgacatccaaccccgtgccccctccctgcaggatgctggtggactgtgtgcccctggtggaggtggacgacatgatgatcatgggcaagaagcctgaccccaagtgtgtcttcacctatgtgcagtcgctctacaaccacctgcgacgccacgaactgcgcctgcgcggcaagaatgtctagcctgcccgcccgcatggccagccagtggcaagctgccgcccccactctccgggcaccgtctcctgcctgtgcgtccgcccaccgctgccctgtctgttgcgacaccctcccccccacatacacacgcagcgttttgataaattattggttttcaacga

SEQ ID NO: 14150 - DNA, 3295 bp, Homo sapiens
cagaatccaggggacggttgctgagcgggcctgggacagcgggtcgcggcacctccggcctgcgcgtgtctaatccgtctgtcgggtcccgaaagagctaagccgagcctgcgccggacgggtgggctggactgagagaattctctgagctggtgacaggtgccacaggcactggggatctcaccagaaaggaaccgacggagctaggggccagcgagatggcggacgaggccttagctgggctggatgagggagcccttcggaagctgctggaggtcacagcagatctggcagagcggcggcgcatccgctcagccatccgggaactgcagcggcaggagctggagcgcgaggaggaggccctggcatccaagcgtttccgtgccgagcggcaggacaacaaggagaactggctgcactctcagcagcgggaagctgagcagcgggctgccctggcacggctggcagggcagctggagtccatgaacgatgtggaggaattgactgcactgttgcgaagcgctggtgagtatgaggagcgcaagctgatccgagctgccatccgccgtgtacgggctcaggagattgaggctgccaccttggctgggaggttgtacagcgggcgtcccaacagtggctcaagagaggacagcaaggggctagcggcacacaggctggaacagtgtgaggtgccagagcgagaggaacaggaacagcaggcagaggtttcaaagccaacccccacccctgaaggcaccagccaggatgtgaccacagtgacactcctgctgcgagccccacctgggagcacatccagctcacctgcctcacccagcagttcacccacccctgcctctcctgagcctccattggagcctgccgaggcccagtgccttacagctgaggttccaggcagcccagagccaccccccagcccacccaagaccaccagccctgagcctcaggagtctccaacgctccccagcactgagggccaggtggtcaacaagcttctgtctggccccaaagagacccctgctgcccagagccccaccagaggcccctctgacaccaagagagcagacgtggctggaccccgaccctgccaacgctccctgtcggtgctcagcccccgccaaccagcccagaaccgagagtccaccccccttgccagcggaccttcctcattccagcgggctggctctgtgcgggatcgtgtccacaagttcacatctgattctcctatggctgctaggctccaggatggcacaccccaggctgccctaagtcccctgacccccgcaaggctcctgggcccctccctcaccagcaccacccctgcctcctcctccagcggctcctcctctcggggccccagtgatacctcctcccggttcagcaaggagcaacgaggagtagcccagcccctggcccagcttcgaagctgcccccaggaggagggccccagggggcggggcttggctgctaggccccttgaaaacagagcaggggggcctgtggcacgttcagaggagcctggtgccccgctgcccgtggccgtcggcactgccgagccagggggcagtatgaagaccacattcaccatcgagatcaaggacggccgtggccaggcctccacaggccgggtgctgctgcccacaggcaaccagagggcagaactgacactggggctgcgggcgcccccgaccctactcagcaccagtagtgggggcaagagcaccatcacccgtgtcaacagccctgggaccctggctcggctgggcagtgtcactcatgtcaccagcttcagccatgccccccccagtagccgaggaggctgcagcatcaagatggaagcagagccagcagagcctctcgctgcagcagtggaagcggccaatggggctgagcagacccgagtgaacaaagcaccagaagggcggagccctctgagcgctgaggagctgatgactattgaggatgaaggagtcttggacaagatgctggatcagagcacggactttgaagagcggaagctcatccgggctgcacttcgtgagctccgacaaaggaagagagaccagcgggacaaggagcgggaacggcggctgcaggaggcacggggccggccaggggaggggcgcggcaacacagccactgagaccaccacgaggcacagccagcgggcagctgatggctctgctgtcagcactgttaccaagactgagcggctcgtccactccaatgatggcacacggacggcccgcaccaccacagtggagtcgagtttcgtgaggcgctcggagaatggcagtggcagcaccatgatgcaaaccaagaccttctcctcttcctcctcatccaagaagatgggcagcatcttcgaccgcgaggaccaggccagcccacgggccggcagcctggcggcgctcgagaaacggcaggccgagaagaagaaagagctgatgaaggcgcagagtctgcccaagacctcagcctcccaggcgcgcaaggccatgattgagaagctggagaaggagggcgcggccggcagccctggcggaccccgcgcagccgtgcagcgatccaccagcttcggggtccccaacgccaacagcatcaagcagatgctgctggactggtgtcgagccaagactcgcggctacgagcacgtcgacatccagaacttctcctccagctggagtgatgggatggccttctgtgccctggtgcacaacttcttccctgaggccttcgactatgggcagcttagccctcagaaccgacgccagaacttcgaggtggccttctcatctgcggagacccatgcggactgcccgcagctcctggatacagaggacatggtgcggcttcgagagcctgactggaagtgcgtgtacacgtacatccaggaattctaccgctgtctggtccagaaggggctggtaaaaaccaaaaagtcctaacccctgctcggggccccacggatgctggtggactgtgtgcccctggtggaggtggacgacatgatgatcatgggcaagaagcctgaccccaagtgtgtcttcacctatgtgcagtcgctctacaaccacctgcgacgccacgaactgcgcctgcgcggcaagaatgtctagcctgcccgcccgcatggccagccagtggcaagctgccgcccccactctccgggcaccgtctcctgcctgtgcgtccgcccaccgctgccctgtctgttgcgacaccctcccccccacatacacacgcagcgttttgataaattattggttttcaacga

SEQ ID NO: 14151 - DNA, 23306 bp, Homo sapiens; identical to SEQ ID NO: 14149

SEQ ID NO: 14152 - DNA, 3130 bp, Homo sapiens
cagaatccaggggacggttgctgagcgggcctgggacagcgggtcgcggcacctccggcctgcgcgtgtctaatccgtctgtcgggtcccgaaagagctaagccgagcctgcgccggacgggtgggctggactgagagaattctctgagctggtgacaggtgccacaggcactggggatctcaccagaaaggaaccgacggagctaggggccagcgagatggcggacgaggccttagctgggctggatgagggagcccttcggaagctgctggaggtcacagcagatctggcagagcggcggcgcatccgctcagccatccgggaactgcagcggcaggagctggagcgcgaggaggaggccctggcatccaagcgtttccgtgccgagcggcaggacaacaaggagaactggctgcactctcagcagcgggaagctgagcagcgggctgccctggcacggctggcagggcagctggagtccatgaacgatgtggaggaattgactgcactgttgcgaagcgctggtgagtatgaggagcgcaagctgatccgagctgccatccgccgtgtacgggctcaggagattgaggctgccaccttggctgggaggttgtacagcgggcgtcccaacagtggctcaagagaggacagcaaggggctagcggcacacaggctggaacagtgtgaggtgccagagcgagaggaacaggaacagcaggcagaggtttcaaagccaacccccacccctgaaggcaccagccaggatgtgaccacagtgacactcctgctgcgagccccacctgggagcacatccagctcacctgcctcacccagcagttcacccacccctgcctctcctgagcctccattggagcctgccgaggcccagtgccttacagctgaggttccaggcagcccagagccaccccccagcccacccaagaccaccagccctgagcctcaggagtctccaacgctccccagcactgagggccaggtggtcaacaagcttctgtctggccccaaagagacccctgctgcccagagccccaccagaggcccctctgacaccaagagagcagacgtggctggaccccgaccctgccaacgctccctgtcggtgctcagcccccgccaaccagcccagaaccgagagtccaccccccttgccagcggaccttcctcattccagcgggctggctctgtgcgggatcgtgtccacaagttcacatctgattctcctatggctgctaggctccaggatggcacaccccaggctgccctaagtcccctgacccccgcaaggctcctgggcccctccctcaccagcaccacccctgcctcctcctccagcggctcctcctctcggggccccagtgatacctcctcccggttcagcaaggagcaacgaggagtagcccagcccctggcccagcttcgaagctgcccccaggaggagggccccagggggcggggcttggctgctaggccccttgaaaacagagcaggggggcctgtggcacgttcagaggagcctggtgccccgctgcccgtggccgtcggcactgccgagccagggggcagtatgaagaccacattcaccatcgagatcaaggacggccgtggccaggcctccacaggccgggtgctgctgcccacaggcaaccagagggcagaactgacactggggctgcgggcgcccccgaccctactcagcaccagtagtgggggcaagagcaccatcacccgtgtcaacagccctgggaccctggctcggctgggcagtgtcactcatgtcaccagcttcagccatgccccccccagtagccgaggaggctgcagcatcaagatggaagcagagccagcagagcctctcgctgcagcagtggaagcggccaatggggctgagcagacccgagtgaacaaagcaccagaagggcggagccctctgagcgctgaggagctgatgactattgaggatgaaggagtcttggacaagatgctggatcagagcacggactttgaagagcggaagctcatccgggctgcacttcgtgagctccgacaaaggaagagagaccagcgggacaaggagcgggaacggcggctgcaggaggcacggggccggccaggggaggggcgcggcaacacagccactgagaccaccacgaggcacagccagcgggcagctgatggctctgctgtcagcactgttaccaagactgagcggctcgtccactccaatgatggcacacggacggcccgcaccaccacagtggagtcgagtttcgtgaggcgctcggagaatggcagtggcagcaccatgatgcaaaccaagaccttctcctcttcctcctcatccaagaagatgggcagcatcttcgaccgcgaggaccaggccagcccacgggccggcagcctggcggcgctcgagaaacggcaggccgagaagaagaaagagctgatgaaggcgcagagtctgcccaagacctcagcctcccaggcgcgcaaggccatgattgagaagctggagaaggagggcgcggccggcagccctggcggaccccgcgcagccgtgcagcgatccaccagcttcggggtccccaacgccaacagcatcaagcagatgctgctggactggtgtcgagccaagactcgcggctacgagcacgtcgacatccagaacttctcctccagctggagtgatgggatggccttctgtgccctggtgcacaacttcttccctgaggccttcgactatgggcagcttagccctcagaaccgacgccagaacttcgaggtggccttctcatctgcggagatgctggtggactgtgtgcccctggtggaggtggacgacatgatgatcatgggcaagaagcctgaccccaagtgtgtcttcacctatgtgcagtcgctctacaaccacctgcgacgccacgaactgcgcctgcgcggcaagaatgtctagcctgcccgcccgcatggccagccagtggcaagctgccgcccccactctccgggcaccgtctcctgcctgtgcgtccgcccaccgctgccctgtctgttgcgacaccctcccccccacatacacacgcagcgttttgataaattattggttttcaacga

SEQ ID NO: 14153 - DNA, 23305 bp, Homo sapiens
cagaatccaggggacggttgctgagcgggcctgggacagcgggtcgcggcacctccggcctgcgcgtgtctaatccgtctgtcgggtcccgaaagagctaagccgagcctgcgccggacgggtgggctggactgagaggtgggtgtgcggacctcgggggggatcctggtgctgccccaacgtgtccgggggtggaacccggatgtctagacaggagttctggaacgtccagacctgggagcccccacccatacgagaggtctaagccatgggataaagttatgagactgttgggggaagacgcccccggattcctaagagactccacgccccacaggggcgctagtctgtggcggcagaaaccctggggaagctgccacagaatcctgaggcccctcacaatgtccggcgaccccagactgtgtgacagggagattggagaagagcagcggcagggatcttcttataatcccatgggtgtcctagattaggcattagggtcagctgccccatagaagaacagacatggggggaatcagaatgtccgcagaacctaaggctggtgaccactggacagtcttgaagaggtttaacccagacagagtaactaggtaagaggcaaggatcctaacaggcagagattgggaggttgacacctctgagcctaccaggatgggagggggaacaagcagtgacttgaacaggctgggacccacacaccccaactgtgtggagcggtaaccctcaccccccacccatgcaccgtatggggtgacttcccaagtgactgttctgaagagagggaagggatgattgaaagatgaatcaacaggaggtggggggcaggcctggggccacacattagtcagtcaccatacattaactaagcatccacagtgtgccagaccagggcccctcaaattccagacagacattagttggggctacaggaggaaggagagatctgcgctgggaggctgggccaggatttaggggtccattttgatgggcagcactggggcaagatggggctcttgcctctgtcactgagagtgttccaggcccttgagggcactttggaagggagcttcggaagccggagatgacgaagattttgattacatccttctctgccctctaagtctttggcttcctccttgctcagtgacaaatccttggccctctccaatcttctcagtttgcctgaaatccaggggttgggcaggtcagcttctgaaagcccttccaggtggggaattgaattctgtatgaattggcaggaggtgctgggtgcctggacacctggcttcaggaggtctggacagcagagctggctccaagaatcggaagacacagtgtaccttcctatacctgggggaatgacagtggtggtggcagcaagaactacgggttcagcccacagccagaagctgagcctgcggagtgggtgggggctgggtaggccctgtggatgggtgggtggggcaggaaactggagactggagtgcaccccctggtggtaagcacagcttgggtgggtcttgccaggccctggcttctcaatccaggtccctgccctccctgttttgaggtttagacaggatgagagtccatcccaggccacacagcagactggcggccaagctggcagggctggaaccagagaccccctaccctgggtttggtgagttttccagcaaaccaccctagggcagagggcagcttccagccaggagccacattataggatgggacagtaatggacgctcctaggttagagagggaaagtaaggcacagagcctaagtgcctgtggtttctggaagccccagcatgcctgattcatgtctgtcccctgcagaattctctgagctggtgacaggtgccacaggcactggggatctcaccagaaaggaaccgacggagctaggggccagcgagatggcggacgaggccttagctgggctggatgagggagcccttcggaagctggtaagtggccccatcacccactgtggggacaggaaagccaagccagagaggcagggtcaatccagggtacctctcagctgacaggaagaagtgatgggggaaaggtcaggaggagggggacatgggaacaggggtaggccagttccatgtggctgatgcagaggcccttgtggcatgtgcctgtccatgcctggtactgaagcctagtccctcccaaccctccacagccaccacctgtttaaacagtaactgctgtagactcgcccgtatgcagccacaggtgtggggaggctggatatgcctctccagagcaatagctcgggcaatgcccacccctggaagctggcccagtgataatggtagcagcaatgattaataatgccaaggcctggcagggggcaggctgggtactgggtataccatgtcacagaataatcacagcagctctgaaagcctgggcactgcgactcaagagagttaaaatcacctgctcaaggacacccatctaagaaggagctgtgccaaaatcccaaccccatagtgggccacgggggaccagagtcctgggaaagtcaaggctggacgaggccataagagagagacaggttttgtgggcccttatggattctgtggcttctcatctcatttttctactcttgagtctcagttcctctacctgtaaaatgaagggagggagggagatgtgtttgcacacaagctctaggtcctagagttggcatggggacagaatgaggcatggacccagatctcaggtggaggaaagatgagcccactccatcccctttcttgttcctcttcctgagagccctgtctacctccatgcacagaggccgtagggcaacccagtggggcagggctccttccccaaccccaaaggccaggcagcctgacctggaggaggggccagaggagctccatctcctcagtccctgacccttgtccatgggggtaaattaaagatttactttacctagaagacaagtgacccaccccactctcataccttcccccgcaggcagaggctggaaccaaccagcgtagcccagccactgggcagtgcccagctgctgccatgacctccccaaggcactctgcctgtatgttctcggaccagcgcattagactctctgggtgtctgcctctccactatcaccgcaggatgtgtgcagcctggaggggatgaggttaggtttccaaaggtgcccgccagtcagttcgaccttccctcaggaagtccaagtcccagtgggggtcgtagaggcagcacagtccaaaaagagggaatgccaggcctggttcccgcacatcctcatctcaaggtatccacaggcaggctcagggttcttcagccgccacctccctctcttaagcgaggctcgggcggcgctggaaaagagttttggagagaagctggagcagtggttgaatctctgggaaaggacagatgagaacctgccccggtctcgggatcggtgcctctcgaagtctttccgaccccgggagcggctcctccagcacccggcgcccgccattactgcgccccgcgcgccggcccggcccccgctggcctcgtggcaagaacgggggcgtcccgagccgggctcctccccgcggggccgggccatataaggaaaagctaggcccgctccgcccgccctgcgccccagcgtctggccgatttggggacgcgggcagtcgcttccggccccggctcccgcacattcttgaggattgggccggggatgggaggaatggggacgcctggggacttgcacgccgcgtgcccctccaccacccgccgggacgccctctgcctcggtcccgagttcgagttcgacctccgccactcagctgggtgtcctggggaccttggtttcttccctttagatccggacactgaagcaggcggtagcgggtgtcttcctacctggctaccccttcggcgcctagcgcgaggcagggtgggcgaggcgagggcggcgccctgcgagggagggcggtcgcagaacctgcgggccttcagcgccccctggcgaggcttccctccaccgccggcgggacccccatgggcaaccgggggagctgggactgaaagcctggagagccccctccgttgtgctgttggggagactgaggcccagtgagacctcagggcctgccaggcgttcccaacagcgagggcagagagtacacggagagccggctccccagggggaggaagcaccctctttcctcccgggagaatttcactgggcagtttcggaaaccgccccatccccttccccttccccctcggtagacaatggcgctttgtacttccttccctccctcccacagctccctccttacacagcggtggggcctgggcgggtggaactcgggacacacagaggagacactgtggtccaacctttgcctccaggcccaaagggaagggtcgtgccagagggtgaccagtggaatgaggttgtcagtctccagccttgcccacccactttgggggatcagagggaggctcccattttccagatggggacactgaagctccgggggttgtgctgtagaggtggccaagttcctacatcaggcttttgtcagagacaaggaccccatctccgagcccagagcactgagaatggggacctaggagacaaaaggctagcccttgcccctctgggcctctttaccctctgtacagaaggggctggaccctctgtcccctccagcccccagcctccaaatgtaccacagaaggctctaggcctgagacacagccagcaccgggggctggggagtgagcctcattccccccgcctctgctataaggcctccttaggcctcagagcatctctagtccaggctagaggggtctccaacacagtgccaggatccctgaggtccccaccatgacacacagaccccagtagcagagctatcttcagcctagggcaggccctggagtcagagagacctgggttcaaatcctggctcaggtcatttgaccatgagcaaatcacatgtcctccctggacttcaatctcctcatctgtcaaatgggaataacagtagtatctagggtttttgtgggcttaggacaagtagggggctcagcacagggtttgactcacaggctctccataaatgttactgatgcctcggggtatcctgcccttcccatttgcccccttgtctctctccctcctcctgactggctagaaccaagtatgggggtgatgcttattgcaactgcagctatgtacaggagaggccaagtcactgttcccaaccccacccactggcaaatgaaaaaaccaagacacagagagtttaagggatatgctcttgatcacccagccaggattggactagggctggaaccaactaagggctctggcctgagtttcagggggtcttctcataattcctcaggaatgtggagcctggagggctcttcccccaagactctccctgctctcttcagactaggacaagctggctcatggctgagttgggccagcccacactccctgctgaaaactatctccatcccatccccacccttgccacctggccttcccgctaagcagaaaggaatgacgggggggcgctaaaaagggagatgatagagggttctttggccctacccctgaatgatttggggggtggggacagaggaaatcaccccgcctttactggctcccgtctggttatcagacccacactggaggcttatctctgccactatcttccaggggaaccctgggccagtcctctctcccttgagccacggaggatctgtatgtagcaggtggctctacatggtggaggtgtgggggaggcaacaggattggctgactcactccagagaaggtgttctttcctgaacctggttagaccagtcacccccaatttcccgggaactgaggggttgagaaccggtagaagcagctgtcacccagggatgccctctataaggccctggggtggcccctagtgccagccaccttatatgtctgggggattggtcctcccactctgcaccctggcttcttccatggtggctaggtccaggccagtgcagtggggacaatagccctcagccaggcaggactcctgagcacctgtcctcagtttccccatctgtggatgaagcagtcaacccccagctgggctgtggtgtttggtgactagaccagggagcctcccttgctcagagggtggacttcatctgtcacctttccctctagggaccctgttagtgacccacagggtggcctccctcctcctcctacaatagctccctgacttttggggatctgggctctgagaggcaggaatcgagttgtagaaaggagtgcctggcttggcacctggcacaagtgggcagtttctggctgtccactcacagttgtgtgctctgtgaaccacaatgcaaagtggactacccaagatccctgaaacagtgggctgggtctacccccgggaccctgcgtgggcaggcaggcacgtgaagagcttgggacacagggagtggacacaggccacacattgtgccctaggcagagccgtgggcagctggtgccagccctccgcccctggcagccaaaatgacctgcctctcgcacccactgcagctggaggtcacagcagatctggcagagcggcggcgcatccgctcagccatccgggaactgcagcggcaggagctggagcgcgaggaggaggccctggcatccaagcgtttccgtgccgagcggcaggacaacaaggagaactggctgcagtgagtagcggggggtggaacatgcgggtgagaaggtgagtgtgagccctggctcagctcatgtgtgcaggcaggcgtgagcacaagtgtatctgtggattgcatgtgctaatggcagtacgtccacacacgcttctggaaaaacagagatgtttgtgggcatggagcatgtactgattgtggcgtcgcggccgtgctgatgtagccagcacgtctgagtgtgtggtattagtgcccacgtccatgggcatatgtgtatcagtgtgcagttagagggtgtgcacagccacatgcccttctgccaaggttctgggtactctgttctggctcctacccttagcccacatcctccacgacctggccatggcagtggtggttacagtcatgatgtctctgcagctctcagcagcgggaagctgagcagcgggctgccctggcacggctggcagggcagctggagtccatgaacgatgtggaggaattgactgcactggtgaggcccaggctggggcaggggatgggggcagggcaggtgaagacctggactccacagcccaacacccgcgacctgtctcttacccacagttgcgaagcgctggtgagtatgaggagcgcaagctgatccgagctgccatccgccgtgtacgggctcaggagattgagggtatgtggcctgtcccggccccacccctgccctgctgtctgctgtccacagcacctccctgtcactcacctgccacttgctccttcccttccagctgccaccttggctgggaggttgtacagcgggcgtcccaacagtggctcaagagaggacagcaaggggctagcggcacacaggctggaacagtgtgaggtaaggagggtgggagagtggcccagtgtcctgtgcccatggataccggtagcacagagtgcctgagtgtctttgctaggctggtatttcactgtaaggggcccacccctgccatccagcctctatttagcagtcagagggatctcccagaaatgcaaatccggccctggcacctcccctgcttcaacccgtcccagggctgcccctcaccctccacacagcccacatctttaccttggcttatggggcctgcatgtcagaccccagctggctcacagttcactctattttccagagtgtgggtgagaggtcaggccatgcaggttccccaagtggccagcagaggccgctgggtccacggtcctggcaggaccccactcccactccagatgaaccaggctgaggccaggagtcaggaacctccactccagggatctattaaggctcccgtccccaataggtctcctgccatacccacccactgacatcaggacctggtcctctctgaacccctttggctaggtagtgccaagagattgggaagtggggatcagagactgcccttagcatgccagtgccagtgcttgcgcaggtgtgcctacaggaagccatgccccaccactctgctttgcatgccctgccctgggcacttgccagcctggccctcagtggtgggggtggcgttcaaagcctagggagccttggttgcatcctgtgggtcccttacaggtgccagagcgagaggaacaggaacagcaggcagaggtttcaaagccaacccccacccctgaaggcaccagccaggatgtgaccacagtgacactcctgctgcgagccccacctgggagcacatccagctcacctgcctcacccagcagttcacccacccctgcctctcctgagcctccattggagcctgccgaggcccagtgccttacagctgaggttccaggcagcccagagccaccccccagcccacccaagaccaccagccctgagcctcaggagtctccaacgctccccagcactgagggccaggtggtcaacaaggtgagtctggatgaggggcagggatgccaggcaagtgagcaggtctgggagtcaggccttgctcaggccctgttcttctcccttgcagcttctgtctggccccaaagagacccctgctgcccagagccccaccagaggcccctctgacaccaagagagcaggtgagggtcccagcaggggtagtcacaggcatctttcttcccctccccctgcctccctttccctgcctagaaaatgggctcttgtgcctggcagctctagcttcctcaggtccatgcagtccctgatactgcaccccacccctgaagtgtccccgcccccagctaggccagcctccccctccacccccatggctagaggcctcccctgcagccttgaaaggcaacgggcctcaggcacattcttctccccaataagggagtccacccatctcccagctggagctgtgggcagcactggccaggagggctgtcccccctccccatctgcagaaaggatctgggcacccttcctccagcctaagcctcgcctggcccccaggagtgtccaagtcatcctagggtcagtgtggcaggagaaggaggtgcctgtaggagagatgcagccgagtggggatgccggagtgtgggagatccaggaggggatggagaggtggggtgggggttgagtacaggaaagggtgggaagctagggaggtgtagaggagaggattatgaaaggtggacacccactatcccctgtcttttctctttccccacatggccatcaccccctccccaacctgccagacgtggctggaccccgaccctgccaacgctccctgtcggtgctcagcccccgccaaccagcccagaaccgaggtactacctattctcaccctgcctaggatctgtgcagaccctgtcccacccagttgctgacagccctcctgttccttctagagtccaccccccttgccagcggaccttcctcattccagcgggctggctctgtgcgggatcgtgtccacaagttcacatctgattctcctatggctgctaggctccaggatggcacaccccaggctgccctaagtcccctgacccccgcaaggctcctgggcccctccctcaccagcaccacccctgcctcctcctccagcggctcctcctctcggggccccagtgatacctcctcccggttcagcaaggagcaacgaggagtagcccagcccctggcccagcttcgaagctgcccccaggaggagggccccagggggcggggcttggctgctaggccccttgaaaacagagcaggggggcctgtggcacgttcagaggagcctggtgccccgctgcccgtggccgtcggcactgccgagccagggggcagtatgaagaccacattcaccatcgagatcaaggacggccgtggccaggcctccacaggccgggtgctgctgcccacaggcaaccagagggcaggtaggcgccccccactgcctccccaatggggatgagtgcctgcaaccgcacttctgcatgcaggacaggtgctgcggccaggactcagggtgtctccaaagggtgtgctgggagcgagggcattatcaaccttgtctggcactgccctcactccacctgatcctcctgacagccacctttctccccactcagaactgacactggggctgcgggcgcccccgaccctactcagcaccagtagtgggggcaagagcaccatcacccgtgtcaacagccctgggaccctggctcggctgggcagtgtcactcatgtcaccagcttcagccatgccccccccagtagccgaggaggctgcagcatcaaggtgagcccctcctcaccccaccagcctcaccatccgtcagcctcacatacactgcttcagggtgtagggctagcagggttcctctgctcctcccctactgcacacacagagaaaccgaggcccagagagggaaggtggctgctcacagaccacagccagtcggtggcagagctaaggccagaccctagcatatcagtccctaagtgtgtcggaagcttactctgtactggcgttaagcttcctggatgctgatctctgatccttagttcgaaattggttggttcattcctggtgaacagatggggaaactgaggctcagagagggtggtaagggcttgctcccctcttcctgtggcagccccagtgcccctgcgcccacccacactggacatcagccccgaggtatagagcagctcatctgctcatccaagatcagcctggcccattaggagattggagattagtgattagcatctgcgtcaacctccctgtgggggttgggcagaagctctgaggggggacagacaggcagaggggcgccaatcaggtgaggcagcagcctagcaggtgccttgggaactgaatacgcagcacccttccattattcattcccaagcccaggatccactagccgggagctcagccgggaaagggatccccaagcgggccacccggctgcccaggtaatgccctctgtgctaaaccagggactgaatgggactttggctgaggtgagatggctagaccagctttgggccttctcaggggagacagggagagagtgagggaaataaagcacccttcctttccaaaaaagcaggatccagctgccctctgacaagggattgtgtggggtggggtggggggacccgctgaggcccttgaggtggatgggaggtgccacagtgagacctgggtctgacaccaccaacttgcctcagtttacccatctggaaccaaaggggacaggtgatgtacccataatgtgcttgctcaaagtctgtggttggacgtgagcaccatgggcaggccagagggcatttatgtaagaccaagacactttttatagcagatcactcaaagtcctgcctccctgtgcctccatttcccccatctgttccagctgtctaaaacagctggagttagggtaaagggtaaaggagtacaggctgtggagtccagcagactgattctcacagctaatgtacatggtggctaggccaggtccattccctgttccctgcctcagtttccccacctgtgaggcatggggccccgatctcagtgatcttcagaacccatgcagtcttactgtgctgcaggcctatgatttctgtagggctatagccaggcctggcgatccgcctgcttgggcaggccccccctcccccactgccccttccacggaggagcccagaataggtttctatttgggctgcagctccagctggctggtggcgggctgggaggcaggggcggggcaggcccgctgcccttgcctttgccctcggaccagctgcaaagactcagacactcagccagagacagcagcccctgccactgccccaccattaccccccatagagtccccaccagcaccatgccgggggtaccagggcctgggcctgagctggccgcagcccttgaggagcagttgggccgggcactggaggagctgcgggcggtggctgaagcaggccgggtggcagtgacccaggcagccgaggtagctgtagccaccgtggagccggtggcccgggcagctgaagagctgcgggcagagagagcagcactgagccggcggctggatgcactgagcaggcaggtggaggtgctgagcctacggctgggggtcccacttgtgtccggccttgagcctgagctggagcccagcgagctgctcctggctgccgccgaccccgaggccctctttcaggctgccgaggatgccgggacccccgtggcccacccacctgccttcagcacccgccgccgctcctccaccggcaccacccgcagcactagtctcgtaagtgcttctgggttggtgggaggggtagttttgagccaggctctgcctcctcttgactttaggtatgtcaccaccttctctgagcctcagtttatctatcttgacaggggactggggcactagtgctctaagactagggcaagagggtgccaggctccagccctgaggcatgtgtggcagctgccttggcagcccctggcatgacccaggccccagcccccagctccctgccgccctgcaccctggccagaccaagcctccctgaaacagctgccacctcagctctccttacccttatagcagacggagaggccctgccaggagaggaagggccataatagttggcttggggccttgtcttcaaggggctagggagatgccctgggagggctgcagggctagagactccttagaggatggtttccagcaggggcgaggcagggggaggtggtacagaggagagcttcatagaggtcttggctcagggcagccccagtcagacacctggtcaggagcctacaggccccgggccagccctcttggcaaggtagcaggcagatggggggcaacatgtgctgcctgggcactggcccaggaggacctaggcctcgggaactggcagcacagagcagagcctgcctgggagggggctgggaacaaagcagcaaaatgaactaaggttcaggagttaggctgccttcagctcagatcccaggctgcatcacacttagagagagactgtgggcaagtcagttagctgccctgagcctcagtttccccttctgttttttttttttttttttccggtcttgttttctttgcaacagggtcttactctcttgcccagactggagtgcagctgcatgatcatagctctctgcagcctctaactcctgggctcaagtaatcctcctacctcagctttctgagtaggtgggactacaggtgcacaccaccatgcctagctaattttttatttttgtttttgtagagatgcggtctcgctatgttacccaggttggtctcaaactgctggcaacaagtgatccctcccacctcggcctcccaaactgttgacattacaggcatgagccactgcgcccggccttcccttctgttaaatagggacagtaaagtccctagtgtttatacaacacttactatggactggaaatcatcattattatcactatccattgtattaatacaattcggggtacgtgggaagccctacaacaaaactgtcagtgcctcttccctgactgacgctgacatggccatctttgggcaggcaggctggcaggctagtggttatttccaaggcgtgccagcaaccctaggatctgcttccctatccattggagacatgatgagtttcacccatacccctgcttaaagtccatgccctctccccaccctgcagatggaagcagagccagcagagcctctcgctgcagcagtggaagcggccaatggggctgagcagacccgagtgaacaaagcaccagaagggcggagccctctgagcgctgaggagctgatgactattgaggatgaaggagtcttggacaagatggtatagccagatccggtgggctgggggttggcagaggccagcaggcaccaggtaggcaatgatgggctctatatgcagctggatcagagcacggactttgaagagcggaagctcatccgggctgcacttcgtgagctccgacaaaggaagagaggtagagagccagttgccctaccctagatccagctgccccattccccagctgctcccctcatactctggggtccatttgtggacaccccagcttaataactgccctacccagcttctccttctctagacccagcagttcccttggctattccctgctggatccagctgctccttccctagctccttctctcccgctggtgaccccagttattctccccaaccagcttctcttctccttcctagacccagatactccctcccgcagctactctctccttggatccagttgcctctcaaagtactgtcaacgactccttccctgaatccagatactccttctccctgctgctcctctctccctgaagtccattgatggccatcttagcctctgccccatccagcttcccttttcctggacacaactacttcctcccccagatagttcttccctggacacatctattcattcccttagattctgggttcaattgcttctcctctcaaacactctcaattactcctctgaatctagctgcttctgccagggcccactgatggccaccccagtctctatctctacccacctacttctattttaagcccagttaacccccttcactagcttctctcccagctactcttcccctggatcagattgcttctcagatcccatcaattgctcccttcctggatctaaatattcctgcctccagctgctcttctcctccaaccaaagacctgctgatggcccacccagctacttcctcactcagcttctccttccttggactcagctaccccctcactagatctagatacccctcctgacttagctactcatgcctatagaaaccctttttggatccatacccctttgagtttagctactccgtattctctagtttctgcctgagtccatcaaacccttcccacactccattccctgtcaagttatggctgtcccctcaccccagctgctcctagagaggcccttgttacctgtgtcattcatgtttctaacaagccaccctccaccccgtcttgtgtgccccatgcacctgtgcatctgtgctgtgtgggtgttggtggcccttttgcgcatgcatggggcatcccctgcccagaccagcgggacaaggagcgggaacggcggctgcaggaggcacggggccggccaggggaggggcgcggcaacacagccactgagaccaccacgaggcacagccagcgggcagctgatggctctgctgtcagcactgttaccaagactgagcggctcgtccactccagtaaggggccaaatggggccggcccagggctcagggtgggaacacatcctcccccagccccctgtgcctttcacatccttctcatcccctgcccctgcagatgatggcacacggacggcccgcaccaccacagtggagtcgagtttcgtgaggcgctcggagagtaaggccacctggtgtcgccctgtgcctgcctgcctgtccgcccacctcctccggctcttccttgagctctctctccgtgtcttcaactgtgccgtcactttctcttctctgcctgcggctatcaccacccctccatacagcctcccatcccatctcctgatgtccagcccaggccctcacctggtgccccttccccttttttgcagatggcagtggcagcaccatgatgcaaaccaagaccttctcctcttcctcctcatccaagaagatgggcaggtgagcaccagcacccaatccctgaccatagaggagtcagtgccacaggggacctaactgcaaacccgttttacagaggggtgggctgggcacagtggctcttgcctgtaatcccagcactttgggaggccgaggtgggcggatcacttgaggtcaggagttcaagaccagcctggccaacatggtaaaacctcatctctactaaaaatacaaaaattagccgggcgtggtggcaggcacctgtaatcccaactactggggaggccgaggcacaagaatcacttgaacctgggaggcggaggttgcagtgagctgagatcactccactgcactccagtctgggcaacagagcgagactcagtctcaaaaataaatagataaataaataaataaataaataaataaataaataaaacagaggggtagactgggatgctgggaggtaataggtctatagccagggaggggcaaagtgagagttaaggatcctgctctccttgggatctcattttattctcaaccacaccacaggagaggtggatgctcagggaggccagtgagttgcttaggggctcacatctctgagtggctgcaatagcattgaacacttacagaggcctacctaccacactgagctgcctggtggcactgccacttcccagtatctgcaaaccatgtcccaggtcacacagcacctttataccttagccccatgagaaaggagggtacccccatgtaacagaggctgttggggctggcagaaagcaggaacaggatcagaatccaggatgagaaccaaaggggtccagagactctgaatcagagagaccttgttcaagttctagttccgcccatcacgtcctctgaaatcttaggcaagttactgccagaggtctcagtttcctcacctttagtggaattggtaaggcccctccctgctcttgtgaagtttaaaatggcacacaggaaaggatcaacagagatgaattattattattactattattatgctagtcatcatttttattatcggatagtgcccagaagctgaactcccctgtaacttgagggtacaatgaggcttctcagagaactactcgtgggtgggggagggggaggcggaaacctgttgaaaaccttgctgtcatttgagactcagtgtactcctctaaaatgcgtgtgatgaggacgcctccctccctggcaggcgtttgtggcagtggagatactagtgtgctacaagaccccccctcctcctcgcgagtggtggtccaggctggggagcagccctgctctccctgcctaacatgcgcctccccaacccctagcatcttcgaccgcgaggaccaggccagcccacgggccggcagcctggcggcgctcgagaaacggcaggccgagaagaagaaagagctgatgaaggcgcagagtctgcccaagacctcagcctcccaggcgcgcaaggccatgattgagaagctggagaaggagggcgcggccgggtgagctgcagaagtgggctgggcagtggggggcggggcgtgataggcagtggggggcggggcttgatagttggcccggcagaggcgggaagaccgcgcggctagatctgtggtgcaaaggcccgaaggtcatggaaggcggggcctgggatccactgggtgggcccaccgaggcatgccccttatagtcgtgtgacctggtcctgacaccgcccctacagcagccctggcggaccccgcgcagccgtgcagcgatccaccagcttcggggtccccaacgccaacagcatcaagcagatgctgctggactggtgtcgagccaagactcgcggctacgaggtgagccccgggaggccagggggcctggaggcctccccagaccccagctcaacacctccttcttagcagagctcctattacccagtacacttcctgccactgtgtggcctcacagggaacatggaaaggctcttggggtgaggaaactgaggctcaaagaggacacaaggcaagccctagattccagaatcagtgatgaagtaacagggcctcttgggtggtgggcagggttcaaggccggatcccactcttggagtcccctccttgttgctctgtaggaggccctgagtcaatttctctaaatgagggaaggagtgatgaggcatgaccatagccttagctgggtggcgctgggcctctcagtagctctgtcccttgaaattgcaaatatgggagttgacaggctgacttggaggaggctcatgttccaactattcactcattgtgcaagctacggggcctctttgtgcccagtgccctaggtctggaataacagaatgctgaggggtagacagcaggggggagttgcccccaggttcctgaccagtcctcctacggcttatagcacgtcgacatccagaacttctcctccagctggagtgatgggatggccttctgtgccctggtgcacaacttcttccctgaggccttcgactatgggcagcttagccctcagaaccgacgccagaacttcgaggtggccttctcatctgcggagtaagtgtgggccctggccctgctaatgttgctgcacatctggggctggacatcgggaccaggcccagttgccctgagaacccctggagcgggccagccacattgtcagtcagcggctgagacccccttccccagagagtccccgtccttctccatccccacccccccgctgctgagcgtgccaggtgcccgccggaacgaaggagccgcaggccggcctaccagcccgggccaaagcccaccaggtggccctgtccatatcccctccatcctccctctgcccccttctccctctctctccctttctctgtcctgctctcctcccactatcaccagagcttcctgctcccacgggatcccggctggagattccaaaaggaggctcctggcccgggcaccgtgcccgcccagcctatatagtgctgccagaggcttatataggacctcagcaagccctccactttggaatcgttgccccgtctgctcacctcaccctcagcacccttctccatctgtcttcccttctttccccttctctttctggtttccctcaaatttcttcctcctcctccttctcctcttcctcctccccccacctcctctcacgcctccctcaccccctctccccggggcacagccctcctctccaaccttggtgccaacgccatcgcccccaccccgcgttcccgcttgcccctagagttctctgcacctgtgactggtttggcccccacccttgtctgcattgcacaccattagtgatgggtagtgagcggcacgtccacagtggggaggaggcatgcggggggctggcagactgcagcactggaatcgtaattgaactcatgtctctgtgtgtgtgtgtgtatgtgtgtgtgtctctgtttcctcccctctctcttctctgcctcttccctctcttccccacccggggccctggcctcctgcccccgtcccccaccccttcccggccccctaccctccccaggacccatgcggactgcccgcagctcctggatacagaggacatggtgcggcttcgagagcctgactggaagtgcgtgtacacgtacatccaggaattctaccgctgtctggtccagaaggggctggtaaaaaccaaaaagtcctaacccctgctcggggccccacggtgagaaacgccgcctctaccacctgccccgtttcaccagaatctgctcagcaaggccagagagggtccagggaggcgggtgggggaagtaaggggggcatttagtcaagccagaggagccagacatagccctgtcttctggcagttcagggcccagcaggtgagaccattctaaatgggcagtgatgacccaggtgggcagcactgtgatgggggaagcccaggggagatgcctgacccaggctgcaggtctgggccccccatctgaaaaaagtgcaaactaagctgggatctgaacaagttcaggctaaaggagggagagggagttccaggcagaggaatcagcctaggcttagcagggcaagagagctggagagcacagcacatcaggaagggaagaaacttgagtctggatatgagggaggagggggccacagttagaagtttgaccttctggccgagcacggtggctcatgcctgtaatcccagcactttgggaggccaaggtgggcagatcacgaggtcatgagttcgagaccagcctgaccaacatggtgaaaccccatctctactaaaaatacaaaaattagccaggcgtgtggcgcacacctgtaatcctagcgactcaggaggctgaggtaggagaatcacttgaacccaggaggcgaaggttgcaatgagctgaaatcatgccactgcactccagcctgggtgacagagcgagactccatctcaaaaaaaaaaaaaaaaaaaaaaaagtttgaccttcctcctgaggacaacaggagttataaagggtttccaaacagagaagggatggatatagcattctaggaccttcctcggatgaggcttggatgagagatgggatggactagatgactggaatagcttaagagctagagagacaggcttcccaatagatctggtttggagagggagagggaaggtcaagaagtctgccaggctcctgtgtgggcactggggagttggtggtgccatactccaaagtggggagctcaggagcaggaccagttcaacaggaagatgtttctggctggggactctggatcctaagccagctgtggcatttcctctctggtcacctcacctcagtaccaaagtaaagaattcagatcctaaactaactaccccattacagacaaggagctcagagagagacgtgggctaagactgtcctgggggtgggagggagagggaagatggttaggtcagagctggggccagaaactgagactccaaactccccacttagtggctgttttccttgccccatcactgtgttcccgcccattttgtagagaggattgaaaatagaggcccagaaggagcaaggggattggctgaaggaatgtgagtcagtgacaggtaggggcacactcagatgcccctcagggcctggagccattgtggggggcagtccacatgtgcacacacacactcagagaaggagcacagatgagtggcggatgggcttggtgctatctccagatcatatatggacttaggagctgctgcccagcaagccagcttggagggagaggggcccagcccagccctgatccagttggaaagtgtgactcagccgtgctgttgctcaagttgcctggtgtttggcctgtcactggggcagcctgagccctgagccctgagccccagtgtaaacaatggctttataaggtctccagggaagggagtggggcgggagggagcaccaggttggagagggcggtcgggatccccaggacgatagccacagctggaagaagcttcagagagaggctgcctttgcatcatggtacagctcgggaaacaagcccagtctgggatagggatgaccctaggggcacgtggcacatcagcagcagacccagaaccctctcactcatcctaaattcttgtaaggtctcaaatgagatagagaataactgtcctgttctaaagagggggaaacagtcatagaaaagggccttatctagcacccacaactggttagggatacagtctggactaaaacagaggtgttcggtgttctgcctcccaggtttcttctctgaaggagtccaggtgagctgggggtaggcccagccctaccacagttctgagtttgtccataagggcacgagatgggaggtggtcttgggttctcaggtgtcttgagaataaggagcaattgttgccattatgccttccctgccataggaaactcattcagcaacattgaatgcttgctatgtcccaggtatggcagataggagggatcaaggcagaagaggtcttgctctgggggttgagggacaggggaaaaggagccagagagcagactccagcttcagagctctgggagctgtcagttgcttaataggcacaacccactcactccagagtggggaaaaggctttgccaacacccagaactgggggcctgggtcccatgcggcctagcctgcacttactaagccatggggcttgaaacaaatggctcctctgctctgtgactcagtttccttatctgtgaagggcagctagcattctgaaggatggccagaagggtggtccccccgagcatggcatagatggtccattggtattggctgggatcctcatctgcctcctctgctctacccaaggcaggtgataagggttagagaacccctctgctgcccacacgttccctggcctccatctccagcagcagggttatccccaccccctgtcaaagaataggggtccctgggcctctcaacaggaagtaccagatcaggcagctagcagacaatcatcggtggaccacagggccactagagtgagacctatccatagataaagattggccagtgatgaagcccatctgggtgcaaaggccgagctgagaggcttctaccaactggagtgtgccagtgagggtgagcagaaggtggtctccagggagaacatgggcagggtttggagccagcacctccccagggttggaggaagcagacccaggacctgcctgactgggatggggctctcttctgccatctccgcctccacctgcctagctctgctcccccgccccgagagatgcctccaggcttgggtagatgaagccaggggcttcctgccttcctggaaggcttttccctgtctggagtttatgaaagaccagcaggcaatgcggcaataaaaaagaccttggggtagaggggcgccacgagaggcgggtctggcgctgacatccaaccccgtgccccctccctgcaggatgctggtggactgtgtgcccctggtggaggtggacgacatgatgatcatgggcaagaagcctgaccccaagtgtgtcttcacctatgtgcagtcgctctacaaccacctgcgacgccacgaactgcgcctgcgcggcaagaatgtctagcctgcccgcccgcatggccagccagtggcaagctgccgcccccactctccgggcaccgtctcctgcctgtgcgtccgcccaccgctgccctgtctgttgcgacaccctcccccccacatacacacgcagcgttttgataaattattggttttcaacg

SEQ ID NO: 14154 - DNA, 3198 bp, Homo sapiens
cagaatccaggggacggttgctgagcgggcctgggacagcgggtcgcggcacctccggcctgcgcgtgtctaatccgtctgtcgggtcccgaaagagctaagccgagcctgcgccggacgggtgggctggactgagagaattctctgagctggtgacaggtgccacaggcactggggatctcaccagaaaggaaccgacggagctaggggccagcgagatggcggacgaggccttagctgggctggatgagggagcccttcggaagctgctggaggtcacagcagatctggcagagcggcggcgcatccgctcagccatccgggaactgcagcggcaggagctggagcgcgaggaggaggccctggcatccaagcgtttccgtgccgagcggcaggacaacaaggagaactggctgcactctcagcagcgggaagctgagcagcgggctgccctggcacggctggcagggcagctggagtccatgaacgatgtggaggaattgactgcactgttgcgaagcgctggtgagtatgaggagcgcaagctgatccgagctgccatccgccgtgtacgggctcaggagattgaggctgccaccttggctgggaggttgtacagcgggcgtcccaacagtggctcaagagaggacagcaaggggctagcggcacacaggctggaacagtgtgaggtgccagagcgagaggaacaggaacagcaggcagaggtttcaaagccaacccccacccctgaaggcaccagccaggatgtgaccacagtgacactcctgctgcgagccccacctgggagcacatccagctcacctgcctcacccagcagttcacccacccctgcctctcctgagcctccattggagcctgccgaggcccagtgccttacagctgaggttccaggcagcccagagccaccccccagcccacccaagaccaccagccctgagcctcaggagtctccaacgctccccagcactgagggccaggtggtcaacaagcttctgtctggccccaaagagacccctgctgcccagagccccaccagaggcccctctgacaccaagagagcagacgtggctggaccccgaccctgccaacgctccctgtcggtgctcagcccccgccaaccagcccagaaccgagagtccaccccccttgccagcggaccttcctcattccagcgggctggctctgtgcgggatcgtgtccacaagttcacatctgattctcctatggctgctaggctccaggatggcacaccccaggctgccctaagtcccctgacccccgcaaggctcctgggcccctccctcaccagcaccacccctgcctcctcctccagcggctcctcctctcggggccccagtgatacctcctcccggttcagcaaggagcaacgaggagtagcccagcccctggcccagcttcgaagctgcccccaggaggagggccccagggggcggggcttggctgctaggccccttgaaaacagagcaggggggcctgtggcacgttcagaggagcctggtgccccgctgcccgtggccgtcggcactgccgagccagggggcagtatgaagaccacattcaccatcgagatcaaggacggccgtggccaggcctccacaggccgggtgctgctgcccacaggcaaccagagggcagaactgacactggggctgcgggcgcccccgaccctactcagcaccagtagtgggggcaagagcaccatcacccgtgtcaacagccctgggaccctggctcggctgggcagtgtcactcatgtcaccagcttcagccatgccccccccagtagccgaggaggctgcagcatcaagatggaagcagagccagcagagcctctcgctgcagcagtggaagcggccaatggggctgagcagacccgagtgaacaaagcaccagaagggcggagccctctgagcgctgaggagctgatgactattgaggatgaaggagtcttggacaagatgctggatcagagcacggactttgaagagcggaagctcatccgggctgcacttcgtgagctccgacaaaggaagagagaccagcgggacaaggagcgggaacggcggctgcaggaggcacggggccggccaggggaggggcgcggcaacacagccactgagaccaccacgaggcacagccagcgggcagctgatggctctgctgtcagcactgttaccaagactgagcggctcgtccactccaatgatggcacacggacggcccgcaccaccacagtggagtcgagtttcgtgaggcgctcggagaatggcagtggcagcaccatgatgcaaaccaagaccttctcctcttcctcctcatccaagaagatgggcagcatcttcgaccgcgaggaccaggccagcccacgggccggcagcctggcggcgctcgagaaacggcaggccgagaagaagaaagagctgatgaaggcgcagagtctgcccaagacctcagcctcccaggcgcgcaaggccatgattgagaagctggagaaggagggcgcggccggcagccctggcggaccccgcgcagccgtgcagcgatccaccagcttcggggtccccaacgccaacagcatcaagcagatgctgctggactggtgtcgagccaagactcgcggctacgagcacgtcgacatccagaacttctcctccagctggagtgatgggatggccttctgtgccctggtgcacaacttcttccctgaggccttcgactatgggcagcttagccctcagaaccgacgccagaacttcgaggtggccttctcatctgcggagacccatgcggactgcccgcagctcctggatacagaggacatggtgcggcttcgagagcctgactggaagatgctggtggactgtgtgcccctggtggaggtggacgacatgatgatcatgggcaagaagcctgaccccaagtgtgtcttcacctatgtgcagtcgctctacaaccacctgcgacgccacgaactgcgcctgcgcggcaagaatgtctagcctgcccgcccgcatggccagccagtggcaagctgccgcccccactctccgggcaccgtctcctgcctgtgcgtccgcccaccgctgccctgtctgttgcgacaccctcccccccacatacacacgcagcgttttgataaattattggttttcaacg

SEQ ID NO: 14155 - DNA, 11266 bp, Homo sapiens
gaccagctgcaaagactcagacactcagccagagacagcagcccctgccactgccccaccattaccccccatagagtccccaccagcaccatgccgggggtaccagggcctgggcctgagctggccgcagcccttgaggagcagttgggccgggcactggaggagctgcgggcggtggctgaagcaggccgggtggcagtgacccaggcagccgaggtagctgtagccaccgtggagccggtggcccgggcagctgaagagctgcgggcagagagagcagcactgagccggcggctggatgcactgagcaggcaggtggaggtgctgagcctacggctgggggtcccacttgtgtccggccttgagcctgagctggagcccagcgagctgctcctggctgccgccgaccccgaggccctctttcaggctgccgaggatgccgggacccccgtggcccacccacctgccttcagcacccgccgccgctcctccaccggcaccacccgcagcactagtctcgtaagtgcttctgggttggtgggaggggtagttttgagccaggctctgcctcctcttgactttaggtatgtcaccaccttctctgagcctcagtttatctatcttgacaggggactggggcactagtgctctaagactagggcaagagggtgccaggctccagccctgaggcatgtgtggcagctgccttggcagcccctggcatgacccaggccccagcccccagctccctgccgccctgcaccctggccagaccaagcctccctgaaacagctgccacctcagctctccttacccttatagcagacggagaggccctgccaggagaggaagggccataatagttggcttggggccttgtcttcaaggggctagggagatgccctgggagggctgcagggctagagactccttagaggatggtttccagcaggggcgaggcagggggaggtggtacagaggagagcttcatagaggtcttggctcagggcagccccagtcagacacctggtcaggagcctacaggccccgggccagccctcttggcaaggtagcaggcagatggggggcaacatgtgctgcctgggcactggcccaggaggacctaggcctcgggaactggcagcacagagcagagcctgcctgggagggggctgggaacaaagcagcaaaatgaactaaggttcaggagttaggctgccttcagctcagatcccaggctgcatcacacttagagagagactgtgggcaagtcagttagctgccctgagcctcagtttccccttctgttttttttttttttttttccggtcttgttttctttgcaacagggtcttactctcttgcccagactggagtgcagctgcatgatcatagctctctgcagcctctaactcctgggctcaagtaatcctcctacctcagctttctgagtaggtgggactacaggtgcacaccaccatgcctagctaattttttatttttgtttttgtagagatgcggtctcgctatgttacccaggttggtctcaaactgctggcaacaagtgatccctcccacctcggcctcccaaactgttgacattacaggcatgagccactgcgcccggccttcccttctgttaaatagggacagtaaagtccctagtgtttatacaacacttactatggactggaaatcatcattattatcactatccattgtattaatacaattcggggtacgtgggaagccctacaacaaaactgtcagtgcctcttccctgactgacgctgacatggccatctttgggcaggcaggctggcaggctagtggttatttccaaggcgtgccagcaaccctaggatctgcttccctatccattggagacatgatgagtttcacccatacccctgcttaaagtccatgccctctccccaccctgcagatggaagcagagccagcagagcctctcgctgcagcagtggaagcggccaatggggctgagcagacccgagtgaacaaagcaccagaagggcggagccctctgagcgctgaggagctgatgactattgaggatgaaggagtcttggacaagatggtatagccagatccggtgggctgggggttggcagaggccagcaggcaccaggtaggcaatgatgggctctatatgcagctggatcagagcacggactttgaagagcggaagctcatccgggctgcacttcgtgagctccgacaaaggaagagaggtagagagccagttgccctaccctagatccagctgccccattccccagctgctcccctcatactctggggtccatttgtggacaccccagcttaataactgccctacccagcttctccttctctagacccagcagttcccttggctattccctgctggatccagctgctccttccctagctccttctctcccgctggtgaccccagttattctccccaaccagcttctcttctccttcctagacccagatactccctcccgcagctactctctccttggatccagttgcctctcaaagtactgtcaacgactccttccctgaatccagatactccttctccctgctgctcctctctccctgaagtccattgatggccatcttagcctctgccccatccagcttcccttttcctggacacaactacttcctcccccagatagttcttccctggacacatctattcattcccttagattctgggttcaattgcttctcctctcaaacactctcaattactcctctgaatctagctgcttctgccagggcccactgatggccaccccagtctctatctctacccacctacttctattttaagcccagttaacccccttcactagcttctctcccagctactcttcccctggatcagattgcttctcagatcccatcaattgctcccttcctggatctaaatattcctgcctccagctgctcttctcctccaaccaaagacctgctgatggcccacccagctacttcctcactcagcttctccttccttggactcagctaccccctcactagatctagatacccctcctgacttagctactcatgcctatagaaaccctttttggatccatacccctttgagtttagctactccgtattctctagtttctgcctgagtccatcaaacccttcccacactccattccctgtcaagttatggctgtcccctcaccccagctgctcctagagaggcccttgttacctgtgtcattcatgtttctaacaagccaccctccaccccgtcttgtgtgccccatgcacctgtgcatctgtgctgtgtgggtgttggtggcccttttgcgcatgcatggggcatcccctgcccagaccagcgggacaaggagcgggaacggcggctgcaggaggcacggggccggccaggggaggggcgcggcaacacagccactgagaccaccacgaggcacagccagcgggcagctgatggctctgctgtcagcactgttaccaagactgagcggctcgtccactccagtaaggggccaaatggggccggcccagggctcagggtgggaacacatcctcccccagccccctgtgcctttcacatccttctcatcccctgcccctgcagatgatggcacacggacggcccgcaccaccacagtggagtcgagtttcgtgaggcgctcggagagtaaggccacctggtgtcgccctgtgcctgcctgcctgtccgcccacctcctccggctcttccttgagctctctctccgtgtcttcaactgtgccgtcactttctcttctctgcctgcggctatcaccacccctccatacagcctcccatcccatctcctgatgtccagcccaggccctcacctggtgccccttccccttttttgcagatggcagtggcagcaccatgatgcaaaccaagaccttctcctcttcctcctcatccaagaagatgggcaggtgagcaccagcacccaatccctgaccatagaggagtcagtgccacaggggacctaactgcaaacccgttttacagaggggtgggctgggcacagtggctcttgcctgtaatcccagcactttgggaggccgaggtgggcggatcacttgaggtcaggagttcaagaccagcctggccaacatggtaaaacctcatctctactaaaaatacaaaaattagccgggcgtggtggcaggcacctgtaatcccaactactggggaggccgaggcacaagaatcacttgaacctgggaggcggaggttgcagtgagctgagatcactccactgcactccagtctgggcaacagagcgagactcagtctcaaaaataaatagataaataaataaataaataaataaataaataaataaaacagaggggtagactgggatgctgggaggtaataggtctatagccagggaggggcaaagtgagagttaaggatcctgctctccttgggatctcattttattctcaaccacaccacaggagaggtggatgctcagggaggccagtgagttgcttaggggctcacatctctgagtggctgcaatagcattgaacacttacagaggcctacctaccacactgagctgcctggtggcactgccacttcccagtatctgcaaaccatgtcccaggtcacacagcacctttataccttagccccatgagaaaggagggtacccccatgtaacagaggctgttggggctggcagaaagcaggaacaggatcagaatccaggatgagaaccaaaggggtccagagactctgaatcagagagaccttgttcaagttctagttccgcccatcacgtcctctgaaatcttaggcaagttactgccagaggtctcagtttcctcacctttagtggaattggtaaggcccctccctgctcttgtgaagtttaaaatggcacacaggaaaggatcaacagagatgaattattattattactattattatgctagtcatcatttttattatcggatagtgcccagaagctgaactcccctgtaacttgagggtacaatgaggcttctcagagaactactcgtgggtgggggagggggaggcggaaacctgttgaaaaccttgctgtcatttgagactcagtgtactcctctaaaatgcgtgtgatgaggacgcctccctccctggcaggcgtttgtggcagtggagatactagtgtgctacaagaccccccctcctcctcgcgagtggtggtccaggctggggagcagccctgctctccctgcctaacatgcgcctccccaacccctagcatcttcgaccgcgaggaccaggccagcccacgggccggcagcctggcggcgctcgagaaacggcaggccgagaagaagaaagagctgatgaaggcgcagagtctgcccaagacctcagcctcccaggcgcgcaaggccatgattgagaagctggagaaggagggcgcggccgggtgagctgcagaagtgggctgggcagtggggggcggggcgtgataggcagtggggggcggggcttgatagttggcccggcagaggcgggaagaccgcgcggctagatctgtggtgcaaaggcccgaaggtcatggaaggcggggcctgggatccactgggtgggcccaccgaggcatgccccttatagtcgtgtgacctggtcctgacaccgcccctacagcagccctggcggaccccgcgcagccgtgcagcgatccaccagcttcggggtccccaacgccaacagcatcaagcagatgctgctggactggtgtcgagccaagactcgcggctacgaggtgagccccgggaggccagggggcctggaggcctccccagaccccagctcaacacctccttcttagcagagctcctattacccagtacacttcctgccactgtgtggcctcacagggaacatggaaaggctcttggggtgaggaaactgaggctcaaagaggacacaaggcaagccctagattccagaatcagtgatgaagtaacagggcctcttgggtggtgggcagggttcaaggccggatcccactcttggagtcccctccttgttgctctgtaggaggccctgagtcaatttctctaaatgagggaaggagtgatgaggcatgaccatagccttagctgggtggcgctgggcctctcagtagctctgtcccttgaaattgcaaatatgggagttgacaggctgacttggaggaggctcatgttccaactattcactcattgtgcaagctacggggcctctttgtgcccagtgccctaggtctggaataacagaatgctgaggggtagacagcaggggggagttgcccccaggttcctgaccagtcctcctacggcttatagcacgtcgacatccagaacttctcctccagctggagtgatgggatggccttctgtgccctggtgcacaacttcttccctgaggccttcgactatgggcagcttagccctcagaaccgacgccagaacttcgaggtggccttctcatctgcggagtaagtgtgggccctggccctgctaatgttgctgcacatctggggctggacatcgggaccaggcccagttgccctgagaacccctggagcgggccagccacattgtcagtcagcggctgagacccccttccccagagagtccccgtccttctccatccccacccccccgctgctgagcgtgccaggtgcccgccggaacgaaggagccgcaggccggcctaccagcccgggccaaagcccaccaggtggccctgtccatatcccctccatcctccctctgcccccttctccctctctctccctttctctgtcctgctctcctcccactatcaccagagcttcctgctcccacgggatcccggctggagattccaaaaggaggctcctggcccgggcaccgtgcccgcccagcctatatagtgctgccagaggcttatataggacctcagcaagccctccactttggaatcgttgccccgtctgctcacctcaccctcagcacccttctccatctgtcttcccttctttccccttctctttctggtttccctcaaatttcttcctcctcctccttctcctcttcctcctccccccacctcctctcacgcctccctcaccccctctccccggggcacagccctcctctccaaccttggtgccaacgccatcgcccccaccccgcgttcccgcttgcccctagagttctctgcacctgtgactggtttggcccccacccttgtctgcattgcacaccattagtgatgggtagtgagcggcacgtccacagtggggaggaggcatgcggggggctggcagactgcagcactggaatcgtaattgaactcatgtctctgtgtgtgtgtgtgtatgtgtgtgtgtctctgtttcctcccctctctcttctctgcctcttccctctcttccccacccggggccctggcctcctgcccccgtcccccaccccttcccggccccctaccctccccaggacccatgcggactgcccgcagctcctggatacagaggacatggtgcggcttcgagagcctgactggaagtgcgtgtacacgtacatccaggaattctaccgctgtctggtccagaaggggctggtaaaaaccaaaaagtcctaacccctgctcggggccccacggtgagaaacgccgcctctaccacctgccccgtttcaccagaatctgctcagcaaggccagagagggtccagggaggcgggtgggggaagtaaggggggcatttagtcaagccagaggagccagacatagccctgtcttctggcagttcagggcccagcaggtgagaccattctaaatgggcagtgatgacccaggtgggcagcactgtgatgggggaagcccaggggagatgcctgacccaggctgcaggtctgggccccccatctgaaaaaagtgcaaactaagctgggatctgaacaagttcaggctaaaggagggagagggagttccaggcagaggaatcagcctaggcttagcagggcaagagagctggagagcacagcacatcaggaagggaagaaacttgagtctggatatgagggaggagggggccacagttagaagtttgaccttctggccgagcacggtggctcatgcctgtaatcccagcactttgggaggccaaggtgggcagatcacgaggtcatgagttcgagaccagcctgaccaacatggtgaaaccccatctctactaaaaatacaaaaattagccaggcgtgtggcgcacacctgtaatcctagcgactcaggaggctgaggtaggagaatcacttgaacccaggaggcgaaggttgcaatgagctgaaatcatgccactgcactccagcctgggtgacagagcgagactccatctcaaaaaaaaaaaaaaaaaaaaaaaagtttgaccttcctcctgaggacaacaggagttataaagggtttccaaacagagaagggatggatatagcattctaggaccttcctcggatgaggcttggatgagagatgggatggactagatgactggaatagcttaagagctagagagacaggcttcccaatagatctggtttggagagggagagggaaggtcaagaagtctgccaggctcctgtgtgggcactggggagttggtggtgccatactccaaagtggggagctcaggagcaggaccagttcaacaggaagatgtttctggctggggactctggatcctaagccagctgtggcatttcctctctggtcacctcacctcagtaccaaagtaaagaattcagatcctaaactaactaccccattacagacaaggagctcagagagagacgtgggctaagactgtcctgggggtgggagggagagggaagatggttaggtcagagctggggccagaaactgagactccaaactccccacttagtggctgttttccttgccccatcactgtgttcccgcccattttgtagagaggattgaaaatagaggcccagaaggagcaaggggattggctgaaggaatgtgagtcagtgacaggtaggggcacactcagatgcccctcagggcctggagccattgtggggggcagtccacatgtgcacacacacactcagagaaggagcacagatgagtggcggatgggcttggtgctatctccagatcatatatggacttaggagctgctgcccagcaagccagcttggagggagaggggcccagcccagccctgatccagttggaaagtgtgactcagccgtgctgttgctcaagttgcctggtgtttggcctgtcactggggcagcctgagccctgagccctgagccccagtgtaaacaatggctttataaggtctccagggaagggagtggggcgggagggagcaccaggttggagagggcggtcgggatccccaggacgatagccacagctggaagaagcttcagagagaggctgcctttgcatcatggtacagctcgggaaacaagcccagtctgggatagggatgaccctaggggcacgtggcacatcagcagcagacccagaaccctctcactcatcctaaattcttgtaaggtctcaaatgagatagagaataactgtcctgttctaaagagggggaaacagtcatagaaaagggccttatctagcacccacaactggttagggatacagtctggactaaaacagaggtgttcggtgttctgcctcccaggtttcttctctgaaggagtccaggtgagctgggggtaggcccagccctaccacagttctgagtttgtccataagggcacgagatgggaggtggtcttgggttctcaggtgtcttgagaataaggagcaattgttgccattatgccttccctgccataggaaactcattcagcaacattgaatgcttgctatgtcccaggtatggcagataggagggatcaaggcagaagaggtcttgctctgggggttgagggacaggggaaaaggagccagagagcagactccagcttcagagctctgggagctgtcagttgcttaataggcacaacccactcactccagagtggggaaaaggctttgccaacacccagaactgggggcctgggtcccatgcggcctagcctgcacttactaagccatggggcttgaaacaaatggctcctctgctctgtgactcagtttccttatctgtgaagggcagctagcattctgaaggatggccagaagggtggtccccccgagcatggcatagatggtccattggtattggctgggatcctcatctgcctcctctgctctacccaaggcaggtgataagggttagagaacccctctgctgcccacacgttccctggcctccatctccagcagcagggttatccccaccccctgtcaaagaataggggtccctgggcctctcaacaggaagtaccagatcaggcagctagcagacaatcatcggtggaccacagggccactagagtgagacctatccatagataaagattggccagtgatgaagcccatctgggtgcaaaggccgagctgagaggcttctaccaactggagtgtgccagtgagggtgagcagaaggtggtctccagggagaacatgggcagggtttggagccagcacctccccagggttggaggaagcagacccaggacctgcctgactgggatggggctctcttctgccatctccgcctccacctgcctagctctgctcccccgccccgagagatgcctccaggcttgggtagatgaagccaggggcttcctgccttcctggaaggcttttccctgtctggagtttatgaaagaccagcaggcaatgcggcaataaaaaagaccttggggtagaggggcgccacgagaggcgggtctggcgctgacatccaaccccgtgccccctccctgcaggatgctggtggactgtgtgcccctggtggaggtggacgacatgatgatcatgggcaagaagcctgaccccaagtgtgtcttcacctatgtgcagtcgctctacaaccacctgcgacgccacgaactgcgcctgcgcggcaagaatgtctagcctgcccgcccgcatggccagccagtggcaagctgccgcccccactctccgggcaccgtctcctgcctgtgcgtccgcccaccgctgccctgtctgttgcgacaccctcccccccacatacacacgcagcgttttgataaattattggttttcaacg

SEQ ID NO: 14156 - DNA, 1735 bp, Homo sapiens
gaccagctgcaaagactcagacactcagccagagacagcagcccctgccactgccccaccattaccccccatagagtccccaccagcaccatgccgggggtaccagggcctgggcctgagctggccgcagcccttgaggagcagttgggccgggcactggaggagctgcgggcggtggctgaagcaggccgggtggcagtgacccaggcagccgaggtagctgtagccaccgtggagccggtggcccgggcagctgaagagctgcgggcagagagagcagcactgagccggcggctggatgcactgagcaggcaggtggaggtgctgagcctacggctgggggtcccacttgtgtccggccttgagcctgagctggagcccagcgagctgctcctggctgccgccgaccccgaggccctctttcaggctgccgaggatgccgggacccccgtggcccacccacctgccttcagcacccgccgccgctcctccaccggcaccacccgcagcactagtctcatggaagcagagccagcagagcctctcgctgcagcagtggaagcggccaatggggctgagcagacccgagtgaacaaagcaccagaagggcggagccctctgagcgctgaggagctgatgactattgaggatgaaggagtcttggacaagatgctggatcagagcacggactttgaagagcggaagctcatccgggctgcacttcgtgagctccgacaaaggaagagagatggcagtggcagcaccatgatgcaaaccaagaccttctcctcttcctcctcatccaagaagatgggcagcatcttcgaccgcgaggaccaggccagcccacgggccggcagcctggcggcgctcgagaaacggcaggccgagaagaagaaagagctgatgaaggcgcagagtctgcccaagacctcagcctcccaggcgcgcaaggccatgattgagaagctggagaaggagggcgcggccggcagccctggcggaccccgcgcagccgtgcagcgatccaccagcttcggggtccccaacgccaacagcatcaagcagatgctgctggactggtgtcgagccaagactcgcggctacgagcacgtcgacatccagaacttctcctccagctggagtgatgggatggccttctgtgccctggtgcacaacttcttccctgaggccttcgactatgggcagcttagccctcagaaccgacgccagaacttcgaggtggccttctcatctgcggagacccatgcggactgcccgcagctcctggatacagaggacatggtgcggcttcgagagcctgactggaagtgcgtgtacacgtacatccaggaattctaccgctgtctggtccagaaggggctggtaaaaaccaaaaagtcctaacccctgctcggggccccacggatgctggtggactgtgtgcccctggtggaggtggacgacatgatgatcatgggcaagaagcctgaccccaagtgtgtcttcacctatgtgcagtcgctctacaaccacctgcgacgccacgaactgcgcctgcgcggcaagaatgtctagcctgcccgcccgcatggccagccagtggcaagctgccgcccccactctccgggcaccgtctcctgcctgtgcgtccgcccaccgctgccctgtctgttgcgacaccctcccccccacatacacacgcagcgttttgataaattattggttttcaacg

SEQ ID NO: 14157 - DNA, 4692 bp, Homo sapiens
ggggacttgcacgccgcgtgcccctccaccacccgccgggacgccctctgcctcggtcccgagttcgagttcgacctccgccactcagctgggtgtcctggggaccttggtttcttccctttagatccggacactgaagcaggcggtagcgggtgtcttcctacctggctaccccttcggcgcctagcgcgaggcagggtgggcgaggcgagggcggcgccctgcgagggagggcggtcgcagaacctgcgggccttcagcgccccctggcgaggcttccctccaccgccggcgggacccccatgggcaaccgggggagctgggactgaaagcctggagagccccctccgttgtgctgttggggagactgaggcccagtgagacctcagggcctgccaggcgttcccaacagcgagggcagagagtacacggagagccggctccccagggggaggaagcaccctctttcctcccgggagaatttcactgggcagtttcggaaaccgccccatccccttccccttccccctcggtagacaatggcgctttgtacttccttccctccctcccacagctccctccttacacagcggtggggcctgggcgggtggaactcgggacacacagaggagacactgtggtccaacctttgcctccaggcccaaagggaagggtcgtgccagagggtgaccagtggaatgaggttgtcagtctccagccttgcccacccactttgggggatcagagggaggctcccattttccagatggggacactgaagctccgggggttgtgctgtagaggtggccaagttcctacatcaggcttttgtcagagacaaggaccccatctccgagcccagagcactgagaatggggacctaggagacaaaaggctagcccttgcccctctgggcctctttaccctctgtacagaaggggctggaccctctgtcccctccagcccccagcctccaaatgtaccacagaaggctctaggcctgagacacagccagcaccgggggctggggagtgagcctcattccccccgcctctgctataaggcctccttaggcctcagagcatctctagtccaggctagaggggtctccaacacagtgccaggatccctgaggtccccaccatgacacacagaccccagtagcagagctatcttcagcctagggcaggccctggagtcagagagacctgggttcaaatcctggctcaggtcatttgaccatgagcaaatcacatgtcctccctggacttcaatctcctcatctgtcaaatgggaataacagtagtatctagggtttttgtgggcttaggacaagtagggggctcagcacagggtttgactcacaggctctccataaatgttactgatgcctcggggtatcctgcccttcccatttgcccccttgtctctctccctcctcctgactggctagaaccaagtatgggggtgatgcttattgcaactgcagctatgtacaggagaggccaagtcactgttcccaaccccacccactggcaaatgaaaaaaccaagacacagagagtttaagggatatgctcttgatcacccagccaggattggactagggctggaaccaactaagggctctggcctgagtttcagggggtcttctcataattcctcaggaatgtggagcctggagggctcttcccccaagactctccctgctctcttcagactaggacaagctggctcatggctgagttgggccagcccacactccctgctgaaaactatctccatcccatccccacccttgccacctggccttcccgctaagcagaaaggaatgacgggggggcgctaaaaagggagatgatagagggttctttggccctacccctgaatgatttggggggtggggacagaggaaatcaccccgcctttactggctcccgtctggttatcagacccacactggaggcttatctctgccactatcttccaggggaaccctgggccagtcctctctcccttgagccacggaggatctgtatgtagcaggtggctctacatggtggaggtgtgggggaggcaacaggattggctgactcactccagagaaggtgttctttcctgaacctggttagaccagtcacccccaatttcccgggaactgaggggttgagaaccggtagaagcagctgtcacccagggatgccctctataaggccctggggtggcccctagtgccagccaccttatatgtctgggggattggtcctcccactctgcaccctggcttcttccatggtggctaggtccaggccagtgcagtggggacaatagccctcagccaggcaggactcctgagcacctgtcctcagtttccccatctgtggatgaagcagtcaacccccagctgggctgtggtgtttggtgactagaccagggagcctcccttgctcagagggtggacttcatctgtcacctttccctctagggaccctgttagtgacccacagggtggcctccctcctcctcctacaatagctccctgacttttggggatctgggctctgagaggcaggaatcgagttgtagaaaggagtgcctggcttggcacctggcacaagtgggcagtttctggctgtccactcacagttgtgtgctctgtgaaccacaatgcaaagtggactacccaagatccctgaaacagtgggctgggtctacccccgggaccctgcgtgggcaggcaggcacgtgaagagcttgggacacagggagtggacacaggccacacattgtgccctaggcagagccgtgggcagctggtgccagccctccgcccctggcagccaaaatgacctgcctctcgcacccactgcagctggaggtcacagcagatctggcagagcggcggcgcatccgctcagccatccgggaactgcagcggcaggagctggagcgcgaggaggaggccctggcatccaagcgtttccgtgccgagcggcaggacaacaaggagaactggctgcagtgagtagcggggggtggaacatgcgggtgagaaggtgagtgtgagccctggctcagctcatgtgtgcaggcaggcgtgagcacaagtgtatctgtggattgcatgtgctaatggcagtacgtccacacacgcttctggaaaaacagagatgtttgtgggcatggagcatgtactgattgtggcgtcgcggccgtgctgatgtagccagcacgtctgagtgtgtggtattagtgcccacgtccatgggcatatgtgtatcagtgtgcagttagagggtgtgcacagccacatgcccttctgccaaggttctgggtactctgttctggctcctacccttagcccacatcctccacgacctggccatggcagtggtggttacagtcatgatgtctctgcagctctcagcagcgggaagctgagcagcgggctgccctggcacggctggcagggcagctggagtccatgaacgatgtggaggaattgactgcactggtgaggcccaggctggggcaggggatgggggcagggcaggtgaagacctggactccacagcccaacacccgcgacctgtctcttacccacagttgcgaagcgctggtgagtatgaggagcgcaagctgatccgagctgccatccgccgtgtacgggctcaggagattgagggtatgtggcctgtcccggccccacccctgccctgctgtctgctgtccacagcacctccctgtcactcacctgccacttgctccttcccttccagctgccaccttggctgggaggttgtacagcgggcgtcccaacagtggctcaagagaggacagcaaggggctagcggcacacaggctggaacagtgtgaggtaaggagggtgggagagtggcccagtgtcctgtgcccatggataccggtagcacagagtgcctgagtgtctttgctaggctggtatttcactgtaaggggcccacccctgccatccagcctctatttagcagtcagagggatctcccagaaatgcaaatccggccctggcacctcccctgcttcaacccgtcccagggctgcccctcaccctccacacagcccacatctttaccttggcttatggggcctgcatgtcagaccccagctggctcacagttcactctattttccagagtgtgggtgagaggtcaggccatgcaggttccccaagtggccagcagaggccgctgggtccacggtcctggcaggaccccactcccactccagatgaaccaggctgaggccaggagtcaggaacctccactccagggatctattaaggctcccgtccccaataggtctcctgccatacccacccactgacatcaggacctggtcctctctgaacccctttggctaggtagtgccaagagattgggaagtggggatcagagactgcccttagcatgccagtgccagtgcttgcgcaggtgtgcctacaggaagccatgccccaccactctgctttgcatgccctgccctgggcacttgccagcctggccctcagtggtgggggtggcgttcaaagcctagggagccttggttgcatcctgtgggtcccttacaggtgccagagcgagaggaacaggaacagcaggcagaggtttcaaagccaacccccacccctgaaggcaccagccaggatgtgaccaca

SEQ ID NO: 14158 - DNA, 823 bp, Homo sapiens
ggggacttgcacgccgcgtgcccctccaccacccgccgggacgccctctgcctcggtcccgagttcgagttcgacctccgccactcagctgggtgtcctggggaccttggtttcttccctttagatccggacactgaagcaggcggtagcgggtgtcttcctacctggctaccccttcggcgcctagcgcgaggcagggggaaccctgggccagtcctctctcccttgagccacggaggatctgtatgtagcaggtggctctacatggtggaggtgtgggggaggcaacaggattggctgactcactccagagaagctggaggtcacagcagatctggcagagcggcggcgcatccgctcagccatccgggaactgcagcggcaggagctggagcgcgaggaggaggccctggcatccaagcgtttccgtgccgagcggcaggacaacaaggagaactggctgcactctcagcagcgggaagctgagcagcgggctgccctggcacggctggcagggcagctggagtccatgaacgatgtggaggaattgactgcactgttgcgaagcgctggtgagtatgaggagcgcaagctgatccgagctgccatccgccgtgtacgggctcaggagattgaggctgccaccttggctgggaggttgtacagcgggcgtcccaacagtggctcaagagaggacagcaaggggctagcggcacacaggctggaacagtgtgaggtgccagagcgagaggaacaggaacagcaggcagaggtttcaaagccaacccccacccctgaaggcaccagccaggatgtgaccaca

SEQ ID NO: 14159 - DNA, 23907 bp, Homo sapiens
gtaacaacatggcagctcccatgagaacggcatggttggagtcagaagaggaagaagcagaactgggcaggtgagctgggaagagaataccatagatgtccactatggagatgataaatgccctaatagatgcgcacaaaaaatgtcatgggcatttaggggatgaagacacaatttctagctgtgcaactgtggtgatcagtcagagcttcttggaagaggtggcattcgagctgggtcttgaagccgagaatcatctggaacgtacagagattctaaatgccacctcacattagaaaagaaagatgatccctggtaatggagaagatagcatccgaaagaattaaatatgaatgtctcactttgtcaagatttcataggttttttatttttacagatggtgtgtctcgctctccctcccagactggagtgcagtgcgatcatagctcattgcagccttgaactcctgggctcaagcggccctccagccccagcctccagagtagctgggactacaggtgcacaccaccacacctagctatagttttcaaaatttagatataattcatatataaattatattttatagttattttggtgtttaattttgaaataattttagacttacagaaacgttgcaaaaatagttcagagttatcctaaactcttcatttcctacaccttcacctagctttccctgataggaacatcttacctcaccttagtacaattatcagaaccaggaaattaacactggtacagtaacctacataccttatttgaattttagctgttttccttttgatctaatccaaggtccaacattgcatttagttgtaatgtcttcttagtcttctctaatctatgacagctcctcagcctctcgctttttttctcaaatgaccctgacacgtactgttcagtcattttatagaatatccctcaatttgaatgtctgattttttttttggtgattagattgagcttatgcacttttggcaagaatatcacagaagtaacgttatgcccttcttagtgcatcagatcaggggctactttctgttgatatgacttattactgggcatgttaacactgatcatgtggttaaagaggttatctgctgggtttctcttttataattttataataagtgtccttttgtaattagtaattatcttgtggggagataataagaccatgcaaaaatgtaaatttcttgacatttacggtatgtttgtttgtttttttgaaatgaaatctccttctgtcacccagggtggagtgcagtggtgccatttcggctcactgcaacctctgcctcttgggttcaagcgattctcctgcctcagccttccgagtagctgggattacaggggcccaccaccatgcctggctaatttttgtattttttagtagagacgtggtttcaccatgttggccaggctggtctcaaactcctgacctcaggtgattcgcccacctcggcctcccaaagtgttgggattacagacgtgagccaccgcgcctggcctacatttttttttttaagtgctgtcaaatgcatgccgtctacttttcttcagtaaatgtcaactctttacccattatgtgccagtccctgtggggtgtgccaagcagaaaaagcactgatctaagatgtgtggctcagttatgtgtagatccatgaccttgctgggctttaggatccttatctataaaatggatatcattatatcttaccagtaagaactgctgaggataaaggcagaccgtacttgtgaacgtgttctgtaatacaaactagggttgttcattctccttctgcagtgctcagctctggcctctcctctcctgtttgcatttcccttttccttcctgcctgtgttcaggcctgcagacttctgtctgtcctccctggtctaactcccttatcctacttgccaagccttactgtgatgtcatttaataaattttggagacacaaggagcgcctcatagagatggacaatttccttcagtagtctcctgctgtttttagagttgcctccaggtgcctgggcctgtgggtgttgggcaggagaaccttcctcctatggcagaaataagtgggagaagtagggattgccttcctccaataataatgctttggccctaaaaaggaaactcttgaaccccatagaatattttattttattttattttatttttgagacagagtctcgctctgtcgcccaggctggagtacagttgcacgatcttggctcacgcaacctctacctcccagattcaagcaattcttgtgcctcagcctcccaagtagctgggactacagtgatgcaccaccacgcctggctaatttttgtatctttagtagagatggggtttcactgtgttaccatgctggtgtcgaactcctggcttcaagtgatccgccctccttggcctcccaaagtgctgggattacaggcgtgagccaccgtgcccagccaaaccccatagaatattgaagaagcccaaatggatacttgtgtcttactgagtggacacactttaaagttacttcaaaacatgaaaggatgacttactccatatcaaacctcctaattaatccaacagtaattttttttattttgttttattttattttattttttgagacagggtctcactctgttgcccaggctggagtgcagtggcacaatcacagctcactgcagcctcaaccttttaggctcaagtgatcctcccaactcagtttcctgagtagctgggactgcaggtgtacgccaccatgcctggctaacttttgtatttttttgtaaagacagagttttgccatgttgccgaggccgctctcgaactcctaagctcaagcaatccacccacctcgtcctgccaaagagctgggattacaggtgtgagccaccacacctggcctgcaattttaatctaaggcaggatttacttatttatttagagacagagtctgtctctgttgcccaggctggagtgcagtggtgtgatcatgactcactgcaagcttaaactcctgggctaaaacaatcttcctacttcagcctcttgagtagctgggactacaggcacacaccaccatgaccagaaaggttttttttttttttgacacggagtcttgctctgtcgccaggctggagtgcagtggcatgatcttggctcgctgcaatctccgcctcccaggttcaagcaattctcctgcctcagcctcctgagtagctgggactacaggtgcgtgccaccacacccagctaacttttgtatttttagtagagatggggtttcaccatgttggccaggatgatcttgatctcttgacctcgtgatcctcccccttaggcctcccaaagtgctgggattacaggcataagccaccacgcccggcgcacctgcttcttcttcttttttttttttttttttttgagacgagtccccctctgttgcccaggctggagtgcagtggcacgatcttggctcactgcaagctctgcctcccgggttcacgccattctcctgcctcagcctcctgagtagctgggactacaggcgcctgccaccatgcccagttaattttttttttgtatttttagtagagacagggtttcaccatgttagccgggatggtctcgatctcctgaccttgtgatccgcctgcctcagcctcctgaagtgctgggattacagtcatgagccaccgcgcctggcccacacctgcttcttaaaggaccaagtcctggctgggctcggtggctcatgcctataatcccagcactttgggaggccaaggtgggcagatcccttgagtccaagagttcaagaccagcctgggcatagcgaaatctcatctctacaaaccattaaaaaatgttttggctgggcacagtggctcacatttgtaatcccagcagtttgggaggccgaggcgggtggatcacctgaagtcaggagtttgagaccaacgggccaatatggtgaaaccccatctctactaaaaatccaaaatttagccgggcgtggtggtggacacctgtaatcccagctactcgggaggctgaggaaggagaatcacttgaacctgggaggcggagattgcagtcagccaagaccgcgccattgcactctagcctgggtgacaagagtgaaactccatctcaaaaaaaaaaaaatgttttaaagggaccaagtccttttaggggagcttctgatcatttgaatctccaataacagaagaggttttcaaatgttaccccggggattcctcattgcctgctcccagtattttccaagaaagacctgaggctcctttctgagcttcattcccttgttctcctcccagcccctcagctgtcttttgtaccaattaggtagttattaattgctccctaattgcaaattggctgcctccttactggctcccacccatgctggctggctgaccaaggggtcacatgcatccttcagggaaaggtgttttgtgaatccagtggttcatttgttccacacgtgtgttgagccccttcgttgacgccagatcctttctaggtcctggggaccgtgttgagcgagacaaacccaagtccctggcttctcagagctcacagtctagcaggagacaaacaacaaaaaaattaatcatttccgatcgtcagtgctgtgatggggagtaattacagtacagagtaattttggggagcttcagatacgtgctctgggaagacctttctaaggaggtgatgtgtgagttaagatctgaatggtaatctggagccagccagagtgaagatgtggttgaagagcacagtcccaggggagaagaaagcaaaggcagaggccaggggagagaaagcagcatggcctctctcaggggcattcatcttatctatgaagccctaagcgattcagaagtcaaacatcaggttggggctagttgtaaggtttagggcaaaacacccctcctactccctgttgttagaagaccggaggcggggtttgcccccacctggccccgctccagaaggaggggttattatacgtctgattgaatcaacttccaggatccttattggtccttggtggtaactagggcgctctcttccaggatccttattggtccttggtggtaattaggccactctcgcttcaaagtcccaaattcaggcgccccgctggggactagagcgaccgttccccacctcacccaccccaagctcagaggttggagagaactgcctccccaaaggaacccagacccaggcttgagactttgcaaagagacacaagatggggattgccatgtgaagtttccagattttttaaaatgttagaacgatgaattcgaaaagctttaaaacactgcacaggccaaacaacaagtctatgggcaagacctggccagctggcctgggtgcggtggggcttggtgaacgcctagaggtagggacgagggagagaaggagtcaggaaggatgctaactgcatcctggattctgggacacccatgccctggcagagatgtgccctaagaggaacgaactcacggccacaggcacagattgagcacctaactgtgtgcatggctctgtgctaggatgggggacacaaaacacttcataggactgcaccctcgctcagggctgggtgggccgacctcaggaaacctgggttccagccctgacttgctctcctataattgctgtgtgaacttgggttgattcatcatctctctgggattcagcacacagcctttgttgacattagattaactaaatccagtaagggaagattttgaagggcctctgggtgtctggatagggaatctgggctgggtctaataggaagtaggaaccaccccaggttcttgagcaggggagtgacatgttgaagaggaaagtgaagcaggccacctgtgcagagacacacatcatccaggtgtggggtagtgaggacagcaactgaagcgtatgcaaatcagatctgatcacctctagctcaaaaaccttccatggctccctgcagccctcacatgaaagtcctttcctcttactatgggccatgggcagggccagcttcacgtaatgaagggtcggtgtaatgctctgctgtcactatcttgaaatacttcagaatttttgaacaaggagctccgttttctcattttgcaccaggccctgcaaattgtgaaggttcccacaggggcctttcagtctgggcctttcccctctccccatccaaaccccacttctcccttacccttcatacttcactcacgttggtcttccatcagtttctggagattgttcctgcctcgggacatttgcgtagtctgttccccttgcctggaacacccccacccccacgtcgagaccaacttagttttttgttcaacaatttcttatcttccagacttgagcataattatctcctgagagataactcctctgacctcccagaactacctgttcaaaacaaaactttaaaaattatttaagccagccgggcacgatggctcatgcctgtaatcccagcactttgggaggcccaggtgggtggatcacttgaggtcaggggttcaagaccagcctggccaacatcttgaaaccccgtctctactaaaaatacaaaaattaaccgggtgtggtggcaggagcctgtaatcccagctacttgggaggctgaggcaggaggattgcttgaacccgggaagcagaggttgcagtgagctgagatcacgccattgcactccagcctgggtgacagagtgaaactctgtctcaaaaaaaaaaaaaaaaaagaaaagaaaacgatttaagcctgagtgcagtggctcactcctgtaatcccaatactttgggaggcaaggcaggagtattgctgaggccaggaattccagaccagtctgggcaacacagcaagatcccatctgtacaaaaaataagaaaattagccagacatggtggtgtgtgcctgtagtcccagctactttggtggctgaggcaggaggattgcttgcgcccaggagttcaaggcttcagtgagccatgattgcgccactgcactcctacctgtgcaacagagctacaccctgtctcaaaaaaaaaaaaaaaagcaataatggaggcatttcaggcatgtgtcagcagccataggtgttcaggggctttgtgcttatgaaggtttgttcagtaacaaatattcagctggagcgggcatcatggctcacacctgtaatcctagcacttcgggaggctgaggcaggaggattgcttgagcccaggagtttgagaccagctgggcaacaaagtgagacctgatctctacaaaaaataaaatacataaaattagttgggcatagtggcatgcaccggctgaggtgggaggatcgcttgagcccaggaggtcgaggctgcagtgagctgcgatcacgccattgcactccagcctgagagacagagtgagaccctgtctcaaaaaattaaaaacttaattaattaaaaaaaattcaactggggaaatagttctagctctctctttctctctctctctctcttttttttttttttttggaggcagagtttcactctgatacccaatctggagtgcagtggcatgatctcggctcactgcaacctccaccttccaggctcaagggattctcccacctcagcctcccaagtggctgggactataggtgcatgccaccacacccagctcatttttgtattttttgtagagatggggttttgccatgttgcccaggctggtctcgaactcctggactcaagcgatcctcccacctcagccccccaaagtgctgggattacaggcataagccaccacacttagccatattgccatctcttaatgaagtaaataaaaccatttacaccacaagagatagagggaagggataggatttgtccaaaacataataaatccccttggccaaattcatggaccctggcagggtaagatcagagatagcatcatttctgcctatgtggctgacattcattatgtaagtcccatgtaccaggatccccatcccatgcaagctccgtgaatgatcactcccaaccttataaggttggaagtattagctccccattttgtggatgaggaaactgaggcctagagaaattaagtaacttgccaaatgtcacacagtaaagaattgacagagttgggattcgcacctagatctgtccaactccagatctccctgagcccttcactactgcaaaatagctactcaactggcttgctgtatgatttggggcaagttcctcaacctttctgagtctcagattctttttttctttttctttttttgagatggaatttccctcttgtcacccaggctggagggcaatgcacgatctcagttcactgcaacgtccgccttccgggttcaaaccattttcctgcctcagcctcccaagtagctgggattacaggtgcccgccaccacgcctggctaatttttgtatttttagtacagacagggtttcaccatcttggccaggctagtctcgaactcctgacctctggtgatctgcccgcctcagccccccagagtgctgggattacaggcatgagccactgtgcccagcctctttttcttttttttaagacaaggtcttactctgtcacccaggctggaatgcagtgggcaatctctgcttactgcagcctcaacctcctaggctcaagtgatcctcccacttcagcctcccaagtagccgggactacaggcgtgcggcaccaggaccagttaagctgagcctcaaattctttacctataacttgtcccttatttaagctaacacatggtaggtgctgaagttgattctctctctctctctttttttttttttttttttttgagacagggtcttgctctgtcacccaggctagagtgcaatggcatgatctcggttcagtgtagcctcaacctcctgagctcaagcgatcctcctgcctcagcttcccagagtagtgggattacaggcatgcaccactgttgattctttatagatgttaattctctgcttaacacacatgcccctccaactcccaccacacatacagacacagacacacatacacacgcacgcacgcatgcacgcatgcacgccagccccacaacaggaggaatgtaacggaagcaatgctttgtgttctgtaacctgtttccttttcctggacacacaggaaggtcatgttctcatttttcctgcagttagtagagtcacgtgactacataaaggccagtgaaattatacgtgacccctgcgcaaaggcagttaagtgtggatgtgcctcctttgattttctgattccctttccacatgcagaggattcaggaatagattccagggaaagcctggggtggaggcaggattcgggggcaaggtcactgcttggaaaagagctccctgggagagccccaacctgtatcagactttgcaggggtgagaaataaactctgattgggttaaaccactgagatatttggtttgttacagcagtcagcattaattacactgaataaaacagtgtatcagttatcaattgccacaacaatgctacataacaaaccaccccaaaacttagtgccttaaaacagcaaccgtttttttagctcaagatttcatggattggcactttagcctgggctcagctaaagatttttctggtctcagttgggcttactcatgtatctgtggtcagctattggattagctggtgactgactaggacagcttcagctaggataactagtccctgttccagtggtctcttaggcaggatagcccaggcttgttcacataacagctgcgagagttccaagagaataagtggaatctcttaaggcccaatctcttaacacccaggcttcgaactggcaatgccacttccgtatattctattggccaaaaatagtcacatgcctgcctgggcatggtggctcacacctgtgtaattccagcactttgggaggctgaggtggacggattacttgaaaccaggagtttgagaccagcctggacaacatggggaaactccatctctataaaaattagtcaggtgtggtggtgagtgcctgtagtcccagctactcgggaggctgaggtgagaggatcacctgagcccagacaggtcaaggctgtagtgtgccatgatcgcaccactgcactccagcttgggtgacagagatcctgtcttaaaaaataaaaaagagctcagcctctagaatcacagccctgggcttaagtcctgactcacttgctattgattttgggcaaatgccttcccctccctgagactgacatttcccttctataaaacaggtgctggggctgggcatggtggctcacacctgtaatcccagcactttgggaggccaagaagggcggatcacctgaggtcaggagttcaagactagcctggacaacatggtgaaatcctgtctctactaaaaatatataacttagccaggcgtggtggtgcacaccagtaatcctagctactcactactcgggaggctgaggcaagagaatcgcttgaacccaggaagcggaggttgcagtgagctgagattgtgccattgcactccagcctgggtgacaagagtgaaactgtctcaaaaaacaacaaaaacaacaacaacaacaacaacaaaacacaggtgctggaagagaggagtcctaacgttgggggctattgtgagaattgactgagggaatgcaccgtggaaacgtgtgctgtaaattacctattttattacacccaaggtgggcttaatagctgtcagggagtgttagtattatctcaaccaaacccccaatttacagaggagaaaacaagagcctcaggcaggtgatgtgacttgccaaggctgcatagctagggagcagtgatgtccccaccgtactcaagtttgtctgtttccagaagctaaggtcttagcctctctacagttagaaagtcctaggtttgagtctcgactctgtccattatagctgtgtgaccttgggcaagtcacttttctctctgggcctcattttttttcttcgtctaaagaaattagcatctgtctcataatgccatggggaatcaatgggaaaatacaaagaaagtgcttagcagagtgccaaggagggacagtgtgcatgctcagcaattgaaggctgccaagttcctgttatcatcaggggcagtgttccatccatcaaaagggctaagaatagtcttagcccggccaggcgcggtgtaatcccagcattttgggagtccgaggcaggtggatcacctcagttcaggagttcaagaccagcctggccaacatgtcaaaaccccgtctctactgaaaatacaaaaattagccaggcgtggtgacgggcccttgtaatcccagctacttgggaggctgaggcaggagaatcacttgaagccgggaggcaggggttgcagtgagccaagattgcgccactgcactctagtctgggtgacagagcgagactctgtcttaaaaaaaaaaaaaaaaaggaatagtcttagccagtgggggtagggtgaggaataagtaagttactgtgggctaagctttagcccagtgcccagcacatattataaacttcataagcagttgctattttaaagggtttttgttttgttttgttttgtttttgtttttgtttttgagacaaggcctcgctctgtcgcccaggctggaatgcagtacttttaaagttctgaaccctgttggaggccaatatgagaccatgggggaccccaggccccaactggcagtggctccaggcactgcctccgtgccatttggctattattaggcccggcgtcctcatctcaaatccagatggggatcgagaagggcgggtagggcagggcctggctggcggaaggctgggaacacggcttggaggctgggtttgggtttgggccccaccctgcctgccttcccttgcttgcagctggtccagccgccacgtctacacttggctctgaggttgttgcagagcactccctcccaccgtggccgcctcctctgggaagatgcagagcccttctgcagcctcagcacttttctccctgccccagagaggccaggcctgcgtggaaactctgaattggacactgcgtgccttcagaaccggcaaaggagccatccaccccgctgtctacaggtcttcatgcctccagtgaggcttactggatctgctgagggggaagggcctatatacctgggttcaaatcccttcgctaccaccaacatgcagtgtcaacttggacaaatgacttcccctctctgagcctcagtttctttgcccataaaagggacagaacattagcatctgctttatagggctgtggtgatggttacatgagtgcatggtatgccataggcactcaatatgtgtcagttatttcatgcttaagtgtgccaggccctgaggaggaaacaaagttttgagaggttgagaatctgggatgcagaatggctctgctcctgatttgctacactacctgaagcctgtcccttgtcctctctgggactcagttacctatttgaaccataaggtgggtatctaggactctgtgatgccaagattcaggtgctatgttcagaagtagagagaagggtttgctgggatcccacactgacaggttggtaaaatattcattctcggactggactctggagccaaaataccctcagcccctgagctgctccagatactccctactctgccagtccagagctgaacctggaagaatctagacccttcttgttacagttttttgccctaggagggcctgaaggaggcgagtcaaaccccctcattttacagatgggcagactgaggcccaggtctccccagtgctcaggcgtcatccaagtggagcttccaaatggtggatggtagaatatggtgattaagaacaaatgttctggccgggcgcagtggctcacgcctgtaatcctagcactttggaaggtcaaggcaggcggatttcttgaacccaggagttcgagactagccccggcaacatagggagacccttgtctctacaaaaaataaaaaaattagccaggcatggtggcacgtgtctgtagtcccactgtgagcctgggaggtcaaggctgcagtgagccatggttgtgccactccactccagcctgggcgacagagtgagactctgtctcaaaaacaaaacaaaacaaaaaaaaaaacaacaaaagaacgagggttctgagcctgtctccttatctgtataatggtggtcctacctcacaggactcaagctgtgaaggtcatagtggtaacaaaattgccacacatgtagtataagcatgatcaggagccagtgtccaacccatcaggtagcaattacatagtgtcccaccatgagcctagacccccactccctgcgcccaggcatcagggactcccagaagtctaaagaggtccaggctggcacatccagaactctctccttcctgttccagccccttgcctctcctttgtctgtgaggctgggtctcctggaattcactgctgcccagtgggcatctgaggccccttctcctcctgcagggccagaagtttgcctggcactgttgcccagagaacacagcggctggatgacatcctggagatgatggccttgccaaactggtttcccagcaggtcctcagtcccactccgagggctgctggccatgacctaggacgcatccagttctgcacataaggaggaaggtcataccccttggatccagccaaccccaacaagaaccatccacctctaggggctccattctccagcctcacctgcctgtctgttgcccaacaaggtcgtcacaatcctacttccgttcctttgctaatgctgttcccgtctccagaatgacagtgctgtcctggggagagaggcttagagagcccaaggcacagctcctccattgtgcatatgagcaagttgaagctccaagagggccaacccttacctagggttggagccaggggtaagacacccatcacccttcttgcctcctgacccaaggcctgggctttctctgaaggaccctgactgggtggagggttagccagggtgacttagggatgcaacacagacagcttggtaaaatagtcattctcagacttgagctctggagcaaaatattacccctagcctctgagctgctccagccacttcccattctgcctttccagggttgaacctggaagaacctagagtagaccctttctgtgacagccccttgccctaggaaggcttgaagcagaccagtctaatcacctcattttacagggggcaggctgaggcccaggcctctctggtgcccacaagatacattcatcctgctcatctggcattcagaatccttggcaaagagaaccacccacatttcctgctccgcccacagcctatcctcctccttttcccagactattggtctttgctcacactgttcctctgccacaaatgccctttcatgcctttccccctcttctatgtgggatgaattttaaaaattagctgggcgtggtggtgtgtgcctgtagtcctagcctcttgggaggctgagatggaaggattgcttgagccaggagtttgaggccatggtaagctgtgatcatgcgactgcactccagcctgtgggacacagcaagaccctgtctccaaaaaaaataaaataaaataaaaacaagtgtgacacacagtttatacaccacttccctaagaagtcttccagagcttcccccatcctagtggcagcaaagtggagggaaggggcttcagcatcaggcagaattccactttagtctgaatgcctttactaggccaaggtgccttcacctccctgagcttcagcttcctctgtcgaatcagagtgtacctatcttgcacagtggtcacctggcagtagtgggagccccacgtctgacatgcaacaggtgttcagcaaatgctggggccctcgtcacgggatgtttactctttcctcggctgtagctgtaaacttccctagcactgtaccggactgccctttgatctctagatcacccccactcccttgcagagaggaagacagaggcaggcgggtatgtctggaggtggacccaggcactaagggcttgaaggggcaggacccacacatcccttccatagggccaagggctagtgagcgcatgtgccagacagtaaatccaagcatggaggaactcacctgtaccattcctcctagcctacagtagggcagggagaaaggagggcattagcacaaagcaggccattcattggagctggtgaccgccattcaggcaggccctgaaaatcagaggtggcctaggtgtgccctgcatgaaggggaggtcccaagggacgcgtgaattttgaagtattcagaattggtcttagagggcgcctgaccctcgttctggataataacatggcatctcgcccaggtagagaaagcctaggaccttgaaatatgtcctccgaagtgagctctgtttgcctctcctgctgtgtagcattgacaagtcgctttcttctgtgccttgattttcttttttctttttttgagacagaatcttgctctgtcgcttaggctggagtgcagtggcacaatctcggctcactgcaacctctgcctccaggttcaagtgattctactgcctcagcctcccaagtagctgggattacaggtgcatgccacttgcccgactaatttttgtatttttagtagagacggggtttttgccgtgttggccaggctggtctcgaactcctgaccttgggtgatccacctgccttggcatcccaaagtgctgggattacaggcatgagccaccgcacctggcccgtgccttggttttctgatgtgtaaaatgggaccacttctcaggggtgtggggatgaaatgaaatgacacatggaaaagactctcagtgtggagactgggcctttccttagatgggggctggggggtgtcacagaggacctgaaccggggctcttctgggttaacaggctgaaaccacctccccagaatcccacattatagtggttaaaagcagggtctggactcagaaggtgctgggtatgaatcacagctttactacttatcagctgttgtcctcatctgtaaaatggggcaatagtcatggtctcatgtgcttgttatgggcattatatgcctggtacatggcaagtacaaaataaatgatttgttattgtttttatttgacaggactccagaccccatcctcccaactccacccactttagtctccatggagacccaagggcggctttagggcctctggcactgaagatggaatagctttgccttgtggatctgacctcctgggtaccctggctgattccttgtttggtcttggacatgtcagctctctctgggcctcaatttcccccttttgctgaatgacagcctggactccatattccctatttaggactccagcgctcctaaaggcagactctcagggcttggaaggtagaagcatgctacaagaaggcaatgtctgttcaaaggtgtgtgggctgggggaggcgtgctgtgtgattgattctgctccacctgagatggtcccggcactccaacacagggtcaaggtgctgccagtcactcagtccctgctctgaggtggctcagaccaggtgtcccgaaagcagcctagggacggcggccaagcttaaacactgacgcgagaaaggggtggagtcgagggaggggacgtggtctcaggaacaaagaggagggcggagaggggctgtcctgaaggctctgagactcctacgaccccaggaaacttacctcggctcggggcgccccccccgacttggcgcagagcctgcgtccccctgccgatgcccacccgactcgctaaagccaccgaggcagacgaccccaagactcccaatttccgacctccctggcccgcgaggggcggggccttcctctcggggcgtggccgtcaaattgaattttcccaatggggcacgagagtgggaggtacccaatcgagggttggctggcgcgtcggggcagggcggggccagccgggctgctggcgcggctggacgggcagctctccgcagaatccaggggacggttgctgagcgggcctgggacagcgggtcgcggcacctccggcctgcgcgtgtctaatccgtctgtcgggtcccgaaagagctaagccgagcctgcgccggacgggtgggctggactgagaggtgggtgtgcggacctcgggggggatcctggtgctgccccaacgtgtccgggggtggaacccggatgtctagacaggagttctggaacgtccagacctgggagcccccacccatacgagaggtctaagccatgggataaagttatgagactgttgggggaagacgcccccggattcctaagagactccacgccccacaggggcgctagtctgtggcggcagaaaccctggggaagctgccacagaatcctgaggcccctcacaatgtccggcgaccccagactgtgtgacagggagattggagaagagcagcggcagggatcttcttataatcccatgggtgtcctagattaggcattagggtcagctgccccatagaagaacagacatggggggaatcagaatgtccgcagaacctaaggctggtgaccactggacagtcttgaagaggtttaacccagacagagtaactaggtaagaggcaaggatcctaacaggcagagattgggaggttgacacctctgagcctaccaggatgggagggggaacaagcagtgacttgaacaggctgggacccacacaccccaactgtgtggagcggtaaccctcaccccccacccatgcaccgtatggggtgacttcccaagtgactgttctgaagagagggaagggatgattgaaagatgaatcaacaggaggtggggggcaggcctggggccacacattagtcagtcaccatacattaactaagcatccacagtgtgccagaccagggcccctcaaattccagacagacattagttggggctacaggaggaaggagagatctgcgctgggaggctgggccaggatttaggggtccattttgatgggcagcactggggcaagatggggctcttgcctctgtcactgagagtgttccaggcccttgagggcactttggaagggagcttcggaagccggagatgacgaagattttgattacatccttctctgccctctaagtctttggcttcctccttgctcagtgacaaatccttggccctctccaatcttctcagtttgcctgaaatccaggggttgggcaggtcagcttctgaaagcccttccaggtggggaattgaattctgtatgaattggcaggaggtgctgggtgcctggacacctggcttcaggaggtctggacagcagagctggctccaagaatcggaagacacagtgtaccttcctatacctgggggaatgacagtggtggtggcagcaagaactacgggttcagcccacagccagaagctgagcctgcggagtgggtgggggctgggtaggccctgtggatgggtgggtggggcaggaaactggagactggagtgcaccccctggtggtaagcacagcttgggtgggtcttgccaggccctggcttctcaatccaggtccctgccctccctgttttgaggtttagacaggatgagagtccatcccaggccacacagcagactggcggccaagctggcagggctggaaccagagaccccctaccctgggtttggtgagttttccagcaaaccaccctagggcagagggcagcttccagccaggagccacattataggatgggacagtaatggacgctcctaggttagagagggaaagtaaggcacagagcctaagtgcctgtggtttctggaagccccagcatgcctgattcatgtctgtcccctgcagaattctctgagctggtgacaggtgccacaggcactggggatctcaccagaaaggaaccgacggagctaggggccagcgagatggcggacgaggccttagctgggctggatgagggagcccttcggaagctggtaagtggccccatcacccactgtggggacaggaaagccaagccagagaggcagggtcaatccagggtacctctcagctgacaggaagaagtgatgggggaaaggtcaggaggagggggacatgggaacaggggtaggccagttccatgtggctgatgcagaggcccttgtggcatgtgcctgtccatgcctggtactgaagcctagtccctcccaaccctccacagccaccacctgtttaaacagtaactgctgtagactcgcccgtatgcagccacaggtgtggggaggctggatatgcctctccagagcaatagctcgggcaatgcccacccctggaagctggcccagtgataatggtagcagcaatgattaataatgccaaggcctggcagggggcaggctgggtactgggtataccatgtcacagaataatcacagcagctctgaaagcctgggcactgcgactcaagagagttaaaatcacctgctcaaggacacccatctaagaaggagctgtgccaaaatcccaaccccatagtgggccacgggggaccagagtcctgggaaagtcaaggctggacgaggccataagagagagacaggttttgtgggcccttatggattctgtggcttctcatctcatttttctactcttgagtctcagttcctctacctgtaaaatgaagggagggagggagatgtgtttgcacacaagctctaggtcctagagttggcatggggacagaatgaggcatggacccagatctcaggtggaggaaagatgagcccactccatcccctttcttgttcctcttcctgagagccctgtctacctccatgcacagaggccgtagggcaacccagtggggcagggctccttccccaaccccaaaggccaggcagcctgacctggaggaggggccagaggagctccatctcctcagtccctgacccttgtccatgggggtaaattaaagatttactttacctagaagacaagtgacccaccccactctcataccttcccccgcaggcagaggctggaaccaaccagcgtagcccagccactgggcagtgcccagctgctgccatgacctccccaaggcactctgcctgtatgttctcggaccagcgcattagactctctgggtgtctgcctctccactatcaccgcaggatgtgtgcagcctggaggggatgaggttaggtttccaaaggtgcccgccagtcagttcgaccttccctcaggaagtccaagtcccagtgggggtcgtagaggcagcacagtccaaaaagagggaatgccaggcctggttcccgcacatcctcatctcaaggtatccacaggcaggctcagggttcttcagccgccacctccctctcttaagcgaggctcgggcggcgctggaaaagagttttggagagaagctggagcagtggttgaatctctgggaaaggacagatgagaacctgccccggtctcgggatcggtgcctctcgaagtctttccgaccccgggagcggctcctccagcacccggcgcccgccattactgcgccccgcgcgccggcccggcccccgctggcctcgtggcaagaacgggggcgtcccgagccgggctcctccccgcggggccgggccatataaggaaaagctaggcccgctccgcccgccctgcgccccagcgtctggccgatttggggacgcgggcagtcgcttccggccccggctcccgcacattcttgaggattgggccggggatgggaggaatggggacgcctggggacttgcacgccgcgtgcccctccaccacccgccgggacgccctctgcctcggtcccgagttcgagttcgacctccgccactcagctgggtgtcctggggaccttggtttcttccctttagatccggacactgaagcaggcggtagcgggtgtcttcctacctggctaccccttcggcgcctagcgcgaggcagggtgggcgaggcgagggcggcgccctgcgagggagggcggtcgcagaacctgcgggccttcagcgccccctggcgaggcttccctccaccgccggcgggacccccatgggcaaccgggggagctgggactgaaagcctggagagccccctccgttgtgctgttggggagactgaggcccagtgagacctcagggcctgccaggcgttcccaacagcgagggcagagagtacacggagagccggctccccagggggaggaagcaccctctttcctcccgggagaatttcactgggcagtttcggaaaccgccccatccccttccccttccccctcggtagacaatggcgctttgtacttccttccctccctcccacagctccctccttacacagcggtggggcctgggcgggtggaactcgggacacacagaggagacactgtggtccaacctttgcctccaggcccaaagggaagggtcgtgccagagggtgaccagtggaatgaggttgtcagtctccagccttgcccacccactttgggggatcagagggaggctcccattttccagatggggacactgaagctccgggggttgtgctgtagaggtggccaagttcctacatcaggcttttgtcagagacaaggaccccatctccgagcccagagcactgagaatggggacctaggagacaaaaggctagcccttgcccctctgggcctctttaccctctgtacagaaggggctggaccctctgtcccctccagcccccagcctccaaatgtaccacagaaggctctaggcctgagacacagccagcaccgggggctggggagtgagcctcattccccccgcctctgctataaggcctccttaggcctcagagcatctctagtccaggctagaggggtctccaacacagtgccaggatccctgaggtccccaccatgacacacagaccccagtagcagagctatcttcagcctagggcaggccctggagtcagagagacctgggttcaaatcctggctcaggtcatttgaccatgagcaaatcacatgtcctccctggacttcaatctcctcatctgtcaaatgggaataacagtagtatctagggtttttgtgggcttaggacaagtagggggctcagcacagggtttgactcacaggctctccataaatgttactgatgcctcggggtatcctgcccttcccatttgcccccttgtctctctccctcctcctgactggctagaaccaagtatgggggtgatgcttattgcaactgcagctatgtacaggagaggccaagtcactgttcccaaccccacccactggcaaatgaaaaaaccaagacacagagagtttaagggatatgctcttgatcacccagccaggattggactagggctggaaccaactaagggctctggcctgagtttcagggggtcttctcataattcctcaggaatgtggagcctggagggctcttcccccaagactctccctgctctcttcagactaggacaagctggctcatggctgagttgggccagcccacactccctgctgaaaactatctccatcccatccccacccttgccacctggccttcccgctaagcagaaaggaatgacgggggggcgctaaaaagggagatgatagagggttctttggccctacccctgaatgatttggggggtggggacagaggaaatcaccccgcctttactggctcccgtctggttatcagacccacactggaggcttatctctgccactatcttccaggggaaccctgggccagtcctctctcccttgagccacggaggatctgtatgtagcaggtggctctacatggtggaggtgtgggggaggcaacaggattggctgactcactccagagaaggtgttctttcctgaacctggttagaccagtcacccccaatttcccgggaactgaggggttgagaaccggtagaagcagctgtcacccagggatgccctctataaggccctggggtggcccctagtgccagccaccttatatgtctgggggattggtcctcccactctgcaccctggcttcttccatggtggctaggtccaggccagtgcagtggggacaatagccctcagccaggcaggactcctgagcacctgtcctcagtttccccatctgtggatgaagcagtcaacccccagctgggctgtggtgtttggtgactagaccagggagcctcccttgctcagagggtggacttcatctgtcacctttccctctagggaccctgttagtgacccacagggtggcctccctcctcctcctacaatagctccctgacttttggggatctgggctctgagaggcaggaatcgagttgtagaaaggagtgcctggcttggcacctggcacaagtgggcagtttctggctgtccactcacagttgtgtgctctgtgaaccacaatgcaaagtggactacccaagatccctgaaacagtgggctgggtctacccccgggaccctgcgtgggcaggcaggcacgtgaagagcttgggacacagggagtggacacaggccacacattgtgccctaggcagagccgtgggcagctggtgccagccctccgcccctggcagccaaaatgacctgcctctcgcacccactgcagctggaggtcacagcagatctggcagagcggcggcgcatccgctcagccatccgggaactg

SEQ ID NO: 14160 - DNA, 566 bp, Homo sapiens
gtaacaacatggcagctcccatgagaacggcatggttggagtcagaagaggaagaagcagaactgggcaggactccagaccccatcctcccaactccacccactttagtctccatggagacccaagggcggctttagggcctctggcactgaagatggaatagctttgccttgtggatctgacctcctgggtaccctggctgattccttgtttggtcttggacatgtcagctctctctgggcctcaatttcccccttttgctgaatgacagcctggactccatattccctatttaggactccagcgctcctaaaggcagactctcagggcttggaaggtagaagcatgctacaagaaggcaatgtctgttcaaagaattctctgagctggtgacaggtgccacaggcactggggatctcaccagaaaggaaccgacggagctaggggccagcgagatggcggacgaggccttagctgggctggatgagggagcccttcggaagctgctggaggtcacagcagatctggcagagcggcggcgcatccgctcagccatccgggaactg

SEQ ID NO: 14161 - DNA, 7257 bp, Homo sapiens
gcagaatccaggggacggttgctgagcgggcctgggacagcgggtcgcggcacctccggcctgcgcgtgtctaatccgtctgtcgggtcccgaaagagctaagccgagcctgcgccggacgggtgggctggactgagaggtgggtgtgcggacctcgggggggatcctggtgctgccccaacgtgtccgggggtggaacccggatgtctagacaggagttctggaacgtccagacctgggagcccccacccatacgagaggtctaagccatgggataaagttatgagactgttgggggaagacgcccccggattcctaagagactccacgccccacaggggcgctagtctgtggcggcagaaaccctggggaagctgccacagaatcctgaggcccctcacaatgtccggcgaccccagactgtgtgacagggagattggagaagagcagcggcagggatcttcttataatcccatgggtgtcctagattaggcattagggtcagctgccccatagaagaacagacatggggggaatcagaatgtccgcagaacctaaggctggtgaccactggacagtcttgaagaggtttaacccagacagagtaactaggtaagaggcaaggatcctaacaggcagagattgggaggttgacacctctgagcctaccaggatgggagggggaacaagcagtgacttgaacaggctgggacccacacaccccaactgtgtggagcggtaaccctcaccccccacccatgcaccgtatggggtgacttcccaagtgactgttctgaagagagggaagggatgattgaaagatgaatcaacaggaggtggggggcaggcctggggccacacattagtcagtcaccatacattaactaagcatccacagtgtgccagaccagggcccctcaaattccagacagacattagttggggctacaggaggaaggagagatctgcgctgggaggctgggccaggatttaggggtccattttgatgggcagcactggggcaagatggggctcttgcctctgtcactgagagtgttccaggcccttgagggcactttggaagggagcttcggaagccggagatgacgaagattttgattacatccttctctgccctctaagtctttggcttcctccttgctcagtgacaaatccttggccctctccaatcttctcagtttgcctgaaatccaggggttgggcaggtcagcttctgaaagcccttccaggtggggaattgaattctgtatgaattggcaggaggtgctgggtgcctggacacctggcttcaggaggtctggacagcagagctggctccaagaatcggaagacacagtgtaccttcctatacctgggggaatgacagtggtggtggcagcaagaactacgggttcagcccacagccagaagctgagcctgcggagtgggtgggggctgggtaggccctgtggatgggtgggtggggcaggaaactggagactggagtgcaccccctggtggtaagcacagcttgggtgggtcttgccaggccctggcttctcaatccaggtccctgccctccctgttttgaggtttagacaggatgagagtccatcccaggccacacagcagactggcggccaagctggcagggctggaaccagagaccccctaccctgggtttggtgagttttccagcaaaccaccctagggcagagggcagcttccagccaggagccacattataggatgggacagtaatggacgctcctaggttagagagggaaagtaaggcacagagcctaagtgcctgtggtttctggaagccccagcatgcctgattcatgtctgtcccctgcagaattctctgagctggtgacaggtgccacaggcactggggatctcaccagaaaggaaccgacggagctaggggccagcgagatggcggacgaggccttagctgggctggatgagggagcccttcggaagctggtaagtggccccatcacccactgtggggacaggaaagccaagccagagaggcagggtcaatccagggtacctctcagctgacaggaagaagtgatgggggaaaggtcaggaggagggggacatgggaacaggggtaggccagttccatgtggctgatgcagaggcccttgtggcatgtgcctgtccatgcctggtactgaagcctagtccctcccaaccctccacagccaccacctgtttaaacagtaactgctgtagactcgcccgtatgcagccacaggtgtggggaggctggatatgcctctccagagcaatagctcgggcaatgcccacccctggaagctggcccagtgataatggtagcagcaatgattaataatgccaaggcctggcagggggcaggctgggtactgggtataccatgtcacagaataatcacagcagctctgaaagcctgggcactgcgactcaagagagttaaaatcacctgctcaaggacacccatctaagaaggagctgtgccaaaatcccaaccccatagtgggccacgggggaccagagtcctgggaaagtcaaggctggacgaggccataagagagagacaggttttgtgggcccttatggattctgtggcttctcatctcatttttctactcttgagtctcagttcctctacctgtaaaatgaagggagggagggagatgtgtttgcacacaagctctaggtcctagagttggcatggggacagaatgaggcatggacccagatctcaggtggaggaaagatgagcccactccatcccctttcttgttcctcttcctgagagccctgtctacctccatgcacagaggccgtagggcaacccagtggggcagggctccttccccaaccccaaaggccaggcagcctgacctggaggaggggccagaggagctccatctcctcagtccctgacccttgtccatgggggtaaattaaagatttactttacctagaagacaagtgacccaccccactctcataccttcccccgcaggcagaggctggaaccaaccagcgtagcccagccactgggcagtgcccagctgctgccatgacctccccaaggcactctgcctgtatgttctcggaccagcgcattagactctctgggtgtctgcctctccactatcaccgcaggatgtgtgcagcctggaggggatgaggttaggtttccaaaggtgcccgccagtcagttcgaccttccctcaggaagtccaagtcccagtgggggtcgtagaggcagcacagtccaaaaagagggaatgccaggcctggttcccgcacatcctcatctcaaggtatccacaggcaggctcagggttcttcagccgccacctccctctcttaagcgaggctcgggcggcgctggaaaagagttttggagagaagctggagcagtggttgaatctctgggaaaggacagatgagaacctgccccggtctcgggatcggtgcctctcgaagtctttccgaccccgggagcggctcctccagcacccggcgcccgccattactgcgccccgcgcgccggcccggcccccgctggcctcgtggcaagaacgggggcgtcccgagccgggctcctccccgcggggccgggccatataaggaaaagctaggcccgctccgcccgccctgcgccccagcgtctggccgatttggggacgcgggcagtcgcttccggccccggctcccgcacattcttgaggattgggccggggatgggaggaatggggacgcctggggacttgcacgccgcgtgcccctccaccacccgccgggacgccctctgcctcggtcccgagttcgagttcgacctccgccactcagctgggtgtcctggggaccttggtttcttccctttagatccggacactgaagcaggcggtagcgggtgtcttcctacctggctaccccttcggcgcctagcgcgaggcagggtgggcgaggcgagggcggcgccctgcgagggagggcggtcgcagaacctgcgggccttcagcgccccctggcgaggcttccctccaccgccggcgggacccccatgggcaaccgggggagctgggactgaaagcctggagagccccctccgttgtgctgttggggagactgaggcccagtgagacctcagggcctgccaggcgttcccaacagcgagggcagagagtacacggagagccggctccccagggggaggaagcaccctctttcctcccgggagaatttcactgggcagtttcggaaaccgccccatccccttccccttccccctcggtagacaatggcgctttgtacttccttccctccctcccacagctccctccttacacagcggtggggcctgggcgggtggaactcgggacacacagaggagacactgtggtccaacctttgcctccaggcccaaagggaagggtcgtgccagagggtgaccagtggaatgaggttgtcagtctccagccttgcccacccactttgggggatcagagggaggctcccattttccagatggggacactgaagctccgggggttgtgctgtagaggtggccaagttcctacatcaggcttttgtcagagacaaggaccccatctccgagcccagagcactgagaatggggacctaggagacaaaaggctagcccttgcccctctgggcctctttaccctctgtacagaaggggctggaccctctgtcccctccagcccccagcctccaaatgtaccacagaaggctctaggcctgagacacagccagcaccgggggctggggagtgagcctcattccccccgcctctgctataaggcctccttaggcctcagagcatctctagtccaggctagaggggtctccaacacagtgccaggatccctgaggtccccaccatgacacacagaccccagtagcagagctatcttcagcctagggcaggccctggagtcagagagacctgggttcaaatcctggctcaggtcatttgaccatgagcaaatcacatgtcctccctggacttcaatctcctcatctgtcaaatgggaataacagtagtatctagggtttttgtgggcttaggacaagtagggggctcagcacagggtttgactcacaggctctccataaatgttactgatgcctcggggtatcctgcccttcccatttgcccccttgtctctctccctcctcctgactggctagaaccaagtatgggggtgatgcttattgcaactgcagctatgtacaggagaggccaagtcactgttcccaaccccacccactggcaaatgaaaaaaccaagacacagagagtttaagggatatgctcttgatcacccagccaggattggactagggctggaaccaactaagggctctggcctgagtttcagggggtcttctcataattcctcaggaatgtggagcctggagggctcttcccccaagactctccctgctctcttcagactaggacaagctggctcatggctgagttgggccagcccacactccctgctgaaaactatctccatcccatccccacccttgccacctggccttcccgctaagcagaaaggaatgacgggggggcgctaaaaagggagatgatagagggttctttggccctacccctgaatgatttggggggtggggacagaggaaatcaccccgcctttactggctcccgtctggttatcagacccacactggaggcttatctctgccactatcttccaggggaaccctgggccagtcctctctcccttgagccacggaggatctgtatgtagcaggtggctctacatggtggaggtgtgggggaggcaacaggattggctgactcactccagagaaggtgttctttcctgaacctggttagaccagtcacccccaatttcccgggaactgaggggttgagaaccggtagaagcagctgtcacccagggatgccctctataaggccctggggtggcccctagtgccagccaccttatatgtctgggggattggtcctcccactctgcaccctggcttcttccatggtggctaggtccaggccagtgcagtggggacaatagccctcagccaggcaggactcctgagcacctgtcctcagtttccccatctgtggatgaagcagtcaacccccagctgggctgtggtgtttggtgactagaccagggagcctcccttgctcagagggtggacttcatctgtcacctttccctctagggaccctgttagtgacccacagggtggcctccctcctcctcctacaatagctccctgacttttggggatctgggctctgagaggcaggaatcgagttgtagaaaggagtgcctggcttggcacctggcacaagtgggcagtttctggctgtccactcacagttgtgtgctctgtgaaccacaatgcaaagtggactacccaagatccctgaaacagtgggctgggtctacccccgggaccctgcgtgggcaggcaggcacgtgaagagcttgggacacagggagtggacacaggccacacattgtgccctaggcagagccgtgggcagctggtgccagccctccgcccctggcagccaaaatgacctgcctctcgcacccactgcagctggaggtcacagcagatctggcagagcggcggcgcatccgctcagccatccgggaactgcagcggcaggagctggagcgcgaggaggaggccctggcatccaagcgtttccgtgccgagcggcaggacaacaaggagaactggctgcagtgagtagcggggggtggaacatgcgggtgagaaggtgagtgtgagccctggctcagctcatgtgtgcaggcaggcgtgagcacaagtgtatctgtggattgcatgtgctaatggcagtacgtccacacacgcttctggaaaaacagagatgtttgtgggcatggagcatgtactgattgtggcgtcgcggccgtgctgatgtagccagcacgtctgagtgtgtggtattagtgcccacgtccatgggcatatgtgtatcagtgtgcagttagagggtgtgcacagccacatgcccttctgccaaggttctgggtactctgttctggctcctacccttagcccacatcctccacgacctggccatggcagtggtggttacagtcatgatgtctctgcagctctcagcagcgggaagctgagcagcgggctgccctggcacggctggcagggcagctggagt

SEQ ID NO: 14162 - DNA, 574 bp, Homo sapiens
gcagaatccaggggacggttgctgagcgggcctgggacagcgggtcgcggcacctccggcctgcgcgtgtctaatccgtctgtcgggtcccgaaagagctaagccgagcctgcgccggacgggtgggctggactgagaggtttagacaggatgagagtccatcccaggccacacagcagactggcggccaagctggcagggctggaaccagagaccccctaccctgggtttgaattctctgagctggtgacaggtgccacaggcactggggatctcaccagaaaggaaccgacggagctaggggccagcgagatggcggacgaggccttagctgggctggatgagggagcccttcggaagctgctggaggtcacagcagatctggcagagcggcggcgcatccgctcagccatccgggaactgcagcggcaggagctggagcgcgaggaggaggccctggcatccaagcgtttccgtgccgagcggcaggacaacaaggagaactggctgcactctcagcagcgggaagctgagcagcgggctgccctggcacggctggcagggcagctggagt

SEQ ID NO: 14163 - DNA, 1848 bp, Homo sapiens
attgtgccctaggcagagccgtgggcagctggtgccagccctccgcccctggcagccaaaatgacctgcctctcgcacccactgcagctggaggtcacagcagatctggcagagcggcggcgcatccgctcagccatccgggaactgcagcggcaggagctggagcgcgaggaggaggccctggcatccaagcgtttccgtgccgagcggcaggacaacaaggagaactggctgcagtgagtagcggggggtggaacatgcgggtgagaaggtgagtgtgagccctggctcagctcatgtgtgcaggcaggcgtgagcacaagtgtatctgtggattgcatgtgctaatggcagtacgtccacacacgcttctggaaaaacagagatgtttgtgggcatggagcatgtactgattgtggcgtcgcggccgtgctgatgtagccagcacgtctgagtgtgtggtattagtgcccacgtccatgggcatatgtgtatcagtgtgcagttagagggtgtgcacagccacatgcccttctgccaaggttctgggtactctgttctggctcctacccttagcccacatcctccacgacctggccatggcagtggtggttacagtcatgatgtctctgcagctctcagcagcgggaagctgagcagcgggctgccctggcacggctggcagggcagctggagtccatgaacgatgtggaggaattgactgcactggtgaggcccaggctggggcaggggatgggggcagggcaggtgaagacctggactccacagcccaacacccgcgacctgtctcttacccacagttgcgaagcgctggtgagtatgaggagcgcaagctgatccgagctgccatccgccgtgtacgggctcaggagattgagggtatgtggcctgtcccggccccacccctgccctgctgtctgctgtccacagcacctccctgtcactcacctgccacttgctccttcccttccagctgccaccttggctgggaggttgtacagcgggcgtcccaacagtggctcaagagaggacagcaaggggctagcggcacacaggctggaacagtgtgaggtaaggagggtgggagagtggcccagtgtcctgtgcccatggataccggtagcacagagtgcctgagtgtctttgctaggctggtatttcactgtaaggggcccacccctgccatccagcctctatttagcagtcagagggatctcccagaaatgcaaatccggccctggcacctcccctgcttcaacccgtcccagggctgcccctcaccctccacacagcccacatctttaccttggcttatggggcctgcatgtcagaccccagctggctcacagttcactctattttccagagtgtgggtgagaggtcaggccatgcaggttccccaagtggccagcagaggccgctgggtccacggtcctggcaggaccccactcccactccagatgaaccaggctgaggccaggagtcaggaacctccactccagggatctattaaggctcccgtccccaataggtctcctgccatacccacccactgacatcaggacctggtcctctctgaacccctttggctaggtagtgccaagagattgggaagtggggatcagagactgcccttagcatgccagtgccagtgcttgcgcaggtgtgcctacaggaagccatgccccaccactctgctttgcatgccctgccctgggcacttgccagcctggccctcagtggtgggggtggcgttcaaagcctagggagccttggttgcatcctgtgggtcccttacaggtgccagagcgagaggaacaggaacag

SEQ ID NO: 14164 - DNA, 534 bp, Homo sapiens
attgtgccctaggcagagccgtgggcagctggtgccagccctccgcccctggcagccaaaatgacctgcctctcgcacccactgcagctggaggtcacagcagatctggcagagcggcggcgcatccgctcagccatccgggaactgcagcggcaggagctggagcgcgaggaggaggccctggcatccaagcgtttccgtgccgagcggcaggacaacaaggagaactggctgcactctcagcagcgggaagctgagcagcgggctgccctggcacggctggcagggcagctggagtccatgaacgatgtggaggaattgactgcactgttgcgaagcgctggtgagtatgaggagcgcaagctgatccgagctgccatccgccgtgtacgggctcaggagattgaggctgccaccttggctgggaggttgtacagcgggcgtcccaacagtggctcaagagaggacagcaaggggctagcggcacacaggctggaacagtgtgaggtgccagagcgagaggaacaggaacag

SEQ ID NO: 14165 - DNA, 23921 bp, Homo sapiens
agctgtggggtctgtaacaacatggcagctcccatgagaacggcatggttggagtcagaagaggaagaagcagaactgggcaggtgagctgggaagagaataccatagatgtccactatggagatgataaatgccctaatagatgcgcacaaaaaatgtcatgggcatttaggggatgaagacacaatttctagctgtgcaactgtggtgatcagtcagagcttcttggaagaggtggcattcgagctgggtcttgaagccgagaatcatctggaacgtacagagattctaaatgccacctcacattagaaaagaaagatgatccctggtaatggagaagatagcatccgaaagaattaaatatgaatgtctcactttgtcaagatttcataggttttttatttttacagatggtgtgtctcgctctccctcccagactggagtgcagtgcgatcatagctcattgcagccttgaactcctgggctcaagcggccctccagccccagcctccagagtagctgggactacaggtgcacaccaccacacctagctatagttttcaaaatttagatataattcatatataaattatattttatagttattttggtgtttaattttgaaataattttagacttacagaaacgttgcaaaaatagttcagagttatcctaaactcttcatttcctacaccttcacctagctttccctgataggaacatcttacctcaccttagtacaattatcagaaccaggaaattaacactggtacagtaacctacataccttatttgaattttagctgttttccttttgatctaatccaaggtccaacattgcatttagttgtaatgtcttcttagtcttctctaatctatgacagctcctcagcctctcgctttttttctcaaatgaccctgacacgtactgttcagtcattttatagaatatccctcaatttgaatgtctgattttttttttggtgattagattgagcttatgcacttttggcaagaatatcacagaagtaacgttatgcccttcttagtgcatcagatcaggggctactttctgttgatatgacttattactgggcatgttaacactgatcatgtggttaaagaggttatctgctgggtttctcttttataattttataataagtgtccttttgtaattagtaattatcttgtggggagataataagaccatgcaaaaatgtaaatttcttgacatttacggtatgtttgtttgtttttttgaaatgaaatctccttctgtcacccagggtggagtgcagtggtgccatttcggctcactgcaacctctgcctcttgggttcaagcgattctcctgcctcagccttccgagtagctgggattacaggggcccaccaccatgcctggctaatttttgtattttttagtagagacgtggtttcaccatgttggccaggctggtctcaaactcctgacctcaggtgattcgcccacctcggcctcccaaagtgttgggattacagacgtgagccaccgcgcctggcctacatttttttttttaagtgctgtcaaatgcatgccgtctacttttcttcagtaaatgtcaactctttacccattatgtgccagtccctgtggggtgtgccaagcagaaaaagcactgatctaagatgtgtggctcagttatgtgtagatccatgaccttgctgggctttaggatccttatctataaaatggatatcattatatcttaccagtaagaactgctgaggataaaggcagaccgtacttgtgaacgtgttctgtaatacaaactagggttgttcattctccttctgcagtgctcagctctggcctctcctctcctgtttgcatttcccttttccttcctgcctgtgttcaggcctgcagacttctgtctgtcctccctggtctaactcccttatcctacttgccaagccttactgtgatgtcatttaataaattttggagacacaaggagcgcctcatagagatggacaatttccttcagtagtctcctgctgtttttagagttgcctccaggtgcctgggcctgtgggtgttgggcaggagaaccttcctcctatggcagaaataagtgggagaagtagggattgccttcctccaataataatgctttggccctaaaaaggaaactcttgaaccccatagaatattttattttattttattttatttttgagacagagtctcgctctgtcgcccaggctggagtacagttgcacgatcttggctcacgcaacctctacctcccagattcaagcaattcttgtgcctcagcctcccaagtagctgggactacagtgatgcaccaccacgcctggctaatttttgtatctttagtagagatggggtttcactgtgttaccatgctggtgtcgaactcctggcttcaagtgatccgccctccttggcctcccaaagtgctgggattacaggcgtgagccaccgtgcccagccaaaccccatagaatattgaagaagcccaaatggatacttgtgtcttactgagtggacacactttaaagttacttcaaaacatgaaaggatgacttactccatatcaaacctcctaattaatccaacagtaattttttttattttgttttattttattttattttttgagacagggtctcactctgttgcccaggctggagtgcagtggcacaatcacagctcactgcagcctcaaccttttaggctcaagtgatcctcccaactcagtttcctgagtagctgggactgcaggtgtacgccaccatgcctggctaacttttgtatttttttgtaaagacagagttttgccatgttgccgaggccgctctcgaactcctaagctcaagcaatccacccacctcgtcctgccaaagagctgggattacaggtgtgagccaccacacctggcctgcaattttaatctaaggcaggatttacttatttatttagagacagagtctgtctctgttgcccaggctggagtgcagtggtgtgatcatgactcactgcaagcttaaactcctgggctaaaacaatcttcctacttcagcctcttgagtagctgggactacaggcacacaccaccatgaccagaaaggttttttttttttttgacacggagtcttgctctgtcgccaggctggagtgcagtggcatgatcttggctcgctgcaatctccgcctcccaggttcaagcaattctcctgcctcagcctcctgagtagctgggactacaggtgcgtgccaccacacccagctaacttttgtatttttagtagagatggggtttcaccatgttggccaggatgatcttgatctcttgacctcgtgatcctcccccttaggcctcccaaagtgctgggattacaggcataagccaccacgcccggcgcacctgcttcttcttcttttttttttttttttttttgagacgagtccccctctgttgcccaggctggagtgcagtggcacgatcttggctcactgcaagctctgcctcccgggttcacgccattctcctgcctcagcctcctgagtagctgggactacaggcgcctgccaccatgcccagttaattttttttttgtatttttagtagagacagggtttcaccatgttagccgggatggtctcgatctcctgaccttgtgatccgcctgcctcagcctcctgaagtgctgggattacagtcatgagccaccgcgcctggcccacacctgcttcttaaaggaccaagtcctggctgggctcggtggctcatgcctataatcccagcactttgggaggccaaggtgggcagatcccttgagtccaagagttcaagaccagcctgggcatagcgaaatctcatctctacaaaccattaaaaaatgttttggctgggcacagtggctcacatttgtaatcccagcagtttgggaggccgaggcgggtggatcacctgaagtcaggagtttgagaccaacgggccaatatggtgaaaccccatctctactaaaaatccaaaatttagccgggcgtggtggtggacacctgtaatcccagctactcgggaggctgaggaaggagaatcacttgaacctgggaggcggagattgcagtcagccaagaccgcgccattgcactctagcctgggtgacaagagtgaaactccatctcaaaaaaaaaaaaatgttttaaagggaccaagtccttttaggggagcttctgatcatttgaatctccaataacagaagaggttttcaaatgttaccccggggattcctcattgcctgctcccagtattttccaagaaagacctgaggctcctttctgagcttcattcccttgttctcctcccagcccctcagctgtcttttgtaccaattaggtagttattaattgctccctaattgcaaattggctgcctccttactggctcccacccatgctggctggctgaccaaggggtcacatgcatccttcagggaaaggtgttttgtgaatccagtggttcatttgttccacacgtgtgttgagccccttcgttgacgccagatcctttctaggtcctggggaccgtgttgagcgagacaaacccaagtccctggcttctcagagctcacagtctagcaggagacaaacaacaaaaaaattaatcatttccgatcgtcagtgctgtgatggggagtaattacagtacagagtaattttggggagcttcagatacgtgctctgggaagacctttctaaggaggtgatgtgtgagttaagatctgaatggtaatctggagccagccagagtgaagatgtggttgaagagcacagtcccaggggagaagaaagcaaaggcagaggccaggggagagaaagcagcatggcctctctcaggggcattcatcttatctatgaagccctaagcgattcagaagtcaaacatcaggttggggctagttgtaaggtttagggcaaaacacccctcctactccctgttgttagaagaccggaggcggggtttgcccccacctggccccgctccagaaggaggggttattatacgtctgattgaatcaacttccaggatccttattggtccttggtggtaactagggcgctctcttccaggatccttattggtccttggtggtaattaggccactctcgcttcaaagtcccaaattcaggcgccccgctggggactagagcgaccgttccccacctcacccaccccaagctcagaggttggagagaactgcctccccaaaggaacccagacccaggcttgagactttgcaaagagacacaagatggggattgccatgtgaagtttccagattttttaaaatgttagaacgatgaattcgaaaagctttaaaacactgcacaggccaaacaacaagtctatgggcaagacctggccagctggcctgggtgcggtggggcttggtgaacgcctagaggtagggacgagggagagaaggagtcaggaaggatgctaactgcatcctggattctgggacacccatgccctggcagagatgtgccctaagaggaacgaactcacggccacaggcacagattgagcacctaactgtgtgcatggctctgtgctaggatgggggacacaaaacacttcataggactgcaccctcgctcagggctgggtgggccgacctcaggaaacctgggttccagccctgacttgctctcctataattgctgtgtgaacttgggttgattcatcatctctctgggattcagcacacagcctttgttgacattagattaactaaatccagtaagggaagattttgaagggcctctgggtgtctggatagggaatctgggctgggtctaataggaagtaggaaccaccccaggttcttgagcaggggagtgacatgttgaagaggaaagtgaagcaggccacctgtgcagagacacacatcatccaggtgtggggtagtgaggacagcaactgaagcgtatgcaaatcagatctgatcacctctagctcaaaaaccttccatggctccctgcagccctcacatgaaagtcctttcctcttactatgggccatgggcagggccagcttcacgtaatgaagggtcggtgtaatgctctgctgtcactatcttgaaatacttcagaatttttgaacaaggagctccgttttctcattttgcaccaggccctgcaaattgtgaaggttcccacaggggcctttcagtctgggcctttcccctctccccatccaaaccccacttctcccttacccttcatacttcactcacgttggtcttccatcagtttctggagattgttcctgcctcgggacatttgcgtagtctgttccccttgcctggaacacccccacccccacgtcgagaccaacttagttttttgttcaacaatttcttatcttccagacttgagcataattatctcctgagagataactcctctgacctcccagaactacctgttcaaaacaaaactttaaaaattatttaagccagccgggcacgatggctcatgcctgtaatcccagcactttgggaggcccaggtgggtggatcacttgaggtcaggggttcaagaccagcctggccaacatcttgaaaccccgtctctactaaaaatacaaaaattaaccgggtgtggtggcaggagcctgtaatcccagctacttgggaggctgaggcaggaggattgcttgaacccgggaagcagaggttgcagtgagctgagatcacgccattgcactccagcctgggtgacagagtgaaactctgtctcaaaaaaaaaaaaaaaaaagaaaagaaaacgatttaagcctgagtgcagtggctcactcctgtaatcccaatactttgggaggcaaggcaggagtattgctgaggccaggaattccagaccagtctgggcaacacagcaagatcccatctgtacaaaaaataagaaaattagccagacatggtggtgtgtgcctgtagtcccagctactttggtggctgaggcaggaggattgcttgcgcccaggagttcaaggcttcagtgagccatgattgcgccactgcactcctacctgtgcaacagagctacaccctgtctcaaaaaaaaaaaaaaaagcaataatggaggcatttcaggcatgtgtcagcagccataggtgttcaggggctttgtgcttatgaaggtttgttcagtaacaaatattcagctggagcgggcatcatggctcacacctgtaatcctagcacttcgggaggctgaggcaggaggattgcttgagcccaggagtttgagaccagctgggcaacaaagtgagacctgatctctacaaaaaataaaatacataaaattagttgggcatagtggcatgcaccggctgaggtgggaggatcgcttgagcccaggaggtcgaggctgcagtgagctgcgatcacgccattgcactccagcctgagagacagagtgagaccctgtctcaaaaaattaaaaacttaattaattaaaaaaaattcaactggggaaatagttctagctctctctttctctctctctctctcttttttttttttttttggaggcagagtttcactctgatacccaatctggagtgcagtggcatgatctcggctcactgcaacctccaccttccaggctcaagggattctcccacctcagcctcccaagtggctgggactataggtgcatgccaccacacccagctcatttttgtattttttgtagagatggggttttgccatgttgcccaggctggtctcgaactcctggactcaagcgatcctcccacctcagccccccaaagtgctgggattacaggcataagccaccacacttagccatattgccatctcttaatgaagtaaataaaaccatttacaccacaagagatagagggaagggataggatttgtccaaaacataataaatccccttggccaaattcatggaccctggcagggtaagatcagagatagcatcatttctgcctatgtggctgacattcattatgtaagtcccatgtaccaggatccccatcccatgcaagctccgtgaatgatcactcccaaccttataaggttggaagtattagctccccattttgtggatgaggaaactgaggcctagagaaattaagtaacttgccaaatgtcacacagtaaagaattgacagagttgggattcgcacctagatctgtccaactccagatctccctgagcccttcactactgcaaaatagctactcaactggcttgctgtatgatttggggcaagttcctcaacctttctgagtctcagattctttttttctttttctttttttgagatggaatttccctcttgtcacccaggctggagggcaatgcacgatctcagttcactgcaacgtccgccttccgggttcaaaccattttcctgcctcagcctcccaagtagctgggattacaggtgcccgccaccacgcctggctaatttttgtatttttagtacagacagggtttcaccatcttggccaggctagtctcgaactcctgacctctggtgatctgcccgcctcagccccccagagtgctgggattacaggcatgagccactgtgcccagcctctttttcttttttttaagacaaggtcttactctgtcacccaggctggaatgcagtgggcaatctctgcttactgcagcctcaacctcctaggctcaagtgatcctcccacttcagcctcccaagtagccgggactacaggcgtgcggcaccaggaccagttaagctgagcctcaaattctttacctataacttgtcccttatttaagctaacacatggtaggtgctgaagttgattctctctctctctctttttttttttttttttttttgagacagggtcttgctctgtcacccaggctagagtgcaatggcatgatctcggttcagtgtagcctcaacctcctgagctcaagcgatcctcctgcctcagcttcccagagtagtgggattacaggcatgcaccactgttgattctttatagatgttaattctctgcttaacacacatgcccctccaactcccaccacacatacagacacagacacacatacacacgcacgcacgcatgcacgcatgcacgccagccccacaacaggaggaatgtaacggaagcaatgctttgtgttctgtaacctgtttccttttcctggacacacaggaaggtcatgttctcatttttcctgcagttagtagagtcacgtgactacataaaggccagtgaaattatacgtgacccctgcgcaaaggcagttaagtgtggatgtgcctcctttgattttctgattccctttccacatgcagaggattcaggaatagattccagggaaagcctggggtggaggcaggattcgggggcaaggtcactgcttggaaaagagctccctgggagagccccaacctgtatcagactttgcaggggtgagaaataaactctgattgggttaaaccactgagatatttggtttgttacagcagtcagcattaattacactgaataaaacagtgtatcagttatcaattgccacaacaatgctacataacaaaccaccccaaaacttagtgccttaaaacagcaaccgtttttttagctcaagatttcatggattggcactttagcctgggctcagctaaagatttttctggtctcagttgggcttactcatgtatctgtggtcagctattggattagctggtgactgactaggacagcttcagctaggataactagtccctgttccagtggtctcttaggcaggatagcccaggcttgttcacataacagctgcgagagttccaagagaataagtggaatctcttaaggcccaatctcttaacacccaggcttcgaactggcaatgccacttccgtatattctattggccaaaaatagtcacatgcctgcctgggcatggtggctcacacctgtgtaattccagcactttgggaggctgaggtggacggattacttgaaaccaggagtttgagaccagcctggacaacatggggaaactccatctctataaaaattagtcaggtgtggtggtgagtgcctgtagtcccagctactcgggaggctgaggtgagaggatcacctgagcccagacaggtcaaggctgtagtgtgccatgatcgcaccactgcactccagcttgggtgacagagatcctgtcttaaaaaataaaaaagagctcagcctctagaatcacagccctgggcttaagtcctgactcacttgctattgattttgggcaaatgccttcccctccctgagactgacatttcccttctataaaacaggtgctggggctgggcatggtggctcacacctgtaatcccagcactttgggaggccaagaagggcggatcacctgaggtcaggagttcaagactagcctggacaacatggtgaaatcctgtctctactaaaaatatataacttagccaggcgtggtggtgcacaccagtaatcctagctactcactactcgggaggctgaggcaagagaatcgcttgaacccaggaagcggaggttgcagtgagctgagattgtgccattgcactccagcctgggtgacaagagtgaaactgtctcaaaaaacaacaaaaacaacaacaacaacaacaacaaaacacaggtgctggaagagaggagtcctaacgttgggggctattgtgagaattgactgagggaatgcaccgtggaaacgtgtgctgtaaattacctattttattacacccaaggtgggcttaatagctgtcagggagtgttagtattatctcaaccaaacccccaatttacagaggagaaaacaagagcctcaggcaggtgatgtgacttgccaaggctgcatagctagggagcagtgatgtccccaccgtactcaagtttgtctgtttccagaagctaaggtcttagcctctctacagttagaaagtcctaggtttgagtctcgactctgtccattatagctgtgtgaccttgggcaagtcacttttctctctgggcctcattttttttcttcgtctaaagaaattagcatctgtctcataatgccatggggaatcaatgggaaaatacaaagaaagtgcttagcagagtgccaaggagggacagtgtgcatgctcagcaattgaaggctgccaagttcctgttatcatcaggggcagtgttccatccatcaaaagggctaagaatagtcttagcccggccaggcgcggtgtaatcccagcattttgggagtccgaggcaggtggatcacctcagttcaggagttcaagaccagcctggccaacatgtcaaaaccccgtctctactgaaaatacaaaaattagccaggcgtggtgacgggcccttgtaatcccagctacttgggaggctgaggcaggagaatcacttgaagccgggaggcaggggttgcagtgagccaagattgcgccactgcactctagtctgggtgacagagcgagactctgtcttaaaaaaaaaaaaaaaaaggaatagtcttagccagtgggggtagggtgaggaataagtaagttactgtgggctaagctttagcccagtgcccagcacatattataaacttcataagcagttgctattttaaagggtttttgttttgttttgttttgtttttgtttttgtttttgagacaaggcctcgctctgtcgcccaggctggaatgcagtacttttaaagttctgaaccctgttggaggccaatatgagaccatgggggaccccaggccccaactggcagtggctccaggcactgcctccgtgccatttggctattattaggcccggcgtcctcatctcaaatccagatggggatcgagaagggcgggtagggcagggcctggctggcggaaggctgggaacacggcttggaggctgggtttgggtttgggccccaccctgcctgccttcccttgcttgcagctggtccagccgccacgtctacacttggctctgaggttgttgcagagcactccctcccaccgtggccgcctcctctgggaagatgcagagcccttctgcagcctcagcacttttctccctgccccagagaggccaggcctgcgtggaaactctgaattggacactgcgtgccttcagaaccggcaaaggagccatccaccccgctgtctacaggtcttcatgcctccagtgaggcttactggatctgctgagggggaagggcctatatacctgggttcaaatcccttcgctaccaccaacatgcagtgtcaacttggacaaatgacttcccctctctgagcctcagtttctttgcccataaaagggacagaacattagcatctgctttatagggctgtggtgatggttacatgagtgcatggtatgccataggcactcaatatgtgtcagttatttcatgcttaagtgtgccaggccctgaggaggaaacaaagttttgagaggttgagaatctgggatgcagaatggctctgctcctgatttgctacactacctgaagcctgtcccttgtcctctctgggactcagttacctatttgaaccataaggtgggtatctaggactctgtgatgccaagattcaggtgctatgttcagaagtagagagaagggtttgctgggatcccacactgacaggttggtaaaatattcattctcggactggactctggagccaaaataccctcagcccctgagctgctccagatactccctactctgccagtccagagctgaacctggaagaatctagacccttcttgttacagttttttgccctaggagggcctgaaggaggcgagtcaaaccccctcattttacagatgggcagactgaggcccaggtctccccagtgctcaggcgtcatccaagtggagcttccaaatggtggatggtagaatatggtgattaagaacaaatgttctggccgggcgcagtggctcacgcctgtaatcctagcactttggaaggtcaaggcaggcggatttcttgaacccaggagttcgagactagccccggcaacatagggagacccttgtctctacaaaaaataaaaaaattagccaggcatggtggcacgtgtctgtagtcccactgtgagcctgggaggtcaaggctgcagtgagccatggttgtgccactccactccagcctgggcgacagagtgagactctgtctcaaaaacaaaacaaaacaaaaaaaaaaacaacaaaagaacgagggttctgagcctgtctccttatctgtataatggtggtcctacctcacaggactcaagctgtgaaggtcatagtggtaacaaaattgccacacatgtagtataagcatgatcaggagccagtgtccaacccatcaggtagcaattacatagtgtcccaccatgagcctagacccccactccctgcgcccaggcatcagggactcccagaagtctaaagaggtccaggctggcacatccagaactctctccttcctgttccagccccttgcctctcctttgtctgtgaggctgggtctcctggaattcactgctgcccagtgggcatctgaggccccttctcctcctgcagggccagaagtttgcctggcactgttgcccagagaacacagcggctggatgacatcctggagatgatggccttgccaaactggtttcccagcaggtcctcagtcccactccgagggctgctggccatgacctaggacgcatccagttctgcacataaggaggaaggtcataccccttggatccagccaaccccaacaagaaccatccacctctaggggctccattctccagcctcacctgcctgtctgttgcccaacaaggtcgtcacaatcctacttccgttcctttgctaatgctgttcccgtctccagaatgacagtgctgtcctggggagagaggcttagagagcccaaggcacagctcctccattgtgcatatgagcaagttgaagctccaagagggccaacccttacctagggttggagccaggggtaagacacccatcacccttcttgcctcctgacccaaggcctgggctttctctgaaggaccctgactgggtggagggttagccagggtgacttagggatgcaacacagacagcttggtaaaatagtcattctcagacttgagctctggagcaaaatattacccctagcctctgagctgctccagccacttcccattctgcctttccagggttgaacctggaagaacctagagtagaccctttctgtgacagccccttgccctaggaaggcttgaagcagaccagtctaatcacctcattttacagggggcaggctgaggcccaggcctctctggtgcccacaagatacattcatcctgctcatctggcattcagaatccttggcaaagagaaccacccacatttcctgctccgcccacagcctatcctcctccttttcccagactattggtctttgctcacactgttcctctgccacaaatgccctttcatgcctttccccctcttctatgtgggatgaattttaaaaattagctgggcgtggtggtgtgtgcctgtagtcctagcctcttgggaggctgagatggaaggattgcttgagccaggagtttgaggccatggtaagctgtgatcatgcgactgcactccagcctgtgggacacagcaagaccctgtctccaaaaaaaataaaataaaataaaaacaagtgtgacacacagtttatacaccacttccctaagaagtcttccagagcttcccccatcctagtggcagcaaagtggagggaaggggcttcagcatcaggcagaattccactttagtctgaatgcctttactaggccaaggtgccttcacctccctgagcttcagcttcctctgtcgaatcagagtgtacctatcttgcacagtggtcacctggcagtagtgggagccccacgtctgacatgcaacaggtgttcagcaaatgctggggccctcgtcacgggatgtttactctttcctcggctgtagctgtaaacttccctagcactgtaccggactgccctttgatctctagatcacccccactcccttgcagagaggaagacagaggcaggcgggtatgtctggaggtggacccaggcactaagggcttgaaggggcaggacccacacatcccttccatagggccaagggctagtgagcgcatgtgccagacagtaaatccaagcatggaggaactcacctgtaccattcctcctagcctacagtagggcagggagaaaggagggcattagcacaaagcaggccattcattggagctggtgaccgccattcaggcaggccctgaaaatcagaggtggcctaggtgtgccctgcatgaaggggaggtcccaagggacgcgtgaattttgaagtattcagaattggtcttagagggcgcctgaccctcgttctggataataacatggcatctcgcccaggtagagaaagcctaggaccttgaaatatgtcctccgaagtgagctctgtttgcctctcctgctgtgtagcattgacaagtcgctttcttctgtgccttgattttcttttttctttttttgagacagaatcttgctctgtcgcttaggctggagtgcagtggcacaatctcggctcactgcaacctctgcctccaggttcaagtgattctactgcctcagcctcccaagtagctgggattacaggtgcatgccacttgcccgactaatttttgtatttttagtagagacggggtttttgccgtgttggccaggctggtctcgaactcctgaccttgggtgatccacctgccttggcatcccaaagtgctgggattacaggcatgagccaccgcacctggcccgtgccttggttttctgatgtgtaaaatgggaccacttctcaggggtgtggggatgaaatgaaatgacacatggaaaagactctcagtgtggagactgggcctttccttagatgggggctggggggtgtcacagaggacctgaaccggggctcttctgggttaacaggctgaaaccacctccccagaatcccacattatagtggttaaaagcagggtctggactcagaaggtgctgggtatgaatcacagctttactacttatcagctgttgtcctcatctgtaaaatggggcaatagtcatggtctcatgtgcttgttatgggcattatatgcctggtacatggcaagtacaaaataaatgatttgttattgtttttatttgacaggactccagaccccatcctcccaactccacccactttagtctccatggagacccaagggcggctttagggcctctggcactgaagatggaatagctttgccttgtggatctgacctcctgggtaccctggctgattccttgtttggtcttggacatgtcagctctctctgggcctcaatttcccccttttgctgaatgacagcctggactccatattccctatttaggactccagcgctcctaaaggcagactctcagggcttggaaggtagaagcatgctacaagaaggcaatgtctgttcaaaggtgtgtgggctgggggaggcgtgctgtgtgattgattctgctccacctgagatggtcccggcactccaacacagggtcaaggtgctgccagtcactcagtccctgctctgaggtggctcagaccaggtgtcccgaaagcagcctagggacggcggccaagcttaaacactgacgcgagaaaggggtggagtcgagggaggggacgtggtctcaggaacaaagaggagggcggagaggggctgtcctgaaggctctgagactcctacgaccccaggaaacttacctcggctcggggcgccccccccgacttggcgcagagcctgcgtccccctgccgatgcccacccgactcgctaaagccaccgaggcagacgaccccaagactcccaatttccgacctccctggcccgcgaggggcggggccttcctctcggggcgtggccgtcaaattgaattttcccaatggggcacgagagtgggaggtacccaatcgagggttggctggcgcgtcggggcagggcggggccagccgggctgctggcgcggctggacgggcagctctccgcagaatccaggggacggttgctgagcgggcctgggacagcgggtcgcggcacctccggcctgcgcgtgtctaatccgtctgtcgggtcccgaaagagctaagccgagcctgcgccggacgggtgggctggactgagaggtgggtgtgcggacctcgggggggatcctggtgctgccccaacgtgtccgggggtggaacccggatgtctagacaggagttctggaacgtccagacctgggagcccccacccatacgagaggtctaagccatgggataaagttatgagactgttgggggaagacgcccccggattcctaagagactccacgccccacaggggcgctagtctgtggcggcagaaaccctggggaagctgccacagaatcctgaggcccctcacaatgtccggcgaccccagactgtgtgacagggagattggagaagagcagcggcagggatcttcttataatcccatgggtgtcctagattaggcattagggtcagctgccccatagaagaacagacatggggggaatcagaatgtccgcagaacctaaggctggtgaccactggacagtcttgaagaggtttaacccagacagagtaactaggtaagaggcaaggatcctaacaggcagagattgggaggttgacacctctgagcctaccaggatgggagggggaacaagcagtgacttgaacaggctgggacccacacaccccaactgtgtggagcggtaaccctcaccccccacccatgcaccgtatggggtgacttcccaagtgactgttctgaagagagggaagggatgattgaaagatgaatcaacaggaggtggggggcaggcctggggccacacattagtcagtcaccatacattaactaagcatccacagtgtgccagaccagggcccctcaaattccagacagacattagttggggctacaggaggaaggagagatctgcgctgggaggctgggccaggatttaggggtccattttgatgggcagcactggggcaagatggggctcttgcctctgtcactgagagtgttccaggcccttgagggcactttggaagggagcttcggaagccggagatgacgaagattttgattacatccttctctgccctctaagtctttggcttcctccttgctcagtgacaaatccttggccctctccaatcttctcagtttgcctgaaatccaggggttgggcaggtcagcttctgaaagcccttccaggtggggaattgaattctgtatgaattggcaggaggtgctgggtgcctggacacctggcttcaggaggtctggacagcagagctggctccaagaatcggaagacacagtgtaccttcctatacctgggggaatgacagtggtggtggcagcaagaactacgggttcagcccacagccagaagctgagcctgcggagtgggtgggggctgggtaggccctgtggatgggtgggtggggcaggaaactggagactggagtgcaccccctggtggtaagcacagcttgggtgggtcttgccaggccctggcttctcaatccaggtccctgccctccctgttttgaggtttagacaggatgagagtccatcccaggccacacagcagactggcggccaagctggcagggctggaaccagagaccccctaccctgggtttggtgagttttccagcaaaccaccctagggcagagggcagcttccagccaggagccacattataggatgggacagtaatggacgctcctaggttagagagggaaagtaaggcacagagcctaagtgcctgtggtttctggaagccccagcatgcctgattcatgtctgtcccctgcagaattctctgagctggtgacaggtgccacaggcactggggatctcaccagaaaggaaccgacggagctaggggccagcgagatggcggacgaggccttagctgggctggatgagggagcccttcggaagctggtaagtggccccatcacccactgtggggacaggaaagccaagccagagaggcagggtcaatccagggtacctctcagctgacaggaagaagtgatgggggaaaggtcaggaggagggggacatgggaacaggggtaggccagttccatgtggctgatgcagaggcccttgtggcatgtgcctgtccatgcctggtactgaagcctagtccctcccaaccctccacagccaccacctgtttaaacagtaactgctgtagactcgcccgtatgcagccacaggtgtggggaggctggatatgcctctccagagcaatagctcgggcaatgcccacccctggaagctggcccagtgataatggtagcagcaatgattaataatgccaaggcctggcagggggcaggctgggtactgggtataccatgtcacagaataatcacagcagctctgaaagcctgggcactgcgactcaagagagttaaaatcacctgctcaaggacacccatctaagaaggagctgtgccaaaatcccaaccccatagtgggccacgggggaccagagtcctgggaaagtcaaggctggacgaggccataagagagagacaggttttgtgggcccttatggattctgtggcttctcatctcatttttctactcttgagtctcagttcctctacctgtaaaatgaagggagggagggagatgtgtttgcacacaagctctaggtcctagagttggcatggggacagaatgaggcatggacccagatctcaggtggaggaaagatgagcccactccatcccctttcttgttcctcttcctgagagccctgtctacctccatgcacagaggccgtagggcaacccagtggggcagggctccttccccaaccccaaaggccaggcagcctgacctggaggaggggccagaggagctccatctcctcagtccctgacccttgtccatgggggtaaattaaagatttactttacctagaagacaagtgacccaccccactctcataccttcccccgcaggcagaggctggaaccaaccagcgtagcccagccactgggcagtgcccagctgctgccatgacctccccaaggcactctgcctgtatgttctcggaccagcgcattagactctctgggtgtctgcctctccactatcaccgcaggatgtgtgcagcctggaggggatgaggttaggtttccaaaggtgcccgccagtcagttcgaccttccctcaggaagtccaagtcccagtgggggtcgtagaggcagcacagtccaaaaagagggaatgccaggcctggttcccgcacatcctcatctcaaggtatccacaggcaggctcagggttcttcagccgccacctccctctcttaagcgaggctcgggcggcgctggaaaagagttttggagagaagctggagcagtggttgaatctctgggaaaggacagatgagaacctgccccggtctcgggatcggtgcctctcgaagtctttccgaccccgggagcggctcctccagcacccggcgcccgccattactgcgccccgcgcgccggcccggcccccgctggcctcgtggcaagaacgggggcgtcccgagccgggctcctccccgcggggccgggccatataaggaaaagctaggcccgctccgcccgccctgcgccccagcgtctggccgatttggggacgcgggcagtcgcttccggccccggctcccgcacattcttgaggattgggccggggatgggaggaatggggacgcctggggacttgcacgccgcgtgcccctccaccacccgccgggacgccctctgcctcggtcccgagttcgagttcgacctccgccactcagctgggtgtcctggggaccttggtttcttccctttagatccggacactgaagcaggcggtagcgggtgtcttcctacctggctaccccttcggcgcctagcgcgaggcagggtgggcgaggcgagggcggcgccctgcgagggagggcggtcgcagaacctgcgggccttcagcgccccctggcgaggcttccctccaccgccggcgggacccccatgggcaaccgggggagctgggactgaaagcctggagagccccctccgttgtgctgttggggagactgaggcccagtgagacctcagggcctgccaggcgttcccaacagcgagggcagagagtacacggagagccggctccccagggggaggaagcaccctctttcctcccgggagaatttcactgggcagtttcggaaaccgccccatccccttccccttccccctcggtagacaatggcgctttgtacttccttccctccctcccacagctccctccttacacagcggtggggcctgggcgggtggaactcgggacacacagaggagacactgtggtccaacctttgcctccaggcccaaagggaagggtcgtgccagagggtgaccagtggaatgaggttgtcagtctccagccttgcccacccactttgggggatcagagggaggctcccattttccagatggggacactgaagctccgggggttgtgctgtagaggtggccaagttcctacatcaggcttttgtcagagacaaggaccccatctccgagcccagagcactgagaatggggacctaggagacaaaaggctagcccttgcccctctgggcctctttaccctctgtacagaaggggctggaccctctgtcccctccagcccccagcctccaaatgtaccacagaaggctctaggcctgagacacagccagcaccgggggctggggagtgagcctcattccccccgcctctgctataaggcctccttaggcctcagagcatctctagtccaggctagaggggtctccaacacagtgccaggatccctgaggtccccaccatgacacacagaccccagtagcagagctatcttcagcctagggcaggccctggagtcagagagacctgggttcaaatcctggctcaggtcatttgaccatgagcaaatcacatgtcctccctggacttcaatctcctcatctgtcaaatgggaataacagtagtatctagggtttttgtgggcttaggacaagtagggggctcagcacagggtttgactcacaggctctccataaatgttactgatgcctcggggtatcctgcccttcccatttgcccccttgtctctctccctcctcctgactggctagaaccaagtatgggggtgatgcttattgcaactgcagctatgtacaggagaggccaagtcactgttcccaaccccacccactggcaaatgaaaaaaccaagacacagagagtttaagggatatgctcttgatcacccagccaggattggactagggctggaaccaactaagggctctggcctgagtttcagggggtcttctcataattcctcaggaatgtggagcctggagggctcttcccccaagactctccctgctctcttcagactaggacaagctggctcatggctgagttgggccagcccacactccctgctgaaaactatctccatcccatccccacccttgccacctggccttcccgctaagcagaaaggaatgacgggggggcgctaaaaagggagatgatagagggttctttggccctacccctgaatgatttggggggtggggacagaggaaatcaccccgcctttactggctcccgtctggttatcagacccacactggaggcttatctctgccactatcttccaggggaaccctgggccagtcctctctcccttgagccacggaggatctgtatgtagcaggtggctctacatggtggaggtgtgggggaggcaacaggattggctgactcactccagagaaggtgttctttcctgaacctggttagaccagtcacccccaatttcccgggaactgaggggttgagaaccggtagaagcagctgtcacccagggatgccctctataaggccctggggtggcccctagtgccagccaccttatatgtctgggggattggtcctcccactctgcaccctggcttcttccatggtggctaggtccaggccagtgcagtggggacaatagccctcagccaggcaggactcctgagcacctgtcctcagtttccccatctgtggatgaagcagtcaacccccagctgggctgtggtgtttggtgactagaccagggagcctcccttgctcagagggtggacttcatctgtcacctttccctctagggaccctgttagtgacccacagggtggcctccctcctcctcctacaatagctccctgacttttggggatctgggctctgagaggcaggaatcgagttgtagaaaggagtgcctggcttggcacctggcacaagtgggcagtttctggctgtccactcacagttgtgtgctctgtgaaccacaatgcaaagtggactacccaagatccctgaaacagtgggctgggtctacccccgggaccctgcgtgggcaggcaggcacgtgaagagcttgggacacagggagtggacacaggccacacattgtgccctaggcagagccgtgggcagctggtgccagccctccgcccctggcagccaaaatgacctgcctctcgcacccactgcagctggaggtcacagcagatctggcagagcggcggcgcatccgctcagccatccgggaactgc

SEQ ID NO: 14166 - DNA, 567 bp, Homo sapiens
agctgtggggtctgtaacaacatggcagctcccatgagaacggcatggttggagtcagaagaggaagaagcagaactgggcaggactccagaccccatcctcccaactccacccactttagtctccatggagacccaagggcggctttagggcctctggcactgaagatggaatagctttgccttgtggatctgacctcctgggactccagcgctcctaaaggcagactctcagggcttggaaggtagaagcatgctacaagaaggcaatgtctgttcaaaggtttagacaggatgagagtccatcccaggccacacagcagactggcggccaagctggcagggctggaaccagagaccccctaccctgggtttgaattctctgagctggtgacaggtgccacaggcactggggatctcaccagaaaggaaccgacggagctaggggccagcgagatggcggacgaggccttagctgggctggatgagggagcccttcggaagctgctggaggtcacagcagatctggcagagcggcggcgcatccgctcagccatccgggaactgc

SEQ ID NO: 14167 - DNA, 6396 bp, Homo sapiens
gacaaatccttggccctctccaatcttctcagtttgcctgaaatccaggggttgggcaggtcagcttctgaaagcccttccaggtggggaattgaattctgtatgaattggcaggaggtgctgggtgcctggacacctggcttcaggaggtctggacagcagagctggctccaagaatcggaagacacagtgtaccttcctatacctgggggaatgacagtggtggtggcagcaagaactacgggttcagcccacagccagaagctgagcctgcggagtgggtgggggctgggtaggccctgtggatgggtgggtggggcaggaaactggagactggagtgcaccccctggtggtaagcacagcttgggtgggtcttgccaggccctggcttctcaatccaggtccctgccctccctgttttgaggtttagacaggatgagagtccatcccaggccacacagcagactggcggccaagctggcagggctggaaccagagaccccctaccctgggtttggtgagttttccagcaaaccaccctagggcagagggcagcttccagccaggagccacattataggatgggacagtaatggacgctcctaggttagagagggaaagtaaggcacagagcctaagtgcctgtggtttctggaagccccagcatgcctgattcatgtctgtcccctgcagaattctctgagctggtgacaggtgccacaggcactggggatctcaccagaaaggaaccgacggagctaggggccagcgagatggcggacgaggccttagctgggctggatgagggagcccttcggaagctggtaagtggccccatcacccactgtggggacaggaaagccaagccagagaggcagggtcaatccagggtacctctcagctgacaggaagaagtgatgggggaaaggtcaggaggagggggacatgggaacaggggtaggccagttccatgtggctgatgcagaggcccttgtggcatgtgcctgtccatgcctggtactgaagcctagtccctcccaaccctccacagccaccacctgtttaaacagtaactgctgtagactcgcccgtatgcagccacaggtgtggggaggctggatatgcctctccagagcaatagctcgggcaatgcccacccctggaagctggcccagtgataatggtagcagcaatgattaataatgccaaggcctggcagggggcaggctgggtactgggtataccatgtcacagaataatcacagcagctctgaaagcctgggcactgcgactcaagagagttaaaatcacctgctcaaggacacccatctaagaaggagctgtgccaaaatcccaaccccatagtgggccacgggggaccagagtcctgggaaagtcaaggctggacgaggccataagagagagacaggttttgtgggcccttatggattctgtggcttctcatctcatttttctactcttgagtctcagttcctctacctgtaaaatgaagggagggagggagatgtgtttgcacacaagctctaggtcctagagttggcatggggacagaatgaggcatggacccagatctcaggtggaggaaagatgagcccactccatcccctttcttgttcctcttcctgagagccctgtctacctccatgcacagaggccgtagggcaacccagtggggcagggctccttccccaaccccaaaggccaggcagcctgacctggaggaggggccagaggagctccatctcctcagtccctgacccttgtccatgggggtaaattaaagatttactttacctagaagacaagtgacccaccccactctcataccttcccccgcaggcagaggctggaaccaaccagcgtagcccagccactgggcagtgcccagctgctgccatgacctccccaaggcactctgcctgtatgttctcggaccagcgcattagactctctgggtgtctgcctctccactatcaccgcaggatgtgtgcagcctggaggggatgaggttaggtttccaaaggtgcccgccagtcagttcgaccttccctcaggaagtccaagtcccagtgggggtcgtagaggcagcacagtccaaaaagagggaatgccaggcctggttcccgcacatcctcatctcaaggtatccacaggcaggctcagggttcttcagccgccacctccctctcttaagcgaggctcgggcggcgctggaaaagagttttggagagaagctggagcagtggttgaatctctgggaaaggacagatgagaacctgccccggtctcgggatcggtgcctctcgaagtctttccgaccccgggagcggctcctccagcacccggcgcccgccattactgcgccccgcgcgccggcccggcccccgctggcctcgtggcaagaacgggggcgtcccgagccgggctcctccccgcggggccgggccatataaggaaaagctaggcccgctccgcccgccctgcgccccagcgtctggccgatttggggacgcgggcagtcgcttccggccccggctcccgcacattcttgaggattgggccggggatgggaggaatggggacgcctggggacttgcacgccgcgtgcccctccaccacccgccgggacgccctctgcctcggtcccgagttcgagttcgacctccgccactcagctgggtgtcctggggaccttggtttcttccctttagatccggacactgaagcaggcggtagcgggtgtcttcctacctggctaccccttcggcgcctagcgcgaggcagggtgggcgaggcgagggcggcgccctgcgagggagggcggtcgcagaacctgcgggccttcagcgccccctggcgaggcttccctccaccgccggcgggacccccatgggcaaccgggggagctgggactgaaagcctggagagccccctccgttgtgctgttggggagactgaggcccagtgagacctcagggcctgccaggcgttcccaacagcgagggcagagagtacacggagagccggctccccagggggaggaagcaccctctttcctcccgggagaatttcactgggcagtttcggaaaccgccccatccccttccccttccccctcggtagacaatggcgctttgtacttccttccctccctcccacagctccctccttacacagcggtggggcctgggcgggtggaactcgggacacacagaggagacactgtggtccaacctttgcctccaggcccaaagggaagggtcgtgccagagggtgaccagtggaatgaggttgtcagtctccagccttgcccacccactttgggggatcagagggaggctcccattttccagatggggacactgaagctccgggggttgtgctgtagaggtggccaagttcctacatcaggcttttgtcagagacaaggaccccatctccgagcccagagcactgagaatggggacctaggagacaaaaggctagcccttgcccctctgggcctctttaccctctgtacagaaggggctggaccctctgtcccctccagcccccagcctccaaatgtaccacagaaggctctaggcctgagacacagccagcaccgggggctggggagtgagcctcattccccccgcctctgctataaggcctccttaggcctcagagcatctctagtccaggctagaggggtctccaacacagtgccaggatccctgaggtccccaccatgacacacagaccccagtagcagagctatcttcagcctagggcaggccctggagtcagagagacctgggttcaaatcctggctcaggtcatttgaccatgagcaaatcacatgtcctccctggacttcaatctcctcatctgtcaaatgggaataacagtagtatctagggtttttgtgggcttaggacaagtagggggctcagcacagggtttgactcacaggctctccataaatgttactgatgcctcggggtatcctgcccttcccatttgcccccttgtctctctccctcctcctgactggctagaaccaagtatgggggtgatgcttattgcaactgcagctatgtacaggagaggccaagtcactgttcccaaccccacccactggcaaatgaaaaaaccaagacacagagagtttaagggatatgctcttgatcacccagccaggattggactagggctggaaccaactaagggctctggcctgagtttcagggggtcttctcataattcctcaggaatgtggagcctggagggctcttcccccaagactctccctgctctcttcagactaggacaagctggctcatggctgagttgggccagcccacactccctgctgaaaactatctccatcccatccccacccttgccacctggccttcccgctaagcagaaaggaatgacgggggggcgctaaaaagggagatgatagagggttctttggccctacccctgaatgatttggggggtggggacagaggaaatcaccccgcctttactggctcccgtctggttatcagacccacactggaggcttatctctgccactatcttccaggggaaccctgggccagtcctctctcccttgagccacggaggatctgtatgtagcaggtggctctacatggtggaggtgtgggggaggcaacaggattggctgactcactccagagaaggtgttctttcctgaacctggttagaccagtcacccccaatttcccgggaactgaggggttgagaaccggtagaagcagctgtcacccagggatgccctctataaggccctggggtggcccctagtgccagccaccttatatgtctgggggattggtcctcccactctgcaccctggcttcttccatggtggctaggtccaggccagtgcagtggggacaatagccctcagccaggcaggactcctgagcacctgtcctcagtttccccatctgtggatgaagcagtcaacccccagctgggctgtggtgtttggtgactagaccagggagcctcccttgctcagagggtggacttcatctgtcacctttccctctagggaccctgttagtgacccacagggtggcctccctcctcctcctacaatagctccctgacttttggggatctgggctctgagaggcaggaatcgagttgtagaaaggagtgcctggcttggcacctggcacaagtgggcagtttctggctgtccactcacagttgtgtgctctgtgaaccacaatgcaaagtggactacccaagatccctgaaacagtgggctgggtctacccccgggaccctgcgtgggcaggcaggcacgtgaagagcttgggacacagggagtggacacaggccacacattgtgccctaggcagagccgtgggcagctggtgccagccctccgcccctggcagccaaaatgacctgcctctcgcacccactgcagctggaggtcacagcagatctggcagagcggcggcgcatccgctcagccatccgggaactgcagcggcaggagctggagcgcgaggaggaggccctggcatccaagcgtttccgtgccgagcggcaggacaacaaggagaactggctgcagtgagtagcggggggtggaacatgcgggtgagaaggtgagtgtgagccctggctcagctcatgtgtgcaggcaggcgtgagcacaagtgtatctgtggattgcatgtgctaatggcagtacgtccacacacgcttctggaaaaacagagatgtttgtgggcatggagcatgtactgattgtggcgtcgcggccgtgctgatgtagccagcacgtctgagtgtgtggtattagtgcccacgtccatgggcatatgtgtatcagtgtgcagttagagggtgtgcacagccacatgcccttctgccaaggttctgggtactctgttctggctcctacccttagcccacatcctccacgacctggccatggcagtggtggttacagtcatgatgtctctgcagctctcagcagcgggaagctgagcagcgggctgccctggcacggctggcagggcagctggagtccatgaacgatgtggaggaattgactgcactggtgaggcccaggctggggcaggggatgggggcagggcaggtgaagacctggactccacagcccaacacccgcgacctgtctcttacccacagttgcgaagcgctggtgagtatgaggagcgcaagctgatccgagctgccatccgccgtgtacgggctcaggagattgagggtatgtggcctgtcccggccccacccctgccctgctgtctgctgtccacagcacctccctgtcactcacctgccacttgctccttcccttccagctgccacct

SEQ ID NO: 14168 - DNA, 545 bp, Homo sapiens
gacaaatccttggccctctccaatcttctcagtttgcctgaaatccaggggttgggcaggtcagcttctgaaagcccttccagaattctctgagctggtgacaggtgccacaggcactggggatctcaccagaaaggaaccgacggagctaggggccagcgagatggcggacgaggccttagctgggctggatgagggagcccttcggaagctgctggaggtcacagcagatctggcagagcggcggcgcatccgctcagccatccgggaactgcagcggcaggagctggagcgcgaggaggaggccctggcatccaagcgtttccgtgccgagcggcaggacaacaaggagaactggctgcactctcagcagcgggaagctgagcagcgggctgccctggcacggctggcagggcagctggagtccatgaacgatgtggaggaattgactgcactgttgcgaagcgctggtgagtatgaggagcgcaagctgatccgagctgccatccgccgtgtacgggctcaggagattgaggctgccacct

SEQ ID NO: 14169 - DNA, 7288 bp, Homo sapiens
gcagaatccaggggacggttgctgagcgggcctgggacagcgggtcgcggcacctccggcctgcgcgtgtctaatccgtctgtcgggtcccgaaagagctaagccgagcctgcgccggacgggtgggctggactgagaggtgggtgtgcggacctcgggggggatcctggtgctgccccaacgtgtccgggggtggaacccggatgtctagacaggagttctggaacgtccagacctgggagcccccacccatacgagaggtctaagccatgggataaagttatgagactgttgggggaagacgcccccggattcctaagagactccacgccccacaggggcgctagtctgtggcggcagaaaccctggggaagctgccacagaatcctgaggcccctcacaatgtccggcgaccccagactgtgtgacagggagattggagaagagcagcggcagggatcttcttataatcccatgggtgtcctagattaggcattagggtcagctgccccatagaagaacagacatggggggaatcagaatgtccgcagaacctaaggctggtgaccactggacagtcttgaagaggtttaacccagacagagtaactaggtaagaggcaaggatcctaacaggcagagattgggaggttgacacctctgagcctaccaggatgggagggggaacaagcagtgacttgaacaggctgggacccacacaccccaactgtgtggagcggtaaccctcaccccccacccatgcaccgtatggggtgacttcccaagtgactgttctgaagagagggaagggatgattgaaagatgaatcaacaggaggtggggggcaggcctggggccacacattagtcagtcaccatacattaactaagcatccacagtgtgccagaccagggcccctcaaattccagacagacattagttggggctacaggaggaaggagagatctgcgctgggaggctgggccaggatttaggggtccattttgatgggcagcactggggcaagatggggctcttgcctctgtcactgagagtgttccaggcccttgagggcactttggaagggagcttcggaagccggagatgacgaagattttgattacatccttctctgccctctaagtctttggcttcctccttgctcagtgacaaatccttggccctctccaatcttctcagtttgcctgaaatccaggggttgggcaggtcagcttctgaaagcccttccaggtggggaattgaattctgtatgaattggcaggaggtgctgggtgcctggacacctggcttcaggaggtctggacagcagagctggctccaagaatcggaagacacagtgtaccttcctatacctgggggaatgacagtggtggtggcagcaagaactacgggttcagcccacagccagaagctgagcctgcggagtgggtgggggctgggtaggccctgtggatgggtgggtggggcaggaaactggagactggagtgcaccccctggtggtaagcacagcttgggtgggtcttgccaggccctggcttctcaatccaggtccctgccctccctgttttgaggtttagacaggatgagagtccatcccaggccacacagcagactggcggccaagctggcagggctggaaccagagaccccctaccctgggtttggtgagttttccagcaaaccaccctagggcagagggcagcttccagccaggagccacattataggatgggacagtaatggacgctcctaggttagagagggaaagtaaggcacagagcctaagtgcctgtggtttctggaagccccagcatgcctgattcatgtctgtcccctgcagaattctctgagctggtgacaggtgccacaggcactggggatctcaccagaaaggaaccgacggagctaggggccagcgagatggcggacgaggccttagctgggctggatgagggagcccttcggaagctggtaagtggccccatcacccactgtggggacaggaaagccaagccagagaggcagggtcaatccagggtacctctcagctgacaggaagaagtgatgggggaaaggtcaggaggagggggacatgggaacaggggtaggccagttccatgtggctgatgcagaggcccttgtggcatgtgcctgtccatgcctggtactgaagcctagtccctcccaaccctccacagccaccacctgtttaaacagtaactgctgtagactcgcccgtatgcagccacaggtgtggggaggctggatatgcctctccagagcaatagctcgggcaatgcccacccctggaagctggcccagtgataatggtagcagcaatgattaataatgccaaggcctggcagggggcaggctgggtactgggtataccatgtcacagaataatcacagcagctctgaaagcctgggcactgcgactcaagagagttaaaatcacctgctcaaggacacccatctaagaaggagctgtgccaaaatcccaaccccatagtgggccacgggggaccagagtcctgggaaagtcaaggctggacgaggccataagagagagacaggttttgtgggcccttatggattctgtggcttctcatctcatttttctactcttgagtctcagttcctctacctgtaaaatgaagggagggagggagatgtgtttgcacacaagctctaggtcctagagttggcatggggacagaatgaggcatggacccagatctcaggtggaggaaagatgagcccactccatcccctttcttgttcctcttcctgagagccctgtctacctccatgcacagaggccgtagggcaacccagtggggcagggctccttccccaaccccaaaggccaggcagcctgacctggaggaggggccagaggagctccatctcctcagtccctgacccttgtccatgggggtaaattaaagatttactttacctagaagacaagtgacccaccccactctcataccttcccccgcaggcagaggctggaaccaaccagcgtagcccagccactgggcagtgcccagctgctgccatgacctccccaaggcactctgcctgtatgttctcggaccagcgcattagactctctgggtgtctgcctctccactatcaccgcaggatgtgtgcagcctggaggggatgaggttaggtttccaaaggtgcccgccagtcagttcgaccttccctcaggaagtccaagtcccagtgggggtcgtagaggcagcacagtccaaaaagagggaatgccaggcctggttcccgcacatcctcatctcaaggtatccacaggcaggctcagggttcttcagccgccacctccctctcttaagcgaggctcgggcggcgctggaaaagagttttggagagaagctggagcagtggttgaatctctgggaaaggacagatgagaacctgccccggtctcgggatcggtgcctctcgaagtctttccgaccccgggagcggctcctccagcacccggcgcccgccattactgcgccccgcgcgccggcccggcccccgctggcctcgtggcaagaacgggggcgtcccgagccgggctcctccccgcggggccgggccatataaggaaaagctaggcccgctccgcccgccctgcgccccagcgtctggccgatttggggacgcgggcagtcgcttccggccccggctcccgcacattcttgaggattgggccggggatgggaggaatggggacgcctggggacttgcacgccgcgtgcccctccaccacccgccgggacgccctctgcctcggtcccgagttcgagttcgacctccgccactcagctgggtgtcctggggaccttggtttcttccctttagatccggacactgaagcaggcggtagcgggtgtcttcctacctggctaccccttcggcgcctagcgcgaggcagggtgggcgaggcgagggcggcgccctgcgagggagggcggtcgcagaacctgcgggccttcagcgccccctggcgaggcttccctccaccgccggcgggacccccatgggcaaccgggggagctgggactgaaagcctggagagccccctccgttgtgctgttggggagactgaggcccagtgagacctcagggcctgccaggcgttcccaacagcgagggcagagagtacacggagagccggctccccagggggaggaagcaccctctttcctcccgggagaatttcactgggcagtttcggaaaccgccccatccccttccccttccccctcggtagacaatggcgctttgtacttccttccctccctcccacagctccctccttacacagcggtggggcctgggcgggtggaactcgggacacacagaggagacactgtggtccaacctttgcctccaggcccaaagggaagggtcgtgccagagggtgaccagtggaatgaggttgtcagtctccagccttgcccacccactttgggggatcagagggaggctcccattttccagatggggacactgaagctccgggggttgtgctgtagaggtggccaagttcctacatcaggcttttgtcagagacaaggaccccatctccgagcccagagcactgagaatggggacctaggagacaaaaggctagcccttgcccctctgggcctctttaccctctgtacagaaggggctggaccctctgtcccctccagcccccagcctccaaatgtaccacagaaggctctaggcctgagacacagccagcaccgggggctggggagtgagcctcattccccccgcctctgctataaggcctccttaggcctcagagcatctctagtccaggctagaggggtctccaacacagtgccaggatccctgaggtccccaccatgacacacagaccccagtagcagagctatcttcagcctagggcaggccctggagtcagagagacctgggttcaaatcctggctcaggtcatttgaccatgagcaaatcacatgtcctccctggacttcaatctcctcatctgtcaaatgggaataacagtagtatctagggtttttgtgggcttaggacaagtagggggctcagcacagggtttgactcacaggctctccataaatgttactgatgcctcggggtatcctgcccttcccatttgcccccttgtctctctccctcctcctgactggctagaaccaagtatgggggtgatgcttattgcaactgcagctatgtacaggagaggccaagtcactgttcccaaccccacccactggcaaatgaaaaaaccaagacacagagagtttaagggatatgctcttgatcacccagccaggattggactagggctggaaccaactaagggctctggcctgagtttcagggggtcttctcataattcctcaggaatgtggagcctggagggctcttcccccaagactctccctgctctcttcagactaggacaagctggctcatggctgagttgggccagcccacactccctgctgaaaactatctccatcccatccccacccttgccacctggccttcccgctaagcagaaaggaatgacgggggggcgctaaaaagggagatgatagagggttctttggccctacccctgaatgatttggggggtggggacagaggaaatcaccccgcctttactggctcccgtctggttatcagacccacactggaggcttatctctgccactatcttccaggggaaccctgggccagtcctctctcccttgagccacggaggatctgtatgtagcaggtggctctacatggtggaggtgtgggggaggcaacaggattggctgactcactccagagaaggtgttctttcctgaacctggttagaccagtcacccccaatttcccgggaactgaggggttgagaaccggtagaagcagctgtcacccagggatgccctctataaggccctggggtggcccctagtgccagccaccttatatgtctgggggattggtcctcccactctgcaccctggcttcttccatggtggctaggtccaggccagtgcagtggggacaatagccctcagccaggcaggactcctgagcacctgtcctcagtttccccatctgtggatgaagcagtcaacccccagctgggctgtggtgtttggtgactagaccagggagcctcccttgctcagagggtggacttcatctgtcacctttccctctagggaccctgttagtgacccacagggtggcctccctcctcctcctacaatagctccctgacttttggggatctgggctctgagaggcaggaatcgagttgtagaaaggagtgcctggcttggcacctggcacaagtgggcagtttctggctgtccactcacagttgtgtgctctgtgaaccacaatgcaaagtggactacccaagatccctgaaacagtgggctgggtctacccccgggaccctgcgtgggcaggcaggcacgtgaagagcttgggacacagggagtggacacaggccacacattgtgccctaggcagagccgtgggcagctggtgccagccctccgcccctggcagccaaaatgacctgcctctcgcacccactgcagctggaggtcacagcagatctggcagagcggcggcgcatccgctcagccatccgggaactgcagcggcaggagctggagcgcgaggaggaggccctggcatccaagcgtttccgtgccgagcggcaggacaacaaggagaactggctgcagtgagtagcggggggtggaacatgcgggtgagaaggtgagtgtgagccctggctcagctcatgtgtgcaggcaggcgtgagcacaagtgtatctgtggattgcatgtgctaatggcagtacgtccacacacgcttctggaaaaacagagatgtttgtgggcatggagcatgtactgattgtggcgtcgcggccgtgctgatgtagccagcacgtctgagtgtgtggtattagtgcccacgtccatgggcatatgtgtatcagtgtgcagttagagggtgtgcacagccacatgcccttctgccaaggttctgggtactctgttctggctcctacccttagcccacatcctccacgacctggccatggcagtggtggttacagtcatgatgtctctgcagctctcagcagcgggaagctgagcagcgggctgccctggcacggctggcagggcagctggagtccatgaacgatgtggaggaattgactgcact

SEQ ID NO: 14170 - DNA, 599 bp, Homo sapiens
gcagaatccaggggacggttgctgagcgggcctgggacagcgggtcgcggcacctccggcctgcgcgtgtctaatccgtctgtcgggtcccgaaagagctaagccgagcctgcgccggacgggtgggctggactgagagacaggatgagagtccatcccaggccacacagcagactggcggccaagctggcagggctggaaccagagaccccctaccctgggtttgaattctctgagctggtgacaggtgccacaggcactggggatctcaccagaaaggaaccgacggagctaggggccagcgagatggcggacgaggccttagctgggctggatgagggagcccttcggaagctgctggaggtcacagcagatctggcagagcggcggcgcatccgctcagccatccgggaactgcagcggcaggagctggagcgcgaggaggaggccctggcatccaagcgtttccgtgccgagcggcaggacaacaaggagaactggctgcactctcagcagcgggaagctgagcagcgggctgccctggcacggctggcagggcagctggagtccatgaacgatgtggaggaattgactgcact

SEQ ID NO: 14171 - DNA, 6706 bp, Homo sapiens
ggatccactagccgggagctcagccgggaaagggatccccaagcgggccacccggctgcccaggtaatgccctctgtgctaaaccagggactgaatgggactttggctgaggtgagatggctagaccagctttgggccttctcaggggagacagggagagagtgagggaaataaagcacccttcctttccaaaaaagcaggatccagctgccctctgacaagggattgtgtggggtggggtggggggacccgctgaggcccttgaggtggatgggaggtgccacagtgagacctgggtctgacaccaccaacttgcctcagtttacccatctggaaccaaaggggacaggtgatgtacccataatgtgcttgctcaaagtctgtggttggacgtgagcaccatgggcaggccagagggcatttatgtaagaccaagacactttttatagcagatcactcaaagtcctgcctccctgtgcctccatttcccccatctgttccagctgtctaaaacagctggagttagggtaaagggtaaaggagtacaggctgtggagtccagcagactgattctcacagctaatgtacatggtggctaggccaggtccattccctgttccctgcctcagtttccccacctgtgaggcatggggccccgatctcagtgatcttcagaacccatgcagtcttactgtgctgcaggcctatgatttctgtagggctatagccaggcctggcgatccgcctgcttgggcaggccccccctcccccactgccccttccacggaggagcccagaataggtttctatttgggctgcagctccagctggctggtggcgggctgggaggcaggggcggggcaggcccgctgcccttgcctttgccctcggaccagctgcaaagactcagacactcagccagagacagcagcccctgccactgccccaccattaccccccatagagtccccaccagcaccatgccgggggtaccagggcctgggcctgagctggccgcagcccttgaggagcagttgggccgggcactggaggagctgcgggcggtggctgaagcaggccgggtggcagtgacccaggcagccgaggtagctgtagccaccgtggagccggtggcccgggcagctgaagagctgcgggcagagagagcagcactgagccggcggctggatgcactgagcaggcaggtggaggtgctgagcctacggctgggggtcccacttgtgtccggccttgagcctgagctggagcccagcgagctgctcctggctgccgccgaccccgaggccctctttcaggctgccgaggatgccgggacccccgtggcccacccacctgccttcagcacccgccgccgctcctccaccggcaccacccgcagcactagtctcgtaagtgcttctgggttggtgggaggggtagttttgagccaggctctgcctcctcttgactttaggtatgtcaccaccttctctgagcctcagtttatctatcttgacaggggactggggcactagtgctctaagactagggcaagagggtgccaggctccagccctgaggcatgtgtggcagctgccttggcagcccctggcatgacccaggccccagcccccagctccctgccgccctgcaccctggccagaccaagcctccctgaaacagctgccacctcagctctccttacccttatagcagacggagaggccctgccaggagaggaagggccataatagttggcttggggccttgtcttcaaggggctagggagatgccctgggagggctgcagggctagagactccttagaggatggtttccagcaggggcgaggcagggggaggtggtacagaggagagcttcatagaggtcttggctcagggcagccccagtcagacacctggtcaggagcctacaggccccgggccagccctcttggcaaggtagcaggcagatggggggcaacatgtgctgcctgggcactggcccaggaggacctaggcctcgggaactggcagcacagagcagagcctgcctgggagggggctgggaacaaagcagcaaaatgaactaaggttcaggagttaggctgccttcagctcagatcccaggctgcatcacacttagagagagactgtgggcaagtcagttagctgccctgagcctcagtttccccttctgttttttttttttttttttccggtcttgttttctttgcaacagggtcttactctcttgcccagactggagtgcagctgcatgatcatagctctctgcagcctctaactcctgggctcaagtaatcctcctacctcagctttctgagtaggtgggactacaggtgcacaccaccatgcctagctaattttttatttttgtttttgtagagatgcggtctcgctatgttacccaggttggtctcaaactgctggcaacaagtgatccctcccacctcggcctcccaaactgttgacattacaggcatgagccactgcgcccggccttcccttctgttaaatagggacagtaaagtccctagtgtttatacaacacttactatggactggaaatcatcattattatcactatccattgtattaatacaattcggggtacgtgggaagccctacaacaaaactgtcagtgcctcttccctgactgacgctgacatggccatctttgggcaggcaggctggcaggctagtggttatttccaaggcgtgccagcaaccctaggatctgcttccctatccattggagacatgatgagtttcacccatacccctgcttaaagtccatgccctctccccaccctgcagatggaagcagagccagcagagcctctcgctgcagcagtggaagcggccaatggggctgagcagacccgagtgaacaaagcaccagaagggcggagccctctgagcgctgaggagctgatgactattgaggatgaaggagtcttggacaagatggtatagccagatccggtgggctgggggttggcagaggccagcaggcaccaggtaggcaatgatgggctctatatgcagctggatcagagcacggactttgaagagcggaagctcatccgggctgcacttcgtgagctccgacaaaggaagagaggtagagagccagttgccctaccctagatccagctgccccattccccagctgctcccctcatactctggggtccatttgtggacaccccagcttaataactgccctacccagcttctccttctctagacccagcagttcccttggctattccctgctggatccagctgctccttccctagctccttctctcccgctggtgaccccagttattctccccaaccagcttctcttctccttcctagacccagatactccctcccgcagctactctctccttggatccagttgcctctcaaagtactgtcaacgactccttccctgaatccagatactccttctccctgctgctcctctctccctgaagtccattgatggccatcttagcctctgccccatccagcttcccttttcctggacacaactacttcctcccccagatagttcttccctggacacatctattcattcccttagattctgggttcaattgcttctcctctcaaacactctcaattactcctctgaatctagctgcttctgccagggcccactgatggccaccccagtctctatctctacccacctacttctattttaagcccagttaacccccttcactagcttctctcccagctactcttcccctggatcagattgcttctcagatcccatcaattgctcccttcctggatctaaatattcctgcctccagctgctcttctcctccaaccaaagacctgctgatggcccacccagctacttcctcactcagcttctccttccttggactcagctaccccctcactagatctagatacccctcctgacttagctactcatgcctatagaaaccctttttggatccatacccctttgagtttagctactccgtattctctagtttctgcctgagtccatcaaacccttcccacactccattccctgtcaagttatggctgtcccctcaccccagctgctcctagagaggcccttgttacctgtgtcattcatgtttctaacaagccaccctccaccccgtcttgtgtgccccatgcacctgtgcatctgtgctgtgtgggtgttggtggcccttttgcgcatgcatggggcatcccctgcccagaccagcgggacaaggagcgggaacggcggctgcaggaggcacggggccggccaggggaggggcgcggcaacacagccactgagaccaccacgaggcacagccagcgggcagctgatggctctgctgtcagcactgttaccaagactgagcggctcgtccactccagtaaggggccaaatggggccggcccagggctcagggtgggaacacatcctcccccagccccctgtgcctttcacatccttctcatcccctgcccctgcagatgatggcacacggacggcccgcaccaccacagtggagtcgagtttcgtgaggcgctcggagagtaaggccacctggtgtcgccctgtgcctgcctgcctgtccgcccacctcctccggctcttccttgagctctctctccgtgtcttcaactgtgccgtcactttctcttctctgcctgcggctatcaccacccctccatacagcctcccatcccatctcctgatgtccagcccaggccctcacctggtgccccttccccttttttgcagatggcagtggcagcaccatgatgcaaaccaagaccttctcctcttcctcctcatccaagaagatgggcaggtgagcaccagcacccaatccctgaccatagaggagtcagtgccacaggggacctaactgcaaacccgttttacagaggggtgggctgggcacagtggctcttgcctgtaatcccagcactttgggaggccgaggtgggcggatcacttgaggtcaggagttcaagaccagcctggccaacatggtaaaacctcatctctactaaaaatacaaaaattagccgggcgtggtggcaggcacctgtaatcccaactactggggaggccgaggcacaagaatcacttgaacctgggaggcggaggttgcagtgagctgagatcactccactgcactccagtctgggcaacagagcgagactcagtctcaaaaataaatagataaataaataaataaataaataaataaataaataaaacagaggggtagactgggatgctgggaggtaataggtctatagccagggaggggcaaagtgagagttaaggatcctgctctccttgggatctcattttattctcaaccacaccacaggagaggtggatgctcagggaggccagtgagttgcttaggggctcacatctctgagtggctgcaatagcattgaacacttacagaggcctacctaccacactgagctgcctggtggcactgccacttcccagtatctgcaaaccatgtcccaggtcacacagcacctttataccttagccccatgagaaaggagggtacccccatgtaacagaggctgttggggctggcagaaagcaggaacaggatcagaatccaggatgagaaccaaaggggtccagagactctgaatcagagagaccttgttcaagttctagttccgcccatcacgtcctctgaaatcttaggcaagttactgccagaggtctcagtttcctcacctttagtggaattggtaaggcccctccctgctcttgtgaagtttaaaatggcacacaggaaaggatcaacagagatgaattattattattactattattatgctagtcatcatttttattatcggatagtgcccagaagctgaactcccctgtaacttgagggtacaatgaggcttctcagagaactactcgtgggtgggggagggggaggcggaaacctgttgaaaaccttgctgtcatttgagactcagtgtactcctctaaaatgcgtgtgatgaggacgcctccctccctggcaggcgtttgtggcagtggagatactagtgtgctacaagaccccccctcctcctcgcgagtggtggtccaggctggggagcagccctgctctccctgcctaacatgcgcctccccaacccctagcatcttcgaccgcgaggaccaggccagcccacgggccggcagcctggcggcgctcgagaaacggcaggccgagaagaagaaagagctgatgaaggcgcagagtctgcccaagacctcagcctcccaggcgcgcaaggccatgattgagaagctggagaaggagggcgcggccgggtgagctgcagaagtgggctgggcagtggggggcggggcgtgataggcagtggggggcggggcttgatagttggcccggcagaggcgggaagaccgcgcggctagatctgtggtgcaaaggcccgaaggtcatggaaggcggggcctgggatccactgggtgggcccaccgaggcatgccccttatagtcgtgtgacctggtcctgacaccgcccctacagcagccctggcggaccccgcgcagccgtgcagcgatccaccagcttcggggtccccaacgccaacagcatcaagcagatgctgctggactggtgtcgagccaagactcgcggc

SEQ ID NO: 14172 - DNA, 648 bp, Homo sapiens
ggatccactagccgggagctcagccgggaaagggatccccaagcgggccacccggctgcccagatggaagcagagccagcagagcctctcgctgcagcagtggaagcggccaatggggctgagcagacccgagtgaacaaagcaccagaagggcggagccctctgagcgctgaggagctgatgactattgaggatgaaggagtcttggacaagatgctggatcagagcacggactttgaagagcggaagctcatccgggctgcacttcgtgagctccgacaaaggaagagagatggcagtggcagcaccatgatgcaaaccaagaccttctcctcttcctcctcatccaagaagatgggcagcatcttcgaccgcgaggaccaggccagcccacgggccggcagcctggcggcgctcgagaaacggcaggccgagaagaagaaagagctgatgaaggcgcagagtctgcccaagacctcagcctcccaggcgcgcaaggccatgattgagaagctggagaaggagggcgcggccggcagccctggcggaccccgcgcagccgtgcagcgatccaccagcttcggggtccccaacgccaacagcatcaagcagatgctgctggactggtgtcgagccaagactcgcggc

SEQ ID NO: 14173 - DNA, 13682 bp, Homo sapiens
gaactggctgcagtgagtagcggggggtggaacatgcgggtgagaaggtgagtgtgagccctggctcagctcatgtgtgcaggcaggcgtgagcacaagtgtatctgtggattgcatgtgctaatggcagtacgtccacacacgcttctggaaaaacagagatgtttgtgggcatggagcatgtactgattgtggcgtcgcggccgtgctgatgtagccagcacgtctgagtgtgtggtattagtgcccacgtccatgggcatatgtgtatcagtgtgcagttagagggtgtgcacagccacatgcccttctgccaaggttctgggtactctgttctggctcctacccttagcccacatcctccacgacctggccatggcagtggtggttacagtcatgatgtctctgcagctctcagcagcgggaagctgagcagcgggctgccctggcacggctggcagggcagctggagtccatgaacgatgtggaggaattgactgcactggtgaggcccaggctggggcaggggatgggggcagggcaggtgaagacctggactccacagcccaacacccgcgacctgtctcttacccacagttgcgaagcgctggtgagtatgaggagcgcaagctgatccgagctgccatccgccgtgtacgggctcaggagattgagggtatgtggcctgtcccggccccacccctgccctgctgtctgctgtccacagcacctccctgtcactcacctgccacttgctccttcccttccagctgccaccttggctgggaggttgtacagcgggcgtcccaacagtggctcaagagaggacagcaaggggctagcggcacacaggctggaacagtgtgaggtaaggagggtgggagagtggcccagtgtcctgtgcccatggataccggtagcacagagtgcctgagtgtctttgctaggctggtatttcactgtaaggggcccacccctgccatccagcctctatttagcagtcagagggatctcccagaaatgcaaatccggccctggcacctcccctgcttcaacccgtcccagggctgcccctcaccctccacacagcccacatctttaccttggcttatggggcctgcatgtcagaccccagctggctcacagttcactctattttccagagtgtgggtgagaggtcaggccatgcaggttccccaagtggccagcagaggccgctgggtccacggtcctggcaggaccccactcccactccagatgaaccaggctgaggccaggagtcaggaacctccactccagggatctattaaggctcccgtccccaataggtctcctgccatacccacccactgacatcaggacctggtcctctctgaacccctttggctaggtagtgccaagagattgggaagtggggatcagagactgcccttagcatgccagtgccagtgcttgcgcaggtgtgcctacaggaagccatgccccaccactctgctttgcatgccctgccctgggcacttgccagcctggccctcagtggtgggggtggcgttcaaagcctagggagccttggttgcatcctgtgggtcccttacaggtgccagagcgagaggaacaggaacagcaggcagaggtttcaaagccaacccccacccctgaaggcaccagccaggatgtgaccacagtgacactcctgctgcgagccccacctgggagcacatccagctcacctgcctcacccagcagttcacccacccctgcctctcctgagcctccattggagcctgccgaggcccagtgccttacagctgaggttccaggcagcccagagccaccccccagcccacccaagaccaccagccctgagcctcaggagtctccaacgctccccagcactgagggccaggtggtcaacaaggtgagtctggatgaggggcagggatgccaggcaagtgagcaggtctgggagtcaggccttgctcaggccctgttcttctcccttgcagcttctgtctggccccaaagagacccctgctgcccagagccccaccagaggcccctctgacaccaagagagcaggtgagggtcccagcaggggtagtcacaggcatctttcttcccctccccctgcctccctttccctgcctagaaaatgggctcttgtgcctggcagctctagcttcctcaggtccatgcagtccctgatactgcaccccacccctgaagtgtccccgcccccagctaggccagcctccccctccacccccatggctagaggcctcccctgcagccttgaaaggcaacgggcctcaggcacattcttctccccaataagggagtccacccatctcccagctggagctgtgggcagcactggccaggagggctgtcccccctccccatctgcagaaaggatctgggcacccttcctccagcctaagcctcgcctggcccccaggagtgtccaagtcatcctagggtcagtgtggcaggagaaggaggtgcctgtaggagagatgcagccgagtggggatgccggagtgtgggagatccaggaggggatggagaggtggggtgggggttgagtacaggaaagggtgggaagctagggaggtgtagaggagaggattatgaaaggtggacacccactatcccctgtcttttctctttccccacatggccatcaccccctccccaacctgccagacgtggctggaccccgaccctgccaacgctccctgtcggtgctcagcccccgccaaccagcccagaaccgaggtactacctattctcaccctgcctaggatctgtgcagaccctgtcccacccagttgctgacagccctcctgttccttctagagtccaccccccttgccagcggaccttcctcattccagcgggctggctctgtgcgggatcgtgtccacaagttcacatctgattctcctatggctgctaggctccaggatggcacaccccaggctgccctaagtcccctgacccccgcaaggctcctgggcccctccctcaccagcaccacccctgcctcctcctccagcggctcctcctctcggggccccagtgatacctcctcccggttcagcaaggagcaacgaggagtagcccagcccctggcccagcttcgaagctgcccccaggaggagggccccagggggcggggcttggctgctaggccccttgaaaacagagcaggggggcctgtggcacgttcagaggagcctggtgccccgctgcccgtggccgtcggcactgccgagccagggggcagtatgaagaccacattcaccatcgagatcaaggacggccgtggccaggcctccacaggccgggtgctgctgcccacaggcaaccagagggcaggtaggcgccccccactgcctccccaatggggatgagtgcctgcaaccgcacttctgcatgcaggacaggtgctgcggccaggactcagggtgtctccaaagggtgtgctgggagcgagggcattatcaaccttgtctggcactgccctcactccacctgatcctcctgacagccacctttctccccactcagaactgacactggggctgcgggcgcccccgaccctactcagcaccagtagtgggggcaagagcaccatcacccgtgtcaacagccctgggaccctggctcggctgggcagtgtcactcatgtcaccagcttcagccatgccccccccagtagccgaggaggctgcagcatcaaggtgagcccctcctcaccccaccagcctcaccatccgtcagcctcacatacactgcttcagggtgtagggctagcagggttcctctgctcctcccctactgcacacacagagaaaccgaggcccagagagggaaggtggctgctcacagaccacagccagtcggtggcagagctaaggccagaccctagcatatcagtccctaagtgtgtcggaagcttactctgtactggcgttaagcttcctggatgctgatctctgatccttagttcgaaattggttggttcattcctggtgaacagatggggaaactgaggctcagagagggtggtaagggcttgctcccctcttcctgtggcagccccagtgcccctgcgcccacccacactggacatcagccccgaggtatagagcagctcatctgctcatccaagatcagcctggcccattaggagattggagattagtgattagcatctgcgtcaacctccctgtgggggttgggcagaagctctgaggggggacagacaggcagaggggcgccaatcaggtgaggcagcagcctagcaggtgccttgggaactgaatacgcagcacccttccattattcattcccaagcccaggatccactagccgggagctcagccgggaaagggatccccaagcgggccacccggctgcccaggtaatgccctctgtgctaaaccagggactgaatgggactttggctgaggtgagatggctagaccagctttgggccttctcaggggagacagggagagagtgagggaaataaagcacccttcctttccaaaaaagcaggatccagctgccctctgacaagggattgtgtggggtggggtggggggacccgctgaggcccttgaggtggatgggaggtgccacagtgagacctgggtctgacaccaccaacttgcctcagtttacccatctggaaccaaaggggacaggtgatgtacccataatgtgcttgctcaaagtctgtggttggacgtgagcaccatgggcaggccagagggcatttatgtaagaccaagacactttttatagcagatcactcaaagtcctgcctccctgtgcctccatttcccccatctgttccagctgtctaaaacagctggagttagggtaaagggtaaaggagtacaggctgtggagtccagcagactgattctcacagctaatgtacatggtggctaggccaggtccattccctgttccctgcctcagtttccccacctgtgaggcatggggccccgatctcagtgatcttcagaacccatgcagtcttactgtgctgcaggcctatgatttctgtagggctatagccaggcctggcgatccgcctgcttgggcaggccccccctcccccactgccccttccacggaggagcccagaataggtttctatttgggctgcagctccagctggctggtggcgggctgggaggcaggggcggggcaggcccgctgcccttgcctttgccctcggaccagctgcaaagactcagacactcagccagagacagcagcccctgccactgccccaccattaccccccatagagtccccaccagcaccatgccgggggtaccagggcctgggcctgagctggccgcagcccttgaggagcagttgggccgggcactggaggagctgcgggcggtggctgaagcaggccgggtggcagtgacccaggcagccgaggtagctgtagccaccgtggagccggtggcccgggcagctgaagagctgcgggcagagagagcagcactgagccggcggctggatgcactgagcaggcaggtggaggtgctgagcctacggctgggggtcccacttgtgtccggccttgagcctgagctggagcccagcgagctgctcctggctgccgccgaccccgaggccctctttcaggctgccgaggatgccgggacccccgtggcccacccacctgccttcagcacccgccgccgctcctccaccggcaccacccgcagcactagtctcgtaagtgcttctgggttggtgggaggggtagttttgagccaggctctgcctcctcttgactttaggtatgtcaccaccttctctgagcctcagtttatctatcttgacaggggactggggcactagtgctctaagactagggcaagagggtgccaggctccagccctgaggcatgtgtggcagctgccttggcagcccctggcatgacccaggccccagcccccagctccctgccgccctgcaccctggccagaccaagcctccctgaaacagctgccacctcagctctccttacccttatagcagacggagaggccctgccaggagaggaagggccataatagttggcttggggccttgtcttcaaggggctagggagatgccctgggagggctgcagggctagagactccttagaggatggtttccagcaggggcgaggcagggggaggtggtacagaggagagcttcatagaggtcttggctcagggcagccccagtcagacacctggtcaggagcctacaggccccgggccagccctcttggcaaggtagcaggcagatggggggcaacatgtgctgcctgggcactggcccaggaggacctaggcctcgggaactggcagcacagagcagagcctgcctgggagggggctgggaacaaagcagcaaaatgaactaaggttcaggagttaggctgccttcagctcagatcccaggctgcatcacacttagagagagactgtgggcaagtcagttagctgccctgagcctcagtttccccttctgttttttttttttttttttccggtcttgttttctttgcaacagggtcttactctcttgcccagactggagtgcagctgcatgatcatagctctctgcagcctctaactcctgggctcaagtaatcctcctacctcagctttctgagtaggtgggactacaggtgcacaccaccatgcctagctaattttttatttttgtttttgtagagatgcggtctcgctatgttacccaggttggtctcaaactgctggcaacaagtgatccctcccacctcggcctcccaaactgttgacattacaggcatgagccactgcgcccggccttcccttctgttaaatagggacagtaaagtccctagtgtttatacaacacttactatggactggaaatcatcattattatcactatccattgtattaatacaattcggggtacgtgggaagccctacaacaaaactgtcagtgcctcttccctgactgacgctgacatggccatctttgggcaggcaggctggcaggctagtggttatttccaaggcgtgccagcaaccctaggatctgcttccctatccattggagacatgatgagtttcacccatacccctgcttaaagtccatgccctctccccaccctgcagatggaagcagagccagcagagcctctcgctgcagcagtggaagcggccaatggggctgagcagacccgagtgaacaaagcaccagaagggcggagccctctgagcgctgaggagctgatgactattgaggatgaaggagtcttggacaagatggtatagccagatccggtgggctgggggttggcagaggccagcaggcaccaggtaggcaatgatgggctctatatgcagctggatcagagcacggactttgaagagcggaagctcatccgggctgcacttcgtgagctccgacaaaggaagagaggtagagagccagttgccctaccctagatccagctgccccattccccagctgctcccctcatactctggggtccatttgtggacaccccagcttaataactgccctacccagcttctccttctctagacccagcagttcccttggctattccctgctggatccagctgctccttccctagctccttctctcccgctggtgaccccagttattctccccaaccagcttctcttctccttcctagacccagatactccctcccgcagctactctctccttggatccagttgcctctcaaagtactgtcaacgactccttccctgaatccagatactccttctccctgctgctcctctctccctgaagtccattgatggccatcttagcctctgccccatccagcttcccttttcctggacacaactacttcctcccccagatagttcttccctggacacatctattcattcccttagattctgggttcaattgcttctcctctcaaacactctcaattactcctctgaatctagctgcttctgccagggcccactgatggccaccccagtctctatctctacccacctacttctattttaagcccagttaacccccttcactagcttctctcccagctactcttcccctggatcagattgcttctcagatcccatcaattgctcccttcctggatctaaatattcctgcctccagctgctcttctcctccaaccaaagacctgctgatggcccacccagctacttcctcactcagcttctccttccttggactcagctaccccctcactagatctagatacccctcctgacttagctactcatgcctatagaaaccctttttggatccatacccctttgagtttagctactccgtattctctagtttctgcctgagtccatcaaacccttcccacactccattccctgtcaagttatggctgtcccctcaccccagctgctcctagagaggcccttgttacctgtgtcattcatgtttctaacaagccaccctccaccccgtcttgtgtgccccatgcacctgtgcatctgtgctgtgtgggtgttggtggcccttttgcgcatgcatggggcatcccctgcccagaccagcgggacaaggagcgggaacggcggctgcaggaggcacggggccggccaggggaggggcgcggcaacacagccactgagaccaccacgaggcacagccagcgggcagctgatggctctgctgtcagcactgttaccaagactgagcggctcgtccactccagtaaggggccaaatggggccggcccagggctcagggtgggaacacatcctcccccagccccctgtgcctttcacatccttctcatcccctgcccctgcagatgatggcacacggacggcccgcaccaccacagtggagtcgagtttcgtgaggcgctcggagagtaaggccacctggtgtcgccctgtgcctgcctgcctgtccgcccacctcctccggctcttccttgagctctctctccgtgtcttcaactgtgccgtcactttctcttctctgcctgcggctatcaccacccctccatacagcctcccatcccatctcctgatgtccagcccaggccctcacctggtgccccttccccttttttgcagatggcagtggcagcaccatgatgcaaaccaagaccttctcctcttcctcctcatccaagaagatgggcaggtgagcaccagcacccaatccctgaccatagaggagtcagtgccacaggggacctaactgcaaacccgttttacagaggggtgggctgggcacagtggctcttgcctgtaatcccagcactttgggaggccgaggtgggcggatcacttgaggtcaggagttcaagaccagcctggccaacatggtaaaacctcatctctactaaaaatacaaaaattagccgggcgtggtggcaggcacctgtaatcccaactactggggaggccgaggcacaagaatcacttgaacctgggaggcggaggttgcagtgagctgagatcactccactgcactccagtctgggcaacagagcgagactcagtctcaaaaataaatagataaataaataaataaataaataaataaataaataaaacagaggggtagactgggatgctgggaggtaataggtctatagccagggaggggcaaagtgagagttaaggatcctgctctccttgggatctcattttattctcaaccacaccacaggagaggtggatgctcagggaggccagtgagttgcttaggggctcacatctctgagtggctgcaatagcattgaacacttacagaggcctacctaccacactgagctgcctggtggcactgccacttcccagtatctgcaaaccatgtcccaggtcacacagcacctttataccttagccccatgagaaaggagggtacccccatgtaacagaggctgttggggctggcagaaagcaggaacaggatcagaatccaggatgagaaccaaaggggtccagagactctgaatcagagagaccttgttcaagttctagttccgcccatcacgtcctctgaaatcttaggcaagttactgccagaggtctcagtttcctcacctttagtggaattggtaaggcccctccctgctcttgtgaagtttaaaatggcacacaggaaaggatcaacagagatgaattattattattactattattatgctagtcatcatttttattatcggatagtgcccagaagctgaactcccctgtaacttgagggtacaatgaggcttctcagagaactactcgtgggtgggggagggggaggcggaaacctgttgaaaaccttgctgtcatttgagactcagtgtactcctctaaaatgcgtgtgatgaggacgcctccctccctggcaggcgtttgtggcagtggagatactagtgtgctacaagaccccccctcctcctcgcgagtggtggtccaggctggggagcagccctgctctccctgcctaacatgcgcctccccaacccctagcatcttcgaccgcgaggaccaggccagcccacgggccggcagcctggcggcgctcgagaaacggcaggccgagaagaagaaagagctgatgaaggcgcagagtctgcccaagacctcagcctcccaggcgcgcaaggccatgattgagaagctggagaaggagggcgcggccgggtgagctgcagaagtgggctgggcagtggggggcggggcgtgataggcagtggggggcggggcttgatagttggcccggcagaggcgggaagaccgcgcggctagatctgtggtgcaaaggcccgaaggtcatggaaggcggggcctgggatccactgggtgggcccaccgaggcatgccccttatagtcgtgtgacctggtcctgacaccgcccctacagcagccctggcggaccccgcgcagccgtgcagcgatccaccagcttcggggtccccaacgccaacagcatcaagcagatgctgctggactggtgtcgagccaagactcgcggctacgaggtgagccccgggaggccagggggcctggaggcctccccagaccccagctcaacacctccttcttagcagagctcctattacccagtacacttcctgccactgtgtggcctcacagggaacatggaaaggctcttggggtgaggaaactgaggctcaaagaggacacaaggcaagccctagattccagaatcagtgatgaagtaacagggcctcttgggtggtgggcagggttcaaggccggatcccactcttggagtcccctccttgttgctctgtaggaggccctgagtcaatttctctaaatgagggaaggagtgatgaggcatgaccatagccttagctgggtggcgctgggcctctcagtagctctgtcccttgaaattgcaaatatgggagttgacaggctgacttggaggaggctcatgttccaactattcactcattgtgcaagctacggggcctctttgtgcccagtgccctaggtctggaataacagaatgctgaggggtagacagcaggggggagttgcccccaggttcctgaccagtcctcctacggcttatagcacgtcgacatccagaacttctcctccagctggagtgatgggatggccttctgtgccctggtgcacaacttcttccctgaggccttcgactatgggcagcttagccctcagaaccgacgccagaacttcgaggtggccttctcatctgcggagtaagtgtgggccctggccctgctaatgttgctgcacatctggggctggacatcgggaccaggcccagttgccctgagaacccctggagcgggccagccacattgtcagtcagcggctgagacccccttccccagagagtccccgtccttctccatccccacccccccgctgctgagcgtgccaggtgcccgccggaacgaaggagccgcaggccggcctaccagcccgggccaaagcccaccaggtggccctgtccatatcccctccatcctccctctgcccccttctccctctctctccctttctctgtcctgctctcctcccactatcaccagagcttcctgctcccacgggatcccggctggagattccaaaaggaggctcctggcccgggcaccgtgcccgcccagcctatatagtgctgccagaggcttatataggacctcagcaagccctccactttggaatcgttgccccgtctgctcacctcaccctcagcacccttctccatctgtcttcccttctttccccttctctttctggtttccctcaaatttcttcctcctcctccttctcctcttcctcctccccccacctcctctcacgcctccctcaccccctctccccggggcacagccctcctctccaaccttggtgccaacgccatcgcccccaccccgcgttcccgcttgcccctagagttctctgcacctgtgactggtttggcccccacccttgtctgcattgcacaccattagtgatgggtagtgagcggcacgtccacagtggggaggaggcatgcggggggctggcagactgcagcactggaatcgtaattgaactcatgtctctgtgtgtgtgtgtgtatgtgtgtgtgtctctgtttcctcccctctctcttctctgcctcttccctctcttccccacccggggccctggcctcctgcccccgtcccccaccccttcccggccccctaccctccccaggacccatgcggactgcccgcagctcctggatacagaggacatggtgcggcttcgagagcctgactggaagtgcgtgtacacgtacatccaggaattctaccgctgtctggtccagaaggggctggtaaaaaccaaaaagtcctaacccctgctcggggccccacggtgagaaacgccgcctctaccacctgccccgtttcaccagaatctgctcagcaaggccagagagggtccagggaggcgggtgggggaagtaaggggggcatttagtcaagccagaggagccagacatagccctgtcttctggcagttcagggcccagcaggtgagaccattctaaatgggcagtgatgacccaggtgggcagcactgtgatgggggaagcccaggggagatgcctgacccaggctgcaggtctgggccccccatctgaaaaaagtgcaaactaagctgggatctgaacaagttcaggctaaaggagggagagggagttccaggcagaggaatcagcctaggcttagcagggcaagagagctggagagcacagcacatcaggaagggaagaaacttgagtctggatatgagggaggagggggccacagttagaagtttgaccttctggccgagcacggtggctcatgcctgtaatcccagcactttgggaggccaaggtgggcagatcacgaggtcatgagttcgagaccagcctgaccaacatggtgaaaccccatctctactaaaaatacaaaaattagccaggcgtgtggcgcacacctgtaatcctagcgactcaggaggctgaggtaggagaatcacttgaacccaggaggcgaaggttgcaatgagctgaaatcatgccactgcactccagcctgggtgacagagcgagactccatctc

SEQ ID NO: 14174 - DNA, 5080 bp, Homo sapiens
gaactggctgcactctcagcagcgggaagctgagcagcgggctgccctggcacggctggcagggcagctggagtccatgaacgatgtggaggaattgactgcactgttgcgaagcgctggtgagtatgaggagcgcaagctgatccgagctgccatccgccgtgtacgggctcaggagattgaggctgccaccttggctgggaggttgtacagcgggcgtcccaacagtggctcaagagaggacagcaaggggctagcggcacacaggctggaacagtgtgaggtgccagagcgagaggaacaggaacagcaggcagaggtttcaaagccaacccccacccctgaaggcaccagccaggatgtgaccacagtgacactcctgctgcgagccccacctgggagcacatccagctcacctgcctcacccagcagttcacccacccctgcctctcctgagcctccattggagcctgccgaggcccagtgccttacagctgaggttccaggcagcccagagccaccccccagcccacccaagaccaccagccctgagcctcaggagtctccaacgctccccagcactgagggccaggtggtcaacaagcttctgtctggccccaaagagacccctgctgcccagagccccaccagaggcccctctgacaccaagagagcagacgtggctggaccccgaccctgccaacgctccctgtcggtgctcagcccccgccaaccagcccagaaccgagagtccaccccccttgccagcggaccttcctcattccagcgggctggctctgtgcgggatcgtgtccacaagttcacatctgattctcctatggctgctaggctccaggatggcacaccccaggctgccctaagtcccctgacccccgcaaggctcctgggcccctccctcaccagcaccacccctgcctcctcctccagcggctcctcctctcggggccccagtgatacctcctcccggttcagcaaggagcaacgaggagtagcccagcccctggcccagcttcgaagctgcccccaggaggagggccccagggggcggggcttggctgctaggccccttgaaaacagagcaggggggcctgtggcacgttcagaggagcctggtgccccgctgcccgtggccgtcggcactgccgagccagggggcagtatgaagaccacattcaccatcgagatcaaggacggccgtggccaggcctccacaggccgggtgctgctgcccacaggcaaccagagggcagaactgacactggggctgcgggcgcccccgaccctactcagcaccagtagtgggggcaagagcaccatcacccgtgtcaacagccctgggaccctggctcggctgggcagtgtcactcatgtcaccagcttcagccatgccccccccagtagccgaggaggctgcagcatcaagatggaagcagagccagcagagcctctcgctgcagcagtggaagcggccaatggggctgagcagacccgagtgaacaaagcaccagaagggcggagccctctgagcgctgaggagctgatgactattgaggatgaaggagtcttggacaagatggtatagccagatccggtgggctgggggttggcagaggccagcaggcaccaggtaggcaatgatgggctctatatgcagctggatcagagcacggactttgaagagcggaagctcatccgggctgcacttcgtgagctccgacaaaggaagagaggtagagagccagttgccctaccctagatccagctgccccattccccagctgctcccctcatactctggggtccatttgtggacaccccagcttaataactgccctacccagcttctccttctctagacccagcagttcccttggctattccctgctggatccagctgctccttccctagctccttctctcccgctggtgaccccagttattctccccaaccagcttctcttctccttcctagacccagatactccctcccgcagctactctctccttggatccagttgcctctcaaagtactgtcaacgactccttccctgaatccagatactccttctccctgctgctcctctctccctgaagtccattgatggccatcttagcctctgccccatccagcttcccttttcctggacacaactacttcctcccccagatagttcttccctggacacatctattcattcccttagattctgggttcaattgcttctcctctcaaacactctcaattactcctctgaatctagctgcttctgccagggcccactgatggccaccccagtctctatctctacccacctacttctattttaagcccagttaacccccttcactagcttctctcccagctactcttcccctggatcagattgcttctcagatcccatcaattgctcccttcctggatctaaatattcctgcctccagctgctcttctcctccaaccaaagacctgctgatggcccacccagctacttcctcactcagcttctccttccttggactcagctaccccctcactagatctagatacccctcctgacttagctactcatgcctatagaaaccctttttggatccatacccctttgagtttagctactccgtattctctagtttctgcctgagtccatcaaacccttcccacactccattccctgtcaagttatggctgtcccctcaccccagctgctcctagagaggcccttgttacctgtgtcattcatgtttctaacaagccaccctccaccccgtcttgtgtgccccatgcacctgtgcatctgtgctgtgtgggtgttggtggcccttttgcgcatgcatggggcatcccctgcccagaccagcgggacaaggagcgggaacggcggctgcaggaggcacggggccggccaggggaggggcgcggcaacacagccactgagaccaccacgaggcacagccagcgggcagctgatggctctgctgtcagcactgttaccaagactgagcggctcgtccactccaatgatggcacacggacggcccgcaccaccacagtggagtcgagtttcgtgaggcgctcggagaatggcagtggcagcaccatgatgcaaaccaagaccttctcctcttcctcctcatccaagaagatgggcagcatcttcgaccgcgaggaccaggccagcccacgggccggcagcctggcggcgctcgagaaacggcaggccgagaagaagaaagagctgatgaaggcgcagagtctgcccaagacctcagcctcccaggcgcgcaaggccatgattgagaagctggagaaggagggcgcggccggcagccctggcggaccccgcgcagccgtgcagcgatccaccagcttcggggtccccaacgccaacagcatcaagcagatgctgctggactggtgtcgagccaagactcgcggctacgaggtgagccccgggaggccagggggcctggaggcctccccagaccccagctcaacacctccttcttagcagagctcctattacccagtacacttcctgccactgtgtggcctcacagggaacatggaaaggctcttggggtgaggaaactgaggctcaaagaggacacaaggcaagccctagattccagaatcagtgatgaagtaacagggcctcttgggtggtgggcagggttcaaggccggatcccactcttggagtcccctccttgttgctctgtaggaggccctgagtcaatttctctaaatgagggaaggagtgatgaggcatgaccatagccttagctgggtggcgctgggcctctcagtagctctgtcccttgaaattgcaaatatgggagttgacaggctgacttggaggaggctcatgttccaactattcactcattgtgcaagctacggggcctctttgtgcccagtgccctaggtctggaataacagaatgctgaggggtagacagcaggggggagttgcccccaggttcctgaccagtcctcctacggcttatagcacgtcgacatccagaacttctcctccagctggagtgatgggatggccttctgtgccctggtgcacaacttcttccctgaggccttcgactatgggcagcttagccctcagaaccgacgccagaacttcgaggtggccttctcatctgcggagacccatgcggactgcccgcagctcctggatacagaggacatggtgcggcttcgagagcctgactggaagtgcgtgtacacgtacatccaggaattctaccgctgtctggtccagaaggggctggtaaaaaccaaaaagtcctaacccctgctcggggccccacggtgagaaacgccgcctctaccacctgccccgtttcaccagaatctgctcagcaaggccagagagggtccagggaggcgggtgggggaagtaaggggggcatttagtcaagccagaggagccagacatagccctgtcttctggcagttcagggcccagcaggtgagaccattctaaatgggcagtgatgacccaggtgggcagcactgtgatgggggaagcccaggggagatgcctgacccaggctgcaggtctgggccccccatctgaaaaaagtgcaaactaagctgggatctgaacaagttcaggctaaaggagggagagggagttccaggcagaggaatcagcctaggcttagcagggcaagagagctggagagcacagcacatcaggaagggaagaaacttgagtctggatatgagggaggagggggccacagttagaagtttgaccttctggccgagcacggtggctcatgcctgtaatcccagcactttgggaggccaaggtgggcagatcacgaggtcatgagttcgagaccagcctgaccaacatggtgaaaccccatctctactaaaaatacaaaaattagccaggcgtgtggcgcacacctgtaatcctagcgactcaggaggctgaggtaggagaatcacttgaacccaggaggcgaaggttgcaatgagctgaaatcatgccactgcactccagcctgggtgacagagcgagactccatctc

SEQ ID NO: 14175 - DNA, 1372 bp, Homo sapiens
aaagcctagggagccttggttgcatcctgtgggtcccttacaggtgccagagcgagaggaacaggaacagcaggcagaggtttcaaagccaacccccacccctgaaggcaccagccaggatgtgaccacagtgacactcctgctgcgagccccacctgggagcacatccagctcacctgcctcacccagcagttcacccacccctgcctctcctgagcctccattggagcctgccgaggcccagtgccttacagctgaggttccaggcagcccagagccaccccccagcccacccaagaccaccagccctgagcctcaggagtctccaacgctccccagcactgagggccaggtggtcaacaaggtgagtctggatgaggggcagggatgccaggcaagtgagcaggtctgggagtcaggccttgctcaggccctgttcttctcccttgcagcttctgtctggccccaaagagacccctgctgcccagagccccaccagaggcccctctgacaccaagagagcaggtgagggtcccagcaggggtagtcacaggcatctttcttcccctccccctgcctccctttccctgcctagaaaatgggctcttgtgcctggcagctctagcttcctcaggtccatgcagtccctgatactgcaccccacccctgaagtgtccccgcccccagctaggccagcctccccctccacccccatggctagaggcctcccctgcagccttgaaaggcaacgggcctcaggcacattcttctccccaataagggagtccacccatctcccagctggagctgtgggcagcactggccaggagggctgtcccccctccccatctgcagaaaggatctgggcacccttcctccagcctaagcctcgcctggcccccaggagtgtccaagtcatcctagggtcagtgtggcaggagaaggaggtgcctgtaggagagatgcagccgagtggggatgccggagtgtgggagatccaggaggggatggagaggtggggtgggggttgagtacaggaaagggtgggaagctagggaggtgtagaggagaggattatgaaaggtggacacccactatcccctgtcttttctctttccccacatggccatcaccccctccccaacctgccagacgtggctggaccccgaccctgccaacgctccctgtcggtgctcagcccccgccaaccagcccagaaccgaggtactacctattctcaccctgcctaggatctgtgcagaccctgtcccacccagttgctgacagccctcctgttccttctagagtccaccccccttgccagcggaccttcctcattccagcgggctggctctgtgcgggatcgtgtcca

SEQ ID NO: 14176 - DNA, 576 bp, Homo sapiens
aaagcctagggagccttggttgcatcctgtgggtcccttacaggtgccagagcgagaggaacaggaacagcaggcagaggtttcaaagccaacccccacccctgaaggcaccagccaggatgtgaccacagtgacactcctgctgcgagccccacctgggagcacatccagctcacctgcctcacccagcagttcacccacccctgcctctcctgagcctccattggagcctgccgaggcccagtgccttacagctgaggttccaggcagcccagagccaccccccagcccacccaagaccaccagccctgagcctcaggagtctccaacgctccccagcactgagggccaggtggtcaacaagcttctgtctggccccaaagagacccctgctgcccagagccccaccagaggcccctctgacaccaagagagcagacgtggctggaccccgaccctgccaacgctccctgtcggtgctcagcccccgccaaccagcccagaaccgagagtccaccccccttgccagcggaccttcctcattccagcgggctggctctgtgcgggatcgtgtcca

SEQ ID NO: 14177 - DNA, 4962 bp, Homo sapiens
gtctggaataacagaatgctgaggggtagacagcaggggggagttgcccccaggttcctgaccagtcctcctacggcttatagcacgtcgacatccagaacttctcctccagctggagtgatgggatggccttctgtgccctggtgcacaacttcttccctgaggccttcgactatgggcagcttagccctcagaaccgacgccagaacttcgaggtggccttctcatctgcggagtaagtgtgggccctggccctgctaatgttgctgcacatctggggctggacatcgggaccaggcccagttgccctgagaacccctggagcgggccagccacattgtcagtcagcggctgagacccccttccccagagagtccccgtccttctccatccccacccccccgctgctgagcgtgccaggtgcccgccggaacgaaggagccgcaggccggcctaccagcccgggccaaagcccaccaggtggccctgtccatatcccctccatcctccctctgcccccttctccctctctctccctttctctgtcctgctctcctcccactatcaccagagcttcctgctcccacgggatcccggctggagattccaaaaggaggctcctggcccgggcaccgtgcccgcccagcctatatagtgctgccagaggcttatataggacctcagcaagccctccactttggaatcgttgccccgtctgctcacctcaccctcagcacccttctccatctgtcttcccttctttccccttctctttctggtttccctcaaatttcttcctcctcctccttctcctcttcctcctccccccacctcctctcacgcctccctcaccccctctccccggggcacagccctcctctccaaccttggtgccaacgccatcgcccccaccccgcgttcccgcttgcccctagagttctctgcacctgtgactggtttggcccccacccttgtctgcattgcacaccattagtgatgggtagtgagcggcacgtccacagtggggaggaggcatgcggggggctggcagactgcagcactggaatcgtaattgaactcatgtctctgtgtgtgtgtgtgtatgtgtgtgtgtctctgtttcctcccctctctcttctctgcctcttccctctcttccccacccggggccctggcctcctgcccccgtcccccaccccttcccggccccctaccctccccaggacccatgcggactgcccgcagctcctggatacagaggacatggtgcggcttcgagagcctgactggaagtgcgtgtacacgtacatccaggaattctaccgctgtctggtccagaaggggctggtaaaaaccaaaaagtcctaacccctgctcggggccccacggtgagaaacgccgcctctaccacctgccccgtttcaccagaatctgctcagcaaggccagagagggtccagggaggcgggtgggggaagtaaggggggcatttagtcaagccagaggagccagacatagccctgtcttctggcagttcagggcccagcaggtgagaccattctaaatgggcagtgatgacccaggtgggcagcactgtgatgggggaagcccaggggagatgcctgacccaggctgcaggtctgggccccccatctgaaaaaagtgcaaactaagctgggatctgaacaagttcaggctaaaggagggagagggagttccaggcagaggaatcagcctaggcttagcagggcaagagagctggagagcacagcacatcaggaagggaagaaacttgagtctggatatgagggaggagggggccacagttagaagtttgaccttctggccgagcacggtggctcatgcctgtaatcccagcactttgggaggccaaggtgggcagatcacgaggtcatgagttcgagaccagcctgaccaacatggtgaaaccccatctctactaaaaatacaaaaattagccaggcgtgtggcgcacacctgtaatcctagcgactcaggaggctgaggtaggagaatcacttgaacccaggaggcgaaggttgcaatgagctgaaatcatgccactgcactccagcctgggtgacagagcgagactccatctcaaaaaaaaaaaaaaaaaaaaaaaagtttgaccttcctcctgaggacaacaggagttataaagggtttccaaacagagaagggatggatatagcattctaggaccttcctcggatgaggcttggatgagagatgggatggactagatgactggaatagcttaagagctagagagacaggcttcccaatagatctggtttggagagggagagggaaggtcaagaagtctgccaggctcctgtgtgggcactggggagttggtggtgccatactccaaagtggggagctcaggagcaggaccagttcaacaggaagatgtttctggctggggactctggatcctaagccagctgtggcatttcctctctggtcacctcacctcagtaccaaagtaaagaattcagatcctaaactaactaccccattacagacaaggagctcagagagagacgtgggctaagactgtcctgggggtgggagggagagggaagatggttaggtcagagctggggccagaaactgagactccaaactccccacttagtggctgttttccttgccccatcactgtgttcccgcccattttgtagagaggattgaaaatagaggcccagaaggagcaaggggattggctgaaggaatgtgagtcagtgacaggtaggggcacactcagatgcccctcagggcctggagccattgtggggggcagtccacatgtgcacacacacactcagagaaggagcacagatgagtggcggatgggcttggtgctatctccagatcatatatggacttaggagctgctgcccagcaagccagcttggagggagaggggcccagcccagccctgatccagttggaaagtgtgactcagccgtgctgttgctcaagttgcctggtgtttggcctgtcactggggcagcctgagccctgagccctgagccccagtgtaaacaatggctttataaggtctccagggaagggagtggggcgggagggagcaccaggttggagagggcggtcgggatccccaggacgatagccacagctggaagaagcttcagagagaggctgcctttgcatcatggtacagctcgggaaacaagcccagtctgggatagggatgaccctaggggcacgtggcacatcagcagcagacccagaaccctctcactcatcctaaattcttgtaaggtctcaaatgagatagagaataactgtcctgttctaaagagggggaaacagtcatagaaaagggccttatctagcacccacaactggttagggatacagtctggactaaaacagaggtgttcggtgttctgcctcccaggtttcttctctgaaggagtccaggtgagctgggggtaggcccagccctaccacagttctgagtttgtccataagggcacgagatgggaggtggtcttgggttctcaggtgtcttgagaataaggagcaattgttgccattatgccttccctgccataggaaactcattcagcaacattgaatgcttgctatgtcccaggtatggcagataggagggatcaaggcagaagaggtcttgctctgggggttgagggacaggggaaaaggagccagagagcagactccagcttcagagctctgggagctgtcagttgcttaataggcacaacccactcactccagagtggggaaaaggctttgccaacacccagaactgggggcctgggtcccatgcggcctagcctgcacttactaagccatggggcttgaaacaaatggctcctctgctctgtgactcagtttccttatctgtgaagggcagctagcattctgaaggatggccagaagggtggtccccccgagcatggcatagatggtccattggtattggctgggatcctcatctgcctcctctgctctacccaaggcaggtgataagggttagagaacccctctgctgcccacacgttccctggcctccatctccagcagcagggttatccccaccccctgtcaaagaataggggtccctgggcctctcaacaggaagtaccagatcaggcagctagcagacaatcatcggtggaccacagggccactagagtgagacctatccatagataaagattggccagtgatgaagcccatctgggtgcaaaggccgagctgagaggcttctaccaactggagtgtgccagtgagggtgagcagaaggtggtctccagggagaacatgggcagggtttggagccagcacctccccagggttggaggaagcagacccaggacctgcctgactgggatggggctctcttctgccatctccgcctccacctgcctagctctgctcccccgccccgagagatgcctccaggcttgggtagatgaagccaggggcttcctgccttcctggaaggcttttccctgtctggagtttatgaaagaccagcaggcaatgcggcaataaaaaagaccttggggtagaggggcgccacgagaggcgggtctggcgctgacatccaaccccgtgccccctccctgcaggatgctggtggactgtgtgcccctggtggaggtggacgacatgatgatcatgggcaagaagcctgaccccaagtgtgtcttcacctatgtgcagtcgctctacaaccacctgcgacgccacgaactgcgcctgcgcggcaagaatgtctagcctgcccgcccgcatggccagccagtggcaagctgccgcccccactctccgggcaccgtctcctgcctgtgcgtccgcccaccgctgccctgtctgttgcgacaccctcccccccacatacacacgcagcgttttgataaattattggttttcaacg

SEQ ID NO: 14178 - DNA, 543 bp, Homo sapiens
gtctggaataacagaatgctgaggggtagacagcaggggggagttgcccccaggttcctgaccagtcctcctacggcttatagcacgtcgacatccagaacttctcctccagctggagtgatgggatggccttctgtgccctggtgcacaacttcttccctgaggccttcgactatgggcagcttagccctcagaaccgacgccagaacttcgaggtggccttctcatctgcggagatgctggtggactgtgtgcccctggtggaggtggacgacatgatgatcatgggcaagaagcctgaccccaagtgtgtcttcacctatgtgcagtcgctctacaaccacctgcgacgccacgaactgcgcctgcgcggcaagaatgtctagcctgcccgcccgcatggccagccagtggcaagctgccgcccccactctccgggcaccgtctcctgcctgtgcgtccgcccaccgctgccctgtctgttgcgacaccctcccccccacatacacacgcagcgttttgataaattattggttttcaacg

SEQ ID NO: 14179 - DNA, 7407 bp, Homo sapiens
gcagaatccaggggacggttgctgagcgggcctgggacagcgggtcgcggcacctccggcctgcgcgtgtctaatccgtctgtcgggtcccgaaagagctaagccgagcctgcgccggacgggtgggctggactgagaggtgggtgtgcggacctcgggggggatcctggtgctgccccaacgtgtccgggggtggaacccggatgtctagacaggagttctggaacgtccagacctgggagcccccacccatacgagaggtctaagccatgggataaagttatgagactgttgggggaagacgcccccggattcctaagagactccacgccccacaggggcgctagtctgtggcggcagaaaccctggggaagctgccacagaatcctgaggcccctcacaatgtccggcgaccccagactgtgtgacagggagattggagaagagcagcggcagggatcttcttataatcccatgggtgtcctagattaggcattagggtcagctgccccatagaagaacagacatggggggaatcagaatgtccgcagaacctaaggctggtgaccactggacagtcttgaagaggtttaacccagacagagtaactaggtaagaggcaaggatcctaacaggcagagattgggaggttgacacctctgagcctaccaggatgggagggggaacaagcagtgacttgaacaggctgggacccacacaccccaactgtgtggagcggtaaccctcaccccccacccatgcaccgtatggggtgacttcccaagtgactgttctgaagagagggaagggatgattgaaagatgaatcaacaggaggtggggggcaggcctggggccacacattagtcagtcaccatacattaactaagcatccacagtgtgccagaccagggcccctcaaattccagacagacattagttggggctacaggaggaaggagagatctgcgctgggaggctgggccaggatttaggggtccattttgatgggcagcactggggcaagatggggctcttgcctctgtcactgagagtgttccaggcccttgagggcactttggaagggagcttcggaagccggagatgacgaagattttgattacatccttctctgccctctaagtctttggcttcctccttgctcagtgacaaatccttggccctctccaatcttctcagtttgcctgaaatccaggggttgggcaggtcagcttctgaaagcccttccaggtggggaattgaattctgtatgaattggcaggaggtgctgggtgcctggacacctggcttcaggaggtctggacagcagagctggctccaagaatcggaagacacagtgtaccttcctatacctgggggaatgacagtggtggtggcagcaagaactacgggttcagcccacagccagaagctgagcctgcggagtgggtgggggctgggtaggccctgtggatgggtgggtggggcaggaaactggagactggagtgcaccccctggtggtaagcacagcttgggtgggtcttgccaggccctggcttctcaatccaggtccctgccctccctgttttgaggtttagacaggatgagagtccatcccaggccacacagcagactggcggccaagctggcagggctggaaccagagaccccctaccctgggtttggtgagttttccagcaaaccaccctagggcagagggcagcttccagccaggagccacattataggatgggacagtaatggacgctcctaggttagagagggaaagtaaggcacagagcctaagtgcctgtggtttctggaagccccagcatgcctgattcatgtctgtcccctgcagaattctctgagctggtgacaggtgccacaggcactggggatctcaccagaaaggaaccgacggagctaggggccagcgagatggcggacgaggccttagctgggctggatgagggagcccttcggaagctggtaagtggccccatcacccactgtggggacaggaaagccaagccagagaggcagggtcaatccagggtacctctcagctgacaggaagaagtgatgggggaaaggtcaggaggagggggacatgggaacaggggtaggccagttccatgtggctgatgcagaggcccttgtggcatgtgcctgtccatgcctggtactgaagcctagtccctcccaaccctccacagccaccacctgtttaaacagtaactgctgtagactcgcccgtatgcagccacaggtgtggggaggctggatatgcctctccagagcaatagctcgggcaatgcccacccctggaagctggcccagtgataatggtagcagcaatgattaataatgccaaggcctggcagggggcaggctgggtactgggtataccatgtcacagaataatcacagcagctctgaaagcctgggcactgcgactcaagagagttaaaatcacctgctcaaggacacccatctaagaaggagctgtgccaaaatcccaaccccatagtgggccacgggggaccagagtcctgggaaagtcaaggctggacgaggccataagagagagacaggttttgtgggcccttatggattctgtggcttctcatctcatttttctactcttgagtctcagttcctctacctgtaaaatgaagggagggagggagatgtgtttgcacacaagctctaggtcctagagttggcatggggacagaatgaggcatggacccagatctcaggtggaggaaagatgagcccactccatcccctttcttgttcctcttcctgagagccctgtctacctccatgcacagaggccgtagggcaacccagtggggcagggctccttccccaaccccaaaggccaggcagcctgacctggaggaggggccagaggagctccatctcctcagtccctgacccttgtccatgggggtaaattaaagatttactttacctagaagacaagtgacccaccccactctcataccttcccccgcaggcagaggctggaaccaaccagcgtagcccagccactgggcagtgcccagctgctgccatgacctccccaaggcactctgcctgtatgttctcggaccagcgcattagactctctgggtgtctgcctctccactatcaccgcaggatgtgtgcagcctggaggggatgaggttaggtttccaaaggtgcccgccagtcagttcgaccttccctcaggaagtccaagtcccagtgggggtcgtagaggcagcacagtccaaaaagagggaatgccaggcctggttcccgcacatcctcatctcaaggtatccacaggcaggctcagggttcttcagccgccacctccctctcttaagcgaggctcgggcggcgctggaaaagagttttggagagaagctggagcagtggttgaatctctgggaaaggacagatgagaacctgccccggtctcgggatcggtgcctctcgaagtctttccgaccccgggagcggctcctccagcacccggcgcccgccattactgcgccccgcgcgccggcccggcccccgctggcctcgtggcaagaacgggggcgtcccgagccgggctcctccccgcggggccgggccatataaggaaaagctaggcccgctccgcccgccctgcgccccagcgtctggccgatttggggacgcgggcagtcgcttccggccccggctcccgcacattcttgaggattgggccggggatgggaggaatggggacgcctggggacttgcacgccgcgtgcccctccaccacccgccgggacgccctctgcctcggtcccgagttcgagttcgacctccgccactcagctgggtgtcctggggaccttggtttcttccctttagatccggacactgaagcaggcggtagcgggtgtcttcctacctggctaccccttcggcgcctagcgcgaggcagggtgggcgaggcgagggcggcgccctgcgagggagggcggtcgcagaacctgcgggccttcagcgccccctggcgaggcttccctccaccgccggcgggacccccatgggcaaccgggggagctgggactgaaagcctggagagccccctccgttgtgctgttggggagactgaggcccagtgagacctcagggcctgccaggcgttcccaacagcgagggcagagagtacacggagagccggctccccagggggaggaagcaccctctttcctcccgggagaatttcactgggcagtttcggaaaccgccccatccccttccccttccccctcggtagacaatggcgctttgtacttccttccctccctcccacagctccctccttacacagcggtggggcctgggcgggtggaactcgggacacacagaggagacactgtggtccaacctttgcctccaggcccaaagggaagggtcgtgccagagggtgaccagtggaatgaggttgtcagtctccagccttgcccacccactttgggggatcagagggaggctcccattttccagatggggacactgaagctccgggggttgtgctgtagaggtggccaagttcctacatcaggcttttgtcagagacaaggaccccatctccgagcccagagcactgagaatggggacctaggagacaaaaggctagcccttgcccctctgggcctctttaccctctgtacagaaggggctggaccctctgtcccctccagcccccagcctccaaatgtaccacagaaggctctaggcctgagacacagccagcaccgggggctggggagtgagcctcattccccccgcctctgctataaggcctccttaggcctcagagcatctctagtccaggctagaggggtctccaacacagtgccaggatccctgaggtccccaccatgacacacagaccccagtagcagagctatcttcagcctagggcaggccctggagtcagagagacctgggttcaaatcctggctcaggtcatttgaccatgagcaaatcacatgtcctccctggacttcaatctcctcatctgtcaaatgggaataacagtagtatctagggtttttgtgggcttaggacaagtagggggctcagcacagggtttgactcacaggctctccataaatgttactgatgcctcggggtatcctgcccttcccatttgcccccttgtctctctccctcctcctgactggctagaaccaagtatgggggtgatgcttattgcaactgcagctatgtacaggagaggccaagtcactgttcccaaccccacccactggcaaatgaaaaaaccaagacacagagagtttaagggatatgctcttgatcacccagccaggattggactagggctggaaccaactaagggctctggcctgagtttcagggggtcttctcataattcctcaggaatgtggagcctggagggctcttcccccaagactctccctgctctcttcagactaggacaagctggctcatggctgagttgggccagcccacactccctgctgaaaactatctccatcccatccccacccttgccacctggccttcccgctaagcagaaaggaatgacgggggggcgctaaaaagggagatgatagagggttctttggccctacccctgaatgatttggggggtggggacagaggaaatcaccccgcctttactggctcccgtctggttatcagacccacactggaggcttatctctgccactatcttccaggggaaccctgggccagtcctctctcccttgagccacggaggatctgtatgtagcaggtggctctacatggtggaggtgtgggggaggcaacaggattggctgactcactccagagaaggtgttctttcctgaacctggttagaccagtcacccccaatttcccgggaactgaggggttgagaaccggtagaagcagctgtcacccagggatgccctctataaggccctggggtggcccctagtgccagccaccttatatgtctgggggattggtcctcccactctgcaccctggcttcttccatggtggctaggtccaggccagtgcagtggggacaatagccctcagccaggcaggactcctgagcacctgtcctcagtttccccatctgtggatgaagcagtcaacccccagctgggctgtggtgtttggtgactagaccagggagcctcccttgctcagagggtggacttcatctgtcacctttccctctagggaccctgttagtgacccacagggtggcctccctcctcctcctacaatagctccctgacttttggggatctgggctctgagaggcaggaatcgagttgtagaaaggagtgcctggcttggcacctggcacaagtgggcagtttctggctgtccactcacagttgtgtgctctgtgaaccacaatgcaaagtggactacccaagatccctgaaacagtgggctgggtctacccccgggaccctgcgtgggcaggcaggcacgtgaagagcttgggacacagggagtggacacaggccacacattgtgccctaggcagagccgtgggcagctggtgccagccctccgcccctggcagccaaaatgacctgcctctcgcacccactgcagctggaggtcacagcagatctggcagagcggcggcgcatccgctcagccatccgggaactgcagcggcaggagctggagcgcgaggaggaggccctggcatccaagcgtttccgtgccgagcggcaggacaacaaggagaactggctgcagtgagtagcggggggtggaacatgcgggtgagaaggtgagtgtgagccctggctcagctcatgtgtgcaggcaggcgtgagcacaagtgtatctgtggattgcatgtgctaatggcagtacgtccacacacgcttctggaaaaacagagatgtttgtgggcatggagcatgtactgattgtggcgtcgcggccgtgctgatgtagccagcacgtctgagtgtgtggtattagtgcccacgtccatgggcatatgtgtatcagtgtgcagttagagggtgtgcacagccacatgcccttctgccaaggttctgggtactctgttctggctcctacccttagcccacatcctccacgacctggccatggcagtggtggttacagtcatgatgtctctgcagctctcagcagcgggaagctgagcagcgggctgccctggcacggctggcagggcagctggagtccatgaacgatgtggaggaattgactgcactggtgaggcccaggctggggcaggggatgggggcagggcaggtgaagacctggactccacagcccaacacccgcgacctgtctcttacccacagttgcgaagcgctggtgagtatgagga

SEQ ID NO: 14180 - DNA, 598 bp, Homo sapiens
gcagaatccaggggacggttgctgagcgggcctgggacagcgggtcgcggcacctccggcctgcgcgtgtctaatccgtctgtcgggtcccgaaagagctaagccgagcctgcgccggacgggtgggctggactgagagaattctctgagctggtgacaggtgccacaggcactggggatctcaccagaaaggaaccgacggagctaggggccagcgagatggcggacgaggccttagctgggctggatgagggagcccttcggaagctgctggaggtcacagcagatctggcagagcggcggcgcatccgctcagccatccgggaactgcagcggcaggagctggagcgcgaggaggaggccctggcatccaagcgtttccgtgccgagcggcaggacaacaaggagaactggctgcacccacatcctccacgacctggccatggcagtggtggttacagtcatgatgtctctgcagctctcagcagcgggaagctgagcagcgggctgccctggcacggctggcagggcagctggagtccatgaacgatgtggaggaattgactgcactgttgcgaagcgctggtgagtatgagga

SEQ ID NO: 14181 - DNA, 7274 bp, Homo sapiens
gcagaatccaggggacggttgctgagcgggcctgggacagcgggtcgcggcacctccggcctgcgcgtgtctaatccgtctgtcgggtcccgaaagagctaagccgagcctgcgccggacgggtgggctggactgagaggtgggtgtgcggacctcgggggggatcctggtgctgccccaacgtgtccgggggtggaacccggatgtctagacaggagttctggaacgtccagacctgggagcccccacccatacgagaggtctaagccatgggataaagttatgagactgttgggggaagacgcccccggattcctaagagactccacgccccacaggggcgctagtctgtggcggcagaaaccctggggaagctgccacagaatcctgaggcccctcacaatgtccggcgaccccagactgtgtgacagggagattggagaagagcagcggcagggatcttcttataatcccatgggtgtcctagattaggcattagggtcagctgccccatagaagaacagacatggggggaatcagaatgtccgcagaacctaaggctggtgaccactggacagtcttgaagaggtttaacccagacagagtaactaggtaagaggcaaggatcctaacaggcagagattgggaggttgacacctctgagcctaccaggatgggagggggaacaagcagtgacttgaacaggctgggacccacacaccccaactgtgtggagcggtaaccctcaccccccacccatgcaccgtatggggtgacttcccaagtgactgttctgaagagagggaagggatgattgaaagatgaatcaacaggaggtggggggcaggcctggggccacacattagtcagtcaccatacattaactaagcatccacagtgtgccagaccagggcccctcaaattccagacagacattagttggggctacaggaggaaggagagatctgcgctgggaggctgggccaggatttaggggtccattttgatgggcagcactggggcaagatggggctcttgcctctgtcactgagagtgttccaggcccttgagggcactttggaagggagcttcggaagccggagatgacgaagattttgattacatccttctctgccctctaagtctttggcttcctccttgctcagtgacaaatccttggccctctccaatcttctcagtttgcctgaaatccaggggttgggcaggtcagcttctgaaagcccttccaggtggggaattgaattctgtatgaattggcaggaggtgctgggtgcctggacacctggcttcaggaggtctggacagcagagctggctccaagaatcggaagacacagtgtaccttcctatacctgggggaatgacagtggtggtggcagcaagaactacgggttcagcccacagccagaagctgagcctgcggagtgggtgggggctgggtaggccctgtggatgggtgggtggggcaggaaactggagactggagtgcaccccctggtggtaagcacagcttgggtgggtcttgccaggccctggcttctcaatccaggtccctgccctccctgttttgaggtttagacaggatgagagtccatcccaggccacacagcagactggcggccaagctggcagggctggaaccagagaccccctaccctgggtttggtgagttttccagcaaaccaccctagggcagagggcagcttccagccaggagccacattataggatgggacagtaatggacgctcctaggttagagagggaaagtaaggcacagagcctaagtgcctgtggtttctggaagccccagcatgcctgattcatgtctgtcccctgcagaattctctgagctggtgacaggtgccacaggcactggggatctcaccagaaaggaaccgacggagctaggggccagcgagatggcggacgaggccttagctgggctggatgagggagcccttcggaagctggtaagtggccccatcacccactgtggggacaggaaagccaagccagagaggcagggtcaatccagggtacctctcagctgacaggaagaagtgatgggggaaaggtcaggaggagggggacatgggaacaggggtaggccagttccatgtggctgatgcagaggcccttgtggcatgtgcctgtccatgcctggtactgaagcctagtccctcccaaccctccacagccaccacctgtttaaacagtaactgctgtagactcgcccgtatgcagccacaggtgtggggaggctggatatgcctctccagagcaatagctcgggcaatgcccacccctggaagctggcccagtgataatggtagcagcaatgattaataatgccaaggcctggcagggggcaggctgggtactgggtataccatgtcacagaataatcacagcagctctgaaagcctgggcactgcgactcaagagagttaaaatcacctgctcaaggacacccatctaagaaggagctgtgccaaaatcccaaccccatagtgggccacgggggaccagagtcctgggaaagtcaaggctggacgaggccataagagagagacaggttttgtgggcccttatggattctgtggcttctcatctcatttttctactcttgagtctcagttcctctacctgtaaaatgaagggagggagggagatgtgtttgcacacaagctctaggtcctagagttggcatggggacagaatgaggcatggacccagatctcaggtggaggaaagatgagcccactccatcccctttcttgttcctcttcctgagagccctgtctacctccatgcacagaggccgtagggcaacccagtggggcagggctccttccccaaccccaaaggccaggcagcctgacctggaggaggggccagaggagctccatctcctcagtccctgacccttgtccatgggggtaaattaaagatttactttacctagaagacaagtgacccaccccactctcataccttcccccgcaggcagaggctggaaccaaccagcgtagcccagccactgggcagtgcccagctgctgccatgacctccccaaggcactctgcctgtatgttctcggaccagcgcattagactctctgggtgtctgcctctccactatcaccgcaggatgtgtgcagcctggaggggatgaggttaggtttccaaaggtgcccgccagtcagttcgaccttccctcaggaagtccaagtcccagtgggggtcgtagaggcagcacagtccaaaaagagggaatgccaggcctggttcccgcacatcctcatctcaaggtatccacaggcaggctcagggttcttcagccgccacctccctctcttaagcgaggctcgggcggcgctggaaaagagttttggagagaagctggagcagtggttgaatctctgggaaaggacagatgagaacctgccccggtctcgggatcggtgcctctcgaagtctttccgaccccgggagcggctcctccagcacccggcgcccgccattactgcgccccgcgcgccggcccggcccccgctggcctcgtggcaagaacgggggcgtcccgagccgggctcctccccgcggggccgggccatataaggaaaagctaggcccgctccgcccgccctgcgccccagcgtctggccgatttggggacgcgggcagtcgcttccggccccggctcccgcacattcttgaggattgggccggggatgggaggaatggggacgcctggggacttgcacgccgcgtgcccctccaccacccgccgggacgccctctgcctcggtcccgagttcgagttcgacctccgccactcagctgggtgtcctggggaccttggtttcttccctttagatccggacactgaagcaggcggtagcgggtgtcttcctacctggctaccccttcggcgcctagcgcgaggcagggtgggcgaggcgagggcggcgccctgcgagggagggcggtcgcagaacctgcgggccttcagcgccccctggcgaggcttccctccaccgccggcgggacccccatgggcaaccgggggagctgggactgaaagcctggagagccccctccgttgtgctgttggggagactgaggcccagtgagacctcagggcctgccaggcgttcccaacagcgagggcagagagtacacggagagccggctccccagggggaggaagcaccctctttcctcccgggagaatttcactgggcagtttcggaaaccgccccatccccttccccttccccctcggtagacaatggcgctttgtacttccttccctccctcccacagctccctccttacacagcggtggggcctgggcgggtggaactcgggacacacagaggagacactgtggtccaacctttgcctccaggcccaaagggaagggtcgtgccagagggtgaccagtggaatgaggttgtcagtctccagccttgcccacccactttgggggatcagagggaggctcccattttccagatggggacactgaagctccgggggttgtgctgtagaggtggccaagttcctacatcaggcttttgtcagagacaaggaccccatctccgagcccagagcactgagaatggggacctaggagacaaaaggctagcccttgcccctctgggcctctttaccctctgtacagaaggggctggaccctctgtcccctccagcccccagcctccaaatgtaccacagaaggctctaggcctgagacacagccagcaccgggggctggggagtgagcctcattccccccgcctctgctataaggcctccttaggcctcagagcatctctagtccaggctagaggggtctccaacacagtgccaggatccctgaggtccccaccatgacacacagaccccagtagcagagctatcttcagcctagggcaggccctggagtcagagagacctgggttcaaatcctggctcaggtcatttgaccatgagcaaatcacatgtcctccctggacttcaatctcctcatctgtcaaatgggaataacagtagtatctagggtttttgtgggcttaggacaagtagggggctcagcacagggtttgactcacaggctctccataaatgttactgatgcctcggggtatcctgcccttcccatttgcccccttgtctctctccctcctcctgactggctagaaccaagtatgggggtgatgcttattgcaactgcagctatgtacaggagaggccaagtcactgttcccaaccccacccactggcaaatgaaaaaaccaagacacagagagtttaagggatatgctcttgatcacccagccaggattggactagggctggaaccaactaagggctctggcctgagtttcagggggtcttctcataattcctcaggaatgtggagcctggagggctcttcccccaagactctccctgctctcttcagactaggacaagctggctcatggctgagttgggccagcccacactccctgctgaaaactatctccatcccatccccacccttgccacctggccttcccgctaagcagaaaggaatgacgggggggcgctaaaaagggagatgatagagggttctttggccctacccctgaatgatttggggggtggggacagaggaaatcaccccgcctttactggctcccgtctggttatcagacccacactggaggcttatctctgccactatcttccaggggaaccctgggccagtcctctctcccttgagccacggaggatctgtatgtagcaggtggctctacatggtggaggtgtgggggaggcaacaggattggctgactcactccagagaaggtgttctttcctgaacctggttagaccagtcacccccaatttcccgggaactgaggggttgagaaccggtagaagcagctgtcacccagggatgccctctataaggccctggggtggcccctagtgccagccaccttatatgtctgggggattggtcctcccactctgcaccctggcttcttccatggtggctaggtccaggccagtgcagtggggacaatagccctcagccaggcaggactcctgagcacctgtcctcagtttccccatctgtggatgaagcagtcaacccccagctgggctgtggtgtttggtgactagaccagggagcctcccttgctcagagggtggacttcatctgtcacctttccctctagggaccctgttagtgacccacagggtggcctccctcctcctcctacaatagctccctgacttttggggatctgggctctgagaggcaggaatcgagttgtagaaaggagtgcctggcttggcacctggcacaagtgggcagtttctggctgtccactcacagttgtgtgctctgtgaaccacaatgcaaagtggactacccaagatccctgaaacagtgggctgggtctacccccgggaccctgcgtgggcaggcaggcacgtgaagagcttgggacacagggagtggacacaggccacacattgtgccctaggcagagccgtgggcagctggtgccagccctccgcccctggcagccaaaatgacctgcctctcgcacccactgcagctggaggtcacagcagatctggcagagcggcggcgcatccgctcagccatccgggaactgcagcggcaggagctggagcgcgaggaggaggccctggcatccaagcgtttccgtgccgagcggcaggacaacaaggagaactggctgcagtgagtagcggggggtggaacatgcgggtgagaaggtgagtgtgagccctggctcagctcatgtgtgcaggcaggcgtgagcacaagtgtatctgtggattgcatgtgctaatggcagtacgtccacacacgcttctggaaaaacagagatgtttgtgggcatggagcatgtactgattgtggcgtcgcggccgtgctgatgtagccagcacgtctgagtgtgtggtattagtgcccacgtccatgggcatatgtgtatcagtgtgcagttagagggtgtgcacagccacatgcccttctgccaaggttctgggtactctgttctggctcctacccttagcccacatcctccacgacctggccatggcagtggtggttacagtcatgatgtctctgcagctctcagcagcgggaagctgagcagcgggctgccctggcacggctggcagggcagctggagtccatgaacgatgtggag

SEQ ID NO: 14182 - DNA, 589 bp, Homo sapiens
gcagaatccaggggacggttgctgagcgggcctgggacagcgggtcgcggcacctccggcctgcgcgtgtctaatccgtctgtcgggtcccgaaagagctaagccgagcctgcgccggacgggtgggctggactgagagaattctctgagctggtgacaggtgccacaggcactggggatctcaccagaaaggaaccgacggagctaggggccagcgagatggcggacgaggccttagctgggctggatgagggagcccttcggaagctgccaaaatgacctgcctctcgcacccactgcagctggaggtcacagcagatctggcagagcggcggcgcatccgctcagccatccgggaactgcagcggcaggagctggagcgcgaggaggaggccctggcatccaagcgtttccgtgccgagcggcaggacaacaaggagaactggctgcacccacatcctccacgacctggccatggcagtggtggttacagtcatgatgtctctgcagctctcagcagcgggaagctgagcagcgggctgccctggcacggctggcagggcagctggagtccatgaacgatgtggag

SEQ ID NO: 14183 - DNA, 23304 bp, Homo sapiens
agaatccaggggacggttgctgagcgggcctgggacagcgggtcgcggcacctccggcctgcgcgtgtctaatccgtctgtcgggtcccgaaagagctaagccgagcctgcgccggacgggtgggctggactgagaggtgggtgtgcggacctcgggggggatcctggtgctgccccaacgtgtccgggggtggaacccggatgtctagacaggagttctggaacgtccagacctgggagcccccacccatacgagaggtctaagccatgggataaagttatgagactgttgggggaagacgcccccggattcctaagagactccacgccccacaggggcgctagtctgtggcggcagaaaccctggggaagctgccacagaatcctgaggcccctcacaatgtccggcgaccccagactgtgtgacagggagattggagaagagcagcggcagggatcttcttataatcccatgggtgtcctagattaggcattagggtcagctgccccatagaagaacagacatggggggaatcagaatgtccgcagaacctaaggctggtgaccactggacagtcttgaagaggtttaacccagacagagtaactaggtaagaggcaaggatcctaacaggcagagattgggaggttgacacctctgagcctaccaggatgggagggggaacaagcagtgacttgaacaggctgggacccacacaccccaactgtgtggagcggtaaccctcaccccccacccatgcaccgtatggggtgacttcccaagtgactgttctgaagagagggaagggatgattgaaagatgaatcaacaggaggtggggggcaggcctggggccacacattagtcagtcaccatacattaactaagcatccacagtgtgccagaccagggcccctcaaattccagacagacattagttggggctacaggaggaaggagagatctgcgctgggaggctgggccaggatttaggggtccattttgatgggcagcactggggcaagatggggctcttgcctctgtcactgagagtgttccaggcccttgagggcactttggaagggagcttcggaagccggagatgacgaagattttgattacatccttctctgccctctaagtctttggcttcctccttgctcagtgacaaatccttggccctctccaatcttctcagtttgcctgaaatccaggggttgggcaggtcagcttctgaaagcccttccaggtggggaattgaattctgtatgaattggcaggaggtgctgggtgcctggacacctggcttcaggaggtctggacagcagagctggctccaagaatcggaagacacagtgtaccttcctatacctgggggaatgacagtggtggtggcagcaagaactacgggttcagcccacagccagaagctgagcctgcggagtgggtgggggctgggtaggccctgtggatgggtgggtggggcaggaaactggagactggagtgcaccccctggtggtaagcacagcttgggtgggtcttgccaggccctggcttctcaatccaggtccctgccctccctgttttgaggtttagacaggatgagagtccatcccaggccacacagcagactggcggccaagctggcagggctggaaccagagaccccctaccctgggtttggtgagttttccagcaaaccaccctagggcagagggcagcttccagccaggagccacattataggatgggacagtaatggacgctcctaggttagagagggaaagtaaggcacagagcctaagtgcctgtggtttctggaagccccagcatgcctgattcatgtctgtcccctgcagaattctctgagctggtgacaggtgccacaggcactggggatctcaccagaaaggaaccgacggagctaggggccagcgagatggcggacgaggccttagctgggctggatgagggagcccttcggaagctggtaagtggccccatcacccactgtggggacaggaaagccaagccagagaggcagggtcaatccagggtacctctcagctgacaggaagaagtgatgggggaaaggtcaggaggagggggacatgggaacaggggtaggccagttccatgtggctgatgcagaggcccttgtggcatgtgcctgtccatgcctggtactgaagcctagtccctcccaaccctccacagccaccacctgtttaaacagtaactgctgtagactcgcccgtatgcagccacaggtgtggggaggctggatatgcctctccagagcaatagctcgggcaatgcccacccctggaagctggcccagtgataatggtagcagcaatgattaataatgccaaggcctggcagggggcaggctgggtactgggtataccatgtcacagaataatcacagcagctctgaaagcctgggcactgcgactcaagagagttaaaatcacctgctcaaggacacccatctaagaaggagctgtgccaaaatcccaaccccatagtgggccacgggggaccagagtcctgggaaagtcaaggctggacgaggccataagagagagacaggttttgtgggcccttatggattctgtggcttctcatctcatttttctactcttgagtctcagttcctctacctgtaaaatgaagggagggagggagatgtgtttgcacacaagctctaggtcctagagttggcatggggacagaatgaggcatggacccagatctcaggtggaggaaagatgagcccactccatcccctttcttgttcctcttcctgagagccctgtctacctccatgcacagaggccgtagggcaacccagtggggcagggctccttccccaaccccaaaggccaggcagcctgacctggaggaggggccagaggagctccatctcctcagtccctgacccttgtccatgggggtaaattaaagatttactttacctagaagacaagtgacccaccccactctcataccttcccccgcaggcagaggctggaaccaaccagcgtagcccagccactgggcagtgcccagctgctgccatgacctccccaaggcactctgcctgtatgttctcggaccagcgcattagactctctgggtgtctgcctctccactatcaccgcaggatgtgtgcagcctggaggggatgaggttaggtttccaaaggtgcccgccagtcagttcgaccttccctcaggaagtccaagtcccagtgggggtcgtagaggcagcacagtccaaaaagagggaatgccaggcctggttcccgcacatcctcatctcaaggtatccacaggcaggctcagggttcttcagccgccacctccctctcttaagcgaggctcgggcggcgctggaaaagagttttggagagaagctggagcagtggttgaatctctgggaaaggacagatgagaacctgccccggtctcgggatcggtgcctctcgaagtctttccgaccccgggagcggctcctccagcacccggcgcccgccattactgcgccccgcgcgccggcccggcccccgctggcctcgtggcaagaacgggggcgtcccgagccgggctcctccccgcggggccgggccatataaggaaaagctaggcccgctccgcccgccctgcgccccagcgtctggccgatttggggacgcgggcagtcgcttccggccccggctcccgcacattcttgaggattgggccggggatgggaggaatggggacgcctggggacttgcacgccgcgtgcccctccaccacccgccgggacgccctctgcctcggtcccgagttcgagttcgacctccgccactcagctgggtgtcctggggaccttggtttcttccctttagatccggacactgaagcaggcggtagcgggtgtcttcctacctggctaccccttcggcgcctagcgcgaggcagggtgggcgaggcgagggcggcgccctgcgagggagggcggtcgcagaacctgcgggccttcagcgccccctggcgaggcttccctccaccgccggcgggacccccatgggcaaccgggggagctgggactgaaagcctggagagccccctccgttgtgctgttggggagactgaggcccagtgagacctcagggcctgccaggcgttcccaacagcgagggcagagagtacacggagagccggctccccagggggaggaagcaccctctttcctcccgggagaatttcactgggcagtttcggaaaccgccccatccccttccccttccccctcggtagacaatggcgctttgtacttccttccctccctcccacagctccctccttacacagcggtggggcctgggcgggtggaactcgggacacacagaggagacactgtggtccaacctttgcctccaggcccaaagggaagggtcgtgccagagggtgaccagtggaatgaggttgtcagtctccagccttgcccacccactttgggggatcagagggaggctcccattttccagatggggacactgaagctccgggggttgtgctgtagaggtggccaagttcctacatcaggcttttgtcagagacaaggaccccatctccgagcccagagcactgagaatggggacctaggagacaaaaggctagcccttgcccctctgggcctctttaccctctgtacagaaggggctggaccctctgtcccctccagcccccagcctccaaatgtaccacagaaggctctaggcctgagacacagccagcaccgggggctggggagtgagcctcattccccccgcctctgctataaggcctccttaggcctcagagcatctctagtccaggctagaggggtctccaacacagtgccaggatccctgaggtccccaccatgacacacagaccccagtagcagagctatcttcagcctagggcaggccctggagtcagagagacctgggttcaaatcctggctcaggtcatttgaccatgagcaaatcacatgtcctccctggacttcaatctcctcatctgtcaaatgggaataacagtagtatctagggtttttgtgggcttaggacaagtagggggctcagcacagggtttgactcacaggctctccataaatgttactgatgcctcggggtatcctgcccttcccatttgcccccttgtctctctccctcctcctgactggctagaaccaagtatgggggtgatgcttattgcaactgcagctatgtacaggagaggccaagtcactgttcccaaccccacccactggcaaatgaaaaaaccaagacacagagagtttaagggatatgctcttgatcacccagccaggattggactagggctggaaccaactaagggctctggcctgagtttcagggggtcttctcataattcctcaggaatgtggagcctggagggctcttcccccaagactctccctgctctcttcagactaggacaagctggctcatggctgagttgggccagcccacactccctgctgaaaactatctccatcccatccccacccttgccacctggccttcccgctaagcagaaaggaatgacgggggggcgctaaaaagggagatgatagagggttctttggccctacccctgaatgatttggggggtggggacagaggaaatcaccccgcctttactggctcccgtctggttatcagacccacactggaggcttatctctgccactatcttccaggggaaccctgggccagtcctctctcccttgagccacggaggatctgtatgtagcaggtggctctacatggtggaggtgtgggggaggcaacaggattggctgactcactccagagaaggtgttctttcctgaacctggttagaccagtcacccccaatttcccgggaactgaggggttgagaaccggtagaagcagctgtcacccagggatgccctctataaggccctggggtggcccctagtgccagccaccttatatgtctgggggattggtcctcccactctgcaccctggcttcttccatggtggctaggtccaggccagtgcagtggggacaatagccctcagccaggcaggactcctgagcacctgtcctcagtttccccatctgtggatgaagcagtcaacccccagctgggctgtggtgtttggtgactagaccagggagcctcccttgctcagagggtggacttcatctgtcacctttccctctagggaccctgttagtgacccacagggtggcctccctcctcctcctacaatagctccctgacttttggggatctgggctctgagaggcaggaatcgagttgtagaaaggagtgcctggcttggcacctggcacaagtgggcagtttctggctgtccactcacagttgtgtgctctgtgaaccacaatgcaaagtggactacccaagatccctgaaacagtgggctgggtctacccccgggaccctgcgtgggcaggcaggcacgtgaagagcttgggacacagggagtggacacaggccacacattgtgccctaggcagagccgtgggcagctggtgccagccctccgcccctggcagccaaaatgacctgcctctcgcacccactgcagctggaggtcacagcagatctggcagagcggcggcgcatccgctcagccatccgggaactgcagcggcaggagctggagcgcgaggaggaggccctggcatccaagcgtttccgtgccgagcggcaggacaacaaggagaactggctgcagtgagtagcggggggtggaacatgcgggtgagaaggtgagtgtgagccctggctcagctcatgtgtgcaggcaggcgtgagcacaagtgtatctgtggattgcatgtgctaatggcagtacgtccacacacgcttctggaaaaacagagatgtttgtgggcatggagcatgtactgattgtggcgtcgcggccgtgctgatgtagccagcacgtctgagtgtgtggtattagtgcccacgtccatgggcatatgtgtatcagtgtgcagttagagggtgtgcacagccacatgcccttctgccaaggttctgggtactctgttctggctcctacccttagcccacatcctccacgacctggccatggcagtggtggttacagtcatgatgtctctgcagctctcagcagcgggaagctgagcagcgggctgccctggcacggctggcagggcagctggagtccatgaacgatgtggaggaattgactgcactggtgaggcccaggctggggcaggggatgggggcagggcaggtgaagacctggactccacagcccaacacccgcgacctgtctcttacccacagttgcgaagcgctggtgagtatgaggagcgcaagctgatccgagctgccatccgccgtgtacgggctcaggagattgagggtatgtggcctgtcccggccccacccctgccctgctgtctgctgtccacagcacctccctgtcactcacctgccacttgctccttcccttccagctgccaccttggctgggaggttgtacagcgggcgtcccaacagtggctcaagagaggacagcaaggggctagcggcacacaggctggaacagtgtgaggtaaggagggtgggagagtggcccagtgtcctgtgcccatggataccggtagcacagagtgcctgagtgtctttgctaggctggtatttcactgtaaggggcccacccctgccatccagcctctatttagcagtcagagggatctcccagaaatgcaaatccggccctggcacctcccctgcttcaacccgtcccagggctgcccctcaccctccacacagcccacatctttaccttggcttatggggcctgcatgtcagaccccagctggctcacagttcactctattttccagagtgtgggtgagaggtcaggccatgcaggttccccaagtggccagcagaggccgctgggtccacggtcctggcaggaccccactcccactccagatgaaccaggctgaggccaggagtcaggaacctccactccagggatctattaaggctcccgtccccaataggtctcctgccatacccacccactgacatcaggacctggtcctctctgaacccctttggctaggtagtgccaagagattgggaagtggggatcagagactgcccttagcatgccagtgccagtgcttgcgcaggtgtgcctacaggaagccatgccccaccactctgctttgcatgccctgccctgggcacttgccagcctggccctcagtggtgggggtggcgttcaaagcctagggagccttggttgcatcctgtgggtcccttacaggtgccagagcgagaggaacaggaacagcaggcagaggtttcaaagccaacccccacccctgaaggcaccagccaggatgtgaccacagtgacactcctgctgcgagccccacctgggagcacatccagctcacctgcctcacccagcagttcacccacccctgcctctcctgagcctccattggagcctgccgaggcccagtgccttacagctgaggttccaggcagcccagagccaccccccagcccacccaagaccaccagccctgagcctcaggagtctccaacgctccccagcactgagggccaggtggtcaacaaggtgagtctggatgaggggcagggatgccaggcaagtgagcaggtctgggagtcaggccttgctcaggccctgttcttctcccttgcagcttctgtctggccccaaagagacccctgctgcccagagccccaccagaggcccctctgacaccaagagagcaggtgagggtcccagcaggggtagtcacaggcatctttcttcccctccccctgcctccctttccctgcctagaaaatgggctcttgtgcctggcagctctagcttcctcaggtccatgcagtccctgatactgcaccccacccctgaagtgtccccgcccccagctaggccagcctccccctccacccccatggctagaggcctcccctgcagccttgaaaggcaacgggcctcaggcacattcttctccccaataagggagtccacccatctcccagctggagctgtgggcagcactggccaggagggctgtcccccctccccatctgcagaaaggatctgggcacccttcctccagcctaagcctcgcctggcccccaggagtgtccaagtcatcctagggtcagtgtggcaggagaaggaggtgcctgtaggagagatgcagccgagtggggatgccggagtgtgggagatccaggaggggatggagaggtggggtgggggttgagtacaggaaagggtgggaagctagggaggtgtagaggagaggattatgaaaggtggacacccactatcccctgtcttttctctttccccacatggccatcaccccctccccaacctgccagacgtggctggaccccgaccctgccaacgctccctgtcggtgctcagcccccgccaaccagcccagaaccgaggtactacctattctcaccctgcctaggatctgtgcagaccctgtcccacccagttgctgacagccctcctgttccttctagagtccaccccccttgccagcggaccttcctcattccagcgggctggctctgtgcgggatcgtgtccacaagttcacatctgattctcctatggctgctaggctccaggatggcacaccccaggctgccctaagtcccctgacccccgcaaggctcctgggcccctccctcaccagcaccacccctgcctcctcctccagcggctcctcctctcggggccccagtgatacctcctcccggttcagcaaggagcaacgaggagtagcccagcccctggcccagcttcgaagctgcccccaggaggagggccccagggggcggggcttggctgctaggccccttgaaaacagagcaggggggcctgtggcacgttcagaggagcctggtgccccgctgcccgtggccgtcggcactgccgagccagggggcagtatgaagaccacattcaccatcgagatcaaggacggccgtggccaggcctccacaggccgggtgctgctgcccacaggcaaccagagggcaggtaggcgccccccactgcctccccaatggggatgagtgcctgcaaccgcacttctgcatgcaggacaggtgctgcggccaggactcagggtgtctccaaagggtgtgctgggagcgagggcattatcaaccttgtctggcactgccctcactccacctgatcctcctgacagccacctttctccccactcagaactgacactggggctgcgggcgcccccgaccctactcagcaccagtagtgggggcaagagcaccatcacccgtgtcaacagccctgggaccctggctcggctgggcagtgtcactcatgtcaccagcttcagccatgccccccccagtagccgaggaggctgcagcatcaaggtgagcccctcctcaccccaccagcctcaccatccgtcagcctcacatacactgcttcagggtgtagggctagcagggttcctctgctcctcccctactgcacacacagagaaaccgaggcccagagagggaaggtggctgctcacagaccacagccagtcggtggcagagctaaggccagaccctagcatatcagtccctaagtgtgtcggaagcttactctgtactggcgttaagcttcctggatgctgatctctgatccttagttcgaaattggttggttcattcctggtgaacagatggggaaactgaggctcagagagggtggtaagggcttgctcccctcttcctgtggcagccccagtgcccctgcgcccacccacactggacatcagccccgaggtatagagcagctcatctgctcatccaagatcagcctggcccattaggagattggagattagtgattagcatctgcgtcaacctccctgtgggggttgggcagaagctctgaggggggacagacaggcagaggggcgccaatcaggtgaggcagcagcctagcaggtgccttgggaactgaatacgcagcacccttccattattcattcccaagcccaggatccactagccgggagctcagccgggaaagggatccccaagcgggccacccggctgcccaggtaatgccctctgtgctaaaccagggactgaatgggactttggctgaggtgagatggctagaccagctttgggccttctcaggggagacagggagagagtgagggaaataaagcacccttcctttccaaaaaagcaggatccagctgccctctgacaagggattgtgtggggtggggtggggggacccgctgaggcccttgaggtggatgggaggtgccacagtgagacctgggtctgacaccaccaacttgcctcagtttacccatctggaaccaaaggggacaggtgatgtacccataatgtgcttgctcaaagtctgtggttggacgtgagcaccatgggcaggccagagggcatttatgtaagaccaagacactttttatagcagatcactcaaagtcctgcctccctgtgcctccatttcccccatctgttccagctgtctaaaacagctggagttagggtaaagggtaaaggagtacaggctgtggagtccagcagactgattctcacagctaatgtacatggtggctaggccaggtccattccctgttccctgcctcagtttccccacctgtgaggcatggggccccgatctcagtgatcttcagaacccatgcagtcttactgtgctgcaggcctatgatttctgtagggctatagccaggcctggcgatccgcctgcttgggcaggccccccctcccccactgccccttccacggaggagcccagaataggtttctatttgggctgcagctccagctggctggtggcgggctgggaggcaggggcggggcaggcccgctgcccttgcctttgccctcggaccagctgcaaagactcagacactcagccagagacagcagcccctgccactgccccaccattaccccccatagagtccccaccagcaccatgccgggggtaccagggcctgggcctgagctggccgcagcccttgaggagcagttgggccgggcactggaggagctgcgggcggtggctgaagcaggccgggtggcagtgacccaggcagccgaggtagctgtagccaccgtggagccggtggcccgggcagctgaagagctgcgggcagagagagcagcactgagccggcggctggatgcactgagcaggcaggtggaggtgctgagcctacggctgggggtcccacttgtgtccggccttgagcctgagctggagcccagcgagctgctcctggctgccgccgaccccgaggccctctttcaggctgccgaggatgccgggacccccgtggcccacccacctgccttcagcacccgccgccgctcctccaccggcaccacccgcagcactagtctcgtaagtgcttctgggttggtgggaggggtagttttgagccaggctctgcctcctcttgactttaggtatgtcaccaccttctctgagcctcagtttatctatcttgacaggggactggggcactagtgctctaagactagggcaagagggtgccaggctccagccctgaggcatgtgtggcagctgccttggcagcccctggcatgacccaggccccagcccccagctccctgccgccctgcaccctggccagaccaagcctccctgaaacagctgccacctcagctctccttacccttatagcagacggagaggccctgccaggagaggaagggccataatagttggcttggggccttgtcttcaaggggctagggagatgccctgggagggctgcagggctagagactccttagaggatggtttccagcaggggcgaggcagggggaggtggtacagaggagagcttcatagaggtcttggctcagggcagccccagtcagacacctggtcaggagcctacaggccccgggccagccctcttggcaaggtagcaggcagatggggggcaacatgtgctgcctgggcactggcccaggaggacctaggcctcgggaactggcagcacagagcagagcctgcctgggagggggctgggaacaaagcagcaaaatgaactaaggttcaggagttaggctgccttcagctcagatcccaggctgcatcacacttagagagagactgtgggcaagtcagttagctgccctgagcctcagtttccccttctgttttttttttttttttttccggtcttgttttctttgcaacagggtcttactctcttgcccagactggagtgcagctgcatgatcatagctctctgcagcctctaactcctgggctcaagtaatcctcctacctcagctttctgagtaggtgggactacaggtgcacaccaccatgcctagctaattttttatttttgtttttgtagagatgcggtctcgctatgttacccaggttggtctcaaactgctggcaacaagtgatccctcccacctcggcctcccaaactgttgacattacaggcatgagccactgcgcccggccttcccttctgttaaatagggacagtaaagtccctagtgtttatacaacacttactatggactggaaatcatcattattatcactatccattgtattaatacaattcggggtacgtgggaagccctacaacaaaactgtcagtgcctcttccctgactgacgctgacatggccatctttgggcaggcaggctggcaggctagtggttatttccaaggcgtgccagcaaccctaggatctgcttccctatccattggagacatgatgagtttcacccatacccctgcttaaagtccatgccctctccccaccctgcagatggaagcagagccagcagagcctctcgctgcagcagtggaagcggccaatggggctgagcagacccgagtgaacaaagcaccagaagggcggagccctctgagcgctgaggagctgatgactattgaggatgaaggagtcttggacaagatggtatagccagatccggtgggctgggggttggcagaggccagcaggcaccaggtaggcaatgatgggctctatatgcagctggatcagagcacggactttgaagagcggaagctcatccgggctgcacttcgtgagctccgacaaaggaagagaggtagagagccagttgccctaccctagatccagctgccccattccccagctgctcccctcatactctggggtccatttgtggacaccccagcttaataactgccctacccagcttctccttctctagacccagcagttcccttggctattccctgctggatccagctgctccttccctagctccttctctcccgctggtgaccccagttattctccccaaccagcttctcttctccttcctagacccagatactccctcccgcagctactctctccttggatccagttgcctctcaaagtactgtcaacgactccttccctgaatccagatactccttctccctgctgctcctctctccctgaagtccattgatggccatcttagcctctgccccatccagcttcccttttcctggacacaactacttcctcccccagatagttcttccctggacacatctattcattcccttagattctgggttcaattgcttctcctctcaaacactctcaattactcctctgaatctagctgcttctgccagggcccactgatggccaccccagtctctatctctacccacctacttctattttaagcccagttaacccccttcactagcttctctcccagctactcttcccctggatcagattgcttctcagatcccatcaattgctcccttcctggatctaaatattcctgcctccagctgctcttctcctccaaccaaagacctgctgatggcccacccagctacttcctcactcagcttctccttccttggactcagctaccccctcactagatctagatacccctcctgacttagctactcatgcctatagaaaccctttttggatccatacccctttgagtttagctactccgtattctctagtttctgcctgagtccatcaaacccttcccacactccattccctgtcaagttatggctgtcccctcaccccagctgctcctagagaggcccttgttacctgtgtcattcatgtttctaacaagccaccctccaccccgtcttgtgtgccccatgcacctgtgcatctgtgctgtgtgggtgttggtggcccttttgcgcatgcatggggcatcccctgcccagaccagcgggacaaggagcgggaacggcggctgcaggaggcacggggccggccaggggaggggcgcggcaacacagccactgagaccaccacgaggcacagccagcgggcagctgatggctctgctgtcagcactgttaccaagactgagcggctcgtccactccagtaaggggccaaatggggccggcccagggctcagggtgggaacacatcctcccccagccccctgtgcctttcacatccttctcatcccctgcccctgcagatgatggcacacggacggcccgcaccaccacagtggagtcgagtttcgtgaggcgctcggagagtaaggccacctggtgtcgccctgtgcctgcctgcctgtccgcccacctcctccggctcttccttgagctctctctccgtgtcttcaactgtgccgtcactttctcttctctgcctgcggctatcaccacccctccatacagcctcccatcccatctcctgatgtccagcccaggccctcacctggtgccccttccccttttttgcagatggcagtggcagcaccatgatgcaaaccaagaccttctcctcttcctcctcatccaagaagatgggcaggtgagcaccagcacccaatccctgaccatagaggagtcagtgccacaggggacctaactgcaaacccgttttacagaggggtgggctgggcacagtggctcttgcctgtaatcccagcactttgggaggccgaggtgggcggatcacttgaggtcaggagttcaagaccagcctggccaacatggtaaaacctcatctctactaaaaatacaaaaattagccgggcgtggtggcaggcacctgtaatcccaactactggggaggccgaggcacaagaatcacttgaacctgggaggcggaggttgcagtgagctgagatcactccactgcactccagtctgggcaacagagcgagactcagtctcaaaaataaatagataaataaataaataaataaataaataaataaataaaacagaggggtagactgggatgctgggaggtaataggtctatagccagggaggggcaaagtgagagttaaggatcctgctctccttgggatctcattttattctcaaccacaccacaggagaggtggatgctcagggaggccagtgagttgcttaggggctcacatctctgagtggctgcaatagcattgaacacttacagaggcctacctaccacactgagctgcctggtggcactgccacttcccagtatctgcaaaccatgtcccaggtcacacagcacctttataccttagccccatgagaaaggagggtacccccatgtaacagaggctgttggggctggcagaaagcaggaacaggatcagaatccaggatgagaaccaaaggggtccagagactctgaatcagagagaccttgttcaagttctagttccgcccatcacgtcctctgaaatcttaggcaagttactgccagaggtctcagtttcctcacctttagtggaattggtaaggcccctccctgctcttgtgaagtttaaaatggcacacaggaaaggatcaacagagatgaattattattattactattattatgctagtcatcatttttattatcggatagtgcccagaagctgaactcccctgtaacttgagggtacaatgaggcttctcagagaactactcgtgggtgggggagggggaggcggaaacctgttgaaaaccttgctgtcatttgagactcagtgtactcctctaaaatgcgtgtgatgaggacgcctccctccctggcaggcgtttgtggcagtggagatactagtgtgctacaagaccccccctcctcctcgcgagtggtggtccaggctggggagcagccctgctctccctgcctaacatgcgcctccccaacccctagcatcttcgaccgcgaggaccaggccagcccacgggccggcagcctggcggcgctcgagaaacggcaggccgagaagaagaaagagctgatgaaggcgcagagtctgcccaagacctcagcctcccaggcgcgcaaggccatgattgagaagctggagaaggagggcgcggccgggtgagctgcagaagtgggctgggcagtggggggcggggcgtgataggcagtggggggcggggcttgatagttggcccggcagaggcgggaagaccgcgcggctagatctgtggtgcaaaggcccgaaggtcatggaaggcggggcctgggatccactgggtgggcccaccgaggcatgccccttatagtcgtgtgacctggtcctgacaccgcccctacagcagccctggcggaccccgcgcagccgtgcagcgatccaccagcttcggggtccccaacgccaacagcatcaagcagatgctgctggactggtgtcgagccaagactcgcggctacgaggtgagccccgggaggccagggggcctggaggcctccccagaccccagctcaacacctccttcttagcagagctcctattacccagtacacttcctgccactgtgtggcctcacagggaacatggaaaggctcttggggtgaggaaactgaggctcaaagaggacacaaggcaagccctagattccagaatcagtgatgaagtaacagggcctcttgggtggtgggcagggttcaaggccggatcccactcttggagtcccctccttgttgctctgtaggaggccctgagtcaatttctctaaatgagggaaggagtgatgaggcatgaccatagccttagctgggtggcgctgggcctctcagtagctctgtcccttgaaattgcaaatatgggagttgacaggctgacttggaggaggctcatgttccaactattcactcattgtgcaagctacggggcctctttgtgcccagtgccctaggtctggaataacagaatgctgaggggtagacagcaggggggagttgcccccaggttcctgaccagtcctcctacggcttatagcacgtcgacatccagaacttctcctccagctggagtgatgggatggccttctgtgccctggtgcacaacttcttccctgaggccttcgactatgggcagcttagccctcagaaccgacgccagaacttcgaggtggccttctcatctgcggagtaagtgtgggccctggccctgctaatgttgctgcacatctggggctggacatcgggaccaggcccagttgccctgagaacccctggagcgggccagccacattgtcagtcagcggctgagacccccttccccagagagtccccgtccttctccatccccacccccccgctgctgagcgtgccaggtgcccgccggaacgaaggagccgcaggccggcctaccagcccgggccaaagcccaccaggtggccctgtccatatcccctccatcctccctctgcccccttctccctctctctccctttctctgtcctgctctcctcccactatcaccagagcttcctgctcccacgggatcccggctggagattccaaaaggaggctcctggcccgggcaccgtgcccgcccagcctatatagtgctgccagaggcttatataggacctcagcaagccctccactttggaatcgttgccccgtctgctcacctcaccctcagcacccttctccatctgtcttcccttctttccccttctctttctggtttccctcaaatttcttcctcctcctccttctcctcttcctcctccccccacctcctctcacgcctccctcaccccctctccccggggcacagccctcctctccaaccttggtgccaacgccatcgcccccaccccgcgttcccgcttgcccctagagttctctgcacctgtgactggtttggcccccacccttgtctgcattgcacaccattagtgatgggtagtgagcggcacgtccacagtggggaggaggcatgcggggggctggcagactgcagcactggaatcgtaattgaactcatgtctctgtgtgtgtgtgtgtatgtgtgtgtgtctctgtttcctcccctctctcttctctgcctcttccctctcttccccacccggggccctggcctcctgcccccgtcccccaccccttcccggccccctaccctccccaggacccatgcggactgcccgcagctcctggatacagaggacatggtgcggcttcgagagcctgactggaagtgcgtgtacacgtacatccaggaattctaccgctgtctggtccagaaggggctggtaaaaaccaaaaagtcctaacccctgctcggggccccacggtgagaaacgccgcctctaccacctgccccgtttcaccagaatctgctcagcaaggccagagagggtccagggaggcgggtgggggaagtaaggggggcatttagtcaagccagaggagccagacatagccctgtcttctggcagttcagggcccagcaggtgagaccattctaaatgggcagtgatgacccaggtgggcagcactgtgatgggggaagcccaggggagatgcctgacccaggctgcaggtctgggccccccatctgaaaaaagtgcaaactaagctgggatctgaacaagttcaggctaaaggagggagagggagttccaggcagaggaatcagcctaggcttagcagggcaagagagctggagagcacagcacatcaggaagggaagaaacttgagtctggatatgagggaggagggggccacagttagaagtttgaccttctggccgagcacggtggctcatgcctgtaatcccagcactttgggaggccaaggtgggcagatcacgaggtcatgagttcgagaccagcctgaccaacatggtgaaaccccatctctactaaaaatacaaaaattagccaggcgtgtggcgcacacctgtaatcctagcgactcaggaggctgaggtaggagaatcacttgaacccaggaggcgaaggttgcaatgagctgaaatcatgccactgcactccagcctgggtgacagagcgagactccatctcaaaaaaaaaaaaaaaaaaaaaaaagtttgaccttcctcctgaggacaacaggagttataaagggtttccaaacagagaagggatggatatagcattctaggaccttcctcggatgaggcttggatgagagatgggatggactagatgactggaatagcttaagagctagagagacaggcttcccaatagatctggtttggagagggagagggaaggtcaagaagtctgccaggctcctgtgtgggcactggggagttggtggtgccatactccaaagtggggagctcaggagcaggaccagttcaacaggaagatgtttctggctggggactctggatcctaagccagctgtggcatttcctctctggtcacctcacctcagtaccaaagtaaagaattcagatcctaaactaactaccccattacagacaaggagctcagagagagacgtgggctaagactgtcctgggggtgggagggagagggaagatggttaggtcagagctggggccagaaactgagactccaaactccccacttagtggctgttttccttgccccatcactgtgttcccgcccattttgtagagaggattgaaaatagaggcccagaaggagcaaggggattggctgaaggaatgtgagtcagtgacaggtaggggcacactcagatgcccctcagggcctggagccattgtggggggcagtccacatgtgcacacacacactcagagaaggagcacagatgagtggcggatgggcttggtgctatctccagatcatatatggacttaggagctgctgcccagcaagccagcttggagggagaggggcccagcccagccctgatccagttggaaagtgtgactcagccgtgctgttgctcaagttgcctggtgtttggcctgtcactggggcagcctgagccctgagccctgagccccagtgtaaacaatggctttataaggtctccagggaagggagtggggcgggagggagcaccaggttggagagggcggtcgggatccccaggacgatagccacagctggaagaagcttcagagagaggctgcctttgcatcatggtacagctcgggaaacaagcccagtctgggatagggatgaccctaggggcacgtggcacatcagcagcagacccagaaccctctcactcatcctaaattcttgtaaggtctcaaatgagatagagaataactgtcctgttctaaagagggggaaacagtcatagaaaagggccttatctagcacccacaactggttagggatacagtctggactaaaacagaggtgttcggtgttctgcctcccaggtttcttctctgaaggagtccaggtgagctgggggtaggcccagccctaccacagttctgagtttgtccataagggcacgagatgggaggtggtcttgggttctcaggtgtcttgagaataaggagcaattgttgccattatgccttccctgccataggaaactcattcagcaacattgaatgcttgctatgtcccaggtatggcagataggagggatcaaggcagaagaggtcttgctctgggggttgagggacaggggaaaaggagccagagagcagactccagcttcagagctctgggagctgtcagttgcttaataggcacaacccactcactccagagtggggaaaaggctttgccaacacccagaactgggggcctgggtcccatgcggcctagcctgcacttactaagccatggggcttgaaacaaatggctcctctgctctgtgactcagtttccttatctgtgaagggcagctagcattctgaaggatggccagaagggtggtccccccgagcatggcatagatggtccattggtattggctgggatcctcatctgcctcctctgctctacccaaggcaggtgataagggttagagaacccctctgctgcccacacgttccctggcctccatctccagcagcagggttatccccaccccctgtcaaagaataggggtccctgggcctctcaacaggaagtaccagatcaggcagctagcagacaatcatcggtggaccacagggccactagagtgagacctatccatagataaagattggccagtgatgaagcccatctgggtgcaaaggccgagctgagaggcttctaccaactggagtgtgccagtgagggtgagcagaaggtggtctccagggagaacatgggcagggtttggagccagcacctccccagggttggaggaagcagacccaggacctgcctgactgggatggggctctcttctgccatctccgcctccacctgcctagctctgctcccccgccccgagagatgcctccaggcttgggtagatgaagccaggggcttcctgccttcctggaaggcttttccctgtctggagtttatgaaagaccagcaggcaatgcggcaataaaaaagaccttggggtagaggggcgccacgagaggcgggtctggcgctgacatccaaccccgtgccccctccctgcaggatgctggtggactgtgtgcccctggtggaggtggacgacatgatgatcatgggcaagaagcctgaccccaagtgtgtcttcacctatgtgcagtcgctctacaaccacctgcgacgccacgaactgcgcctgcgcggcaagaatgtctagcctgcccgcccgcatggccagccagtggcaagctgccgcccccactctccgggcaccgtctcctgcctgtgcgtccgcccaccgctgccctgtctgttgcgacaccctcccccccacatacacacgcagcgttttgataaattattggttttcaacg

SEQ ID NO: 14184 - DNA, 3560 bp, Homo sapiens
agaatccaggggacggttgctgagcgggcctgggacagcgggtcgcggcacctccggcctgcgcgtgtctaatccgtctgtcgggtcccgaaagagctaagccgagcctgcgccggacgggtgggctggactgagagaattctctgagctggtgacaggtgccacaggcactggggatctcaccagaaaggaaccgacggagctaggggccagcgagatggcggacgaggccttagctgggctggatgagggagcccttcggaagctgctggaggtcacagcagatctggcagagcggcggcgcatccgctcagccatccgggaactgcagcggcaggagctggagcgcgaggaggaggccctggcatccaagcgtttccgtgccgagcggcaggacaacaaggagaactggctgcacccacatcctccacgacctggccatggcagtggtggttacagtcatgatgtctctgcagctctcagcagcgggaagctgagcagcgggctgccctggcacggctggcagggcagctggagtccatgaacgatgtggaggaattgactgcactgttgcgaagcgctggtgagtatgaggagcgcaagctgatccgagctgccatccgccgtgtacgggctcaggagattgaggctgccaccttggctgggaggttgtacagcgggcgtcccaacagtggctcaagagaggacagcaaggggctagcggcacacaggctggaacagtgtgaggtgccagagcgagaggaacaggaacagcaggcagaggtttcaaagccaacccccacccctgaaggcaccagccaggatgtgaccacagtgacactcctgctgcgagccccacctgggagcacatccagctcacctgcctcacccagcagttcacccacccctgcctctcctgagcctccattggagcctgccgaggcccagtgccttacagctgaggttccaggcagcccagagccaccccccagcccacccaagaccaccagccctgagcctcaggagtctccaacgctccccagcactgagggccaggtggtcaacaagcttctgtctggccccaaagagacccctgctgcccagagccccaccagaggcccctctgacaccaagagagcagacgtggctggaccccgaccctgccaacgctccctgtcggtgctcagcccccgccaaccagcccagaaccgagagtccaccccccttgccagcggaccttcctcattccagcgggctggctctgtgcgggatcgtgtccacaagttcacatctgattctcctatggctgctaggctccaggatggcacaccccaggctgccctaagtcccctgacccccgcaaggctcctgggcccctccctcaccagcaccacccctgcctcctcctccagcggctcctcctctcggggccccagtgatacctcctcccggttcagcaaggagcaacgaggagtagcccagcccctggcccagcttcgaagctgcccccaggaggagggccccagggggcggggcttggctgctaggccccttgaaaacagagcaggggggcctgtggcacgttcagaggagcctggtgccccgctgcccgtggccgtcggcactgccgagccagggggcagtatgaagaccacattcaccatcgagatcaaggacggccgtggccaggcctccacaggccgggtgctgctgcccacaggcaaccagagggcagaactgacactggggctgcgggcgcccccgaccctactcagcaccagtagtgggggcaagagcaccatcacccgtgtcaacagccctgggaccctggctcggctgggcagtgtcactcatgtcaccagcttcagccatgccccccccagtagccgaggaggctgcagcatcaagatggaagcagagccagcagagcctctcgctgcagcagtggaagcggccaatggggctgagcagacccgagtgaacaaagcaccagaagggcggagccctctgagcgctgaggagctgatgactattgaggatgaaggagtcttggacaagatgctggatcagagcacggactttgaagagcggaagctcatccgggctgcacttcgtgagctccgacaaaggaagagagaccagcgggacaaggagcgggaacggcggctgcaggaggcacggggccggccaggggaggggcgcggcaacacagccactgagaccaccacgaggcacagccagcgggcagctgatggctctgctgtcagcactgttaccaagactgagcggctcgtccactccaatgatggcacacggacggcccgcaccaccacagtggagtcgagtttcgtgaggcgctcggagagtaaggccacctggtgtcgccctgtgcctgcctgcctgtccgcccacctcctccggctcttccttgagctctctctccgtgtcttcaactgtgccgtcactttctcttctctgcctgcggctatcaccacccctccatacagcctcccatcccatctcctgatgtccagcccaggccctcacctggtgccccttccccttttttgcagatggcagtggcagcaccatgatgcaaaccaagaccttctcctcttcctcctcatccaagaagatgggcagcatcttcgaccgcgaggaccaggccagcccacgggccggcagcctggcggcgctcgagaaacggcaggccgagaagaagaaagagctgatgaaggcgcagagtctgcccaagacctcagcctcccaggcgcgcaaggccatgattgagaagctggagaaggagggcgcggccggcagccctggcggaccccgcgcagccgtgcagcgatccaccagcttcggggtccccaacgccaacagcatcaagcagatgctgctggactggtgtcgagccaagactcgcggctacgagcacgtcgacatccagaacttctcctccagctggagtgatgggatggccttctgtgccctggtgcacaacttcttccctgaggccttcgactatgggcagcttagccctcagaaccgacgccagaacttcgaggtggccttctcatctgcggagacccatgcggactgcccgcagctcctggatacagaggacatggtgcggcttcgagagcctgactggaagtgcgtgtacacgtacatccaggaattctaccgctgtctggtccagaaggggctggtaaaaaccaaaaagtcctaacccctgctcggggccccacggatgctggtggactgtgtgcccctggtggaggtggacgacatgatgatcatgggcaagaagcctgaccccaagtgtgtcttcacctatgtgcagtcgctctacaaccacctgcgacgccacgaactgcgcctgcgcggcaagaatgtctagcctgcccgcccgcatggccagccagtggcaagctgccgcccccactctccgggcaccgtctcctgcctgtgcgtccgcccaccgctgccctgtctgttgcgacaccctcccccccacatacacacgcagcgttttgataaattattggttttcaacg

SEQ ID NO: 14185 - DNA, 11256 bp, Homo sapiens
aaagactcagacactcagccagagacagcagcccctgccactgccccaccattaccccccatagagtccccaccagcaccatgccgggggtaccagggcctgggcctgagctggccgcagcccttgaggagcagttgggccgggcactggaggagctgcgggcggtggctgaagcaggccgggtggcagtgacccaggcagccgaggtagctgtagccaccgtggagccggtggcccgggcagctgaagagctgcgggcagagagagcagcactgagccggcggctggatgcactgagcaggcaggtggaggtgctgagcctacggctgggggtcccacttgtgtccggccttgagcctgagctggagcccagcgagctgctcctggctgccgccgaccccgaggccctctttcaggctgccgaggatgccgggacccccgtggcccacccacctgccttcagcacccgccgccgctcctccaccggcaccacccgcagcactagtctcgtaagtgcttctgggttggtgggaggggtagttttgagccaggctctgcctcctcttgactttaggtatgtcaccaccttctctgagcctcagtttatctatcttgacaggggactggggcactagtgctctaagactagggcaagagggtgccaggctccagccctgaggcatgtgtggcagctgccttggcagcccctggcatgacccaggccccagcccccagctccctgccgccctgcaccctggccagaccaagcctccctgaaacagctgccacctcagctctccttacccttatagcagacggagaggccctgccaggagaggaagggccataatagttggcttggggccttgtcttcaaggggctagggagatgccctgggagggctgcagggctagagactccttagaggatggtttccagcaggggcgaggcagggggaggtggtacagaggagagcttcatagaggtcttggctcagggcagccccagtcagacacctggtcaggagcctacaggccccgggccagccctcttggcaaggtagcaggcagatggggggcaacatgtgctgcctgggcactggcccaggaggacctaggcctcgggaactggcagcacagagcagagcctgcctgggagggggctgggaacaaagcagcaaaatgaactaaggttcaggagttaggctgccttcagctcagatcccaggctgcatcacacttagagagagactgtgggcaagtcagttagctgccctgagcctcagtttccccttctgttttttttttttttttttccggtcttgttttctttgcaacagggtcttactctcttgcccagactggagtgcagctgcatgatcatagctctctgcagcctctaactcctgggctcaagtaatcctcctacctcagctttctgagtaggtgggactacaggtgcacaccaccatgcctagctaattttttatttttgtttttgtagagatgcggtctcgctatgttacccaggttggtctcaaactgctggcaacaagtgatccctcccacctcggcctcccaaactgttgacattacaggcatgagccactgcgcccggccttcccttctgttaaatagggacagtaaagtccctagtgtttatacaacacttactatggactggaaatcatcattattatcactatccattgtattaatacaattcggggtacgtgggaagccctacaacaaaactgtcagtgcctcttccctgactgacgctgacatggccatctttgggcaggcaggctggcaggctagtggttatttccaaggcgtgccagcaaccctaggatctgcttccctatccattggagacatgatgagtttcacccatacccctgcttaaagtccatgccctctccccaccctgcagatggaagcagagccagcagagcctctcgctgcagcagtggaagcggccaatggggctgagcagacccgagtgaacaaagcaccagaagggcggagccctctgagcgctgaggagctgatgactattgaggatgaaggagtcttggacaagatggtatagccagatccggtgggctgggggttggcagaggccagcaggcaccaggtaggcaatgatgggctctatatgcagctggatcagagcacggactttgaagagcggaagctcatccgggctgcacttcgtgagctccgacaaaggaagagaggtagagagccagttgccctaccctagatccagctgccccattccccagctgctcccctcatactctggggtccatttgtggacaccccagcttaataactgccctacccagcttctccttctctagacccagcagttcccttggctattccctgctggatccagctgctccttccctagctccttctctcccgctggtgaccccagttattctccccaaccagcttctcttctccttcctagacccagatactccctcccgcagctactctctccttggatccagttgcctctcaaagtactgtcaacgactccttccctgaatccagatactccttctccctgctgctcctctctccctgaagtccattgatggccatcttagcctctgccccatccagcttcccttttcctggacacaactacttcctcccccagatagttcttccctggacacatctattcattcccttagattctgggttcaattgcttctcctctcaaacactctcaattactcctctgaatctagctgcttctgccagggcccactgatggccaccccagtctctatctctacccacctacttctattttaagcccagttaacccccttcactagcttctctcccagctactcttcccctggatcagattgcttctcagatcccatcaattgctcccttcctggatctaaatattcctgcctccagctgctcttctcctccaaccaaagacctgctgatggcccacccagctacttcctcactcagcttctccttccttggactcagctaccccctcactagatctagatacccctcctgacttagctactcatgcctatagaaaccctttttggatccatacccctttgagtttagctactccgtattctctagtttctgcctgagtccatcaaacccttcccacactccattccctgtcaagttatggctgtcccctcaccccagctgctcctagagaggcccttgttacctgtgtcattcatgtttctaacaagccaccctccaccccgtcttgtgtgccccatgcacctgtgcatctgtgctgtgtgggtgttggtggcccttttgcgcatgcatggggcatcccctgcccagaccagcgggacaaggagcgggaacggcggctgcaggaggcacggggccggccaggggaggggcgcggcaacacagccactgagaccaccacgaggcacagccagcgggcagctgatggctctgctgtcagcactgttaccaagactgagcggctcgtccactccagtaaggggccaaatggggccggcccagggctcagggtgggaacacatcctcccccagccccctgtgcctttcacatccttctcatcccctgcccctgcagatgatggcacacggacggcccgcaccaccacagtggagtcgagtttcgtgaggcgctcggagagtaaggccacctggtgtcgccctgtgcctgcctgcctgtccgcccacctcctccggctcttccttgagctctctctccgtgtcttcaactgtgccgtcactttctcttctctgcctgcggctatcaccacccctccatacagcctcccatcccatctcctgatgtccagcccaggccctcacctggtgccccttccccttttttgcagatggcagtggcagcaccatgatgcaaaccaagaccttctcctcttcctcctcatccaagaagatgggcaggtgagcaccagcacccaatccctgaccatagaggagtcagtgccacaggggacctaactgcaaacccgttttacagaggggtgggctgggcacagtggctcttgcctgtaatcccagcactttgggaggccgaggtgggcggatcacttgaggtcaggagttcaagaccagcctggccaacatggtaaaacctcatctctactaaaaatacaaaaattagccgggcgtggtggcaggcacctgtaatcccaactactggggaggccgaggcacaagaatcacttgaacctgggaggcggaggttgcagtgagctgagatcactccactgcactccagtctgggcaacagagcgagactcagtctcaaaaataaatagataaataaataaataaataaataaataaataaataaaacagaggggtagactgggatgctgggaggtaataggtctatagccagggaggggcaaagtgagagttaaggatcctgctctccttgggatctcattttattctcaaccacaccacaggagaggtggatgctcagggaggccagtgagttgcttaggggctcacatctctgagtggctgcaatagcattgaacacttacagaggcctacctaccacactgagctgcctggtggcactgccacttcccagtatctgcaaaccatgtcccaggtcacacagcacctttataccttagccccatgagaaaggagggtacccccatgtaacagaggctgttggggctggcagaaagcaggaacaggatcagaatccaggatgagaaccaaaggggtccagagactctgaatcagagagaccttgttcaagttctagttccgcccatcacgtcctctgaaatcttaggcaagttactgccagaggtctcagtttcctcacctttagtggaattggtaaggcccctccctgctcttgtgaagtttaaaatggcacacaggaaaggatcaacagagatgaattattattattactattattatgctagtcatcatttttattatcggatagtgcccagaagctgaactcccctgtaacttgagggtacaatgaggcttctcagagaactactcgtgggtgggggagggggaggcggaaacctgttgaaaaccttgctgtcatttgagactcagtgtactcctctaaaatgcgtgtgatgaggacgcctccctccctggcaggcgtttgtggcagtggagatactagtgtgctacaagaccccccctcctcctcgcgagtggtggtccaggctggggagcagccctgctctccctgcctaacatgcgcctccccaacccctagcatcttcgaccgcgaggaccaggccagcccacgggccggcagcctggcggcgctcgagaaacggcaggccgagaagaagaaagagctgatgaaggcgcagagtctgcccaagacctcagcctcccaggcgcgcaaggccatgattgagaagctggagaaggagggcgcggccgggtgagctgcagaagtgggctgggcagtggggggcggggcgtgataggcagtggggggcggggcttgatagttggcccggcagaggcgggaagaccgcgcggctagatctgtggtgcaaaggcccgaaggtcatggaaggcggggcctgggatccactgggtgggcccaccgaggcatgccccttatagtcgtgtgacctggtcctgacaccgcccctacagcagccctggcggaccccgcgcagccgtgcagcgatccaccagcttcggggtccccaacgccaacagcatcaagcagatgctgctggactggtgtcgagccaagactcgcggctacgaggtgagccccgggaggccagggggcctggaggcctccccagaccccagctcaacacctccttcttagcagagctcctattacccagtacacttcctgccactgtgtggcctcacagggaacatggaaaggctcttggggtgaggaaactgaggctcaaagaggacacaaggcaagccctagattccagaatcagtgatgaagtaacagggcctcttgggtggtgggcagggttcaaggccggatcccactcttggagtcccctccttgttgctctgtaggaggccctgagtcaatttctctaaatgagggaaggagtgatgaggcatgaccatagccttagctgggtggcgctgggcctctcagtagctctgtcccttgaaattgcaaatatgggagttgacaggctgacttggaggaggctcatgttccaactattcactcattgtgcaagctacggggcctctttgtgcccagtgccctaggtctggaataacagaatgctgaggggtagacagcaggggggagttgcccccaggttcctgaccagtcctcctacggcttatagcacgtcgacatccagaacttctcctccagctggagtgatgggatggccttctgtgccctggtgcacaacttcttccctgaggccttcgactatgggcagcttagccctcagaaccgacgccagaacttcgaggtggccttctcatctgcggagtaagtgtgggccctggccctgctaatgttgctgcacatctggggctggacatcgggaccaggcccagttgccctgagaacccctggagcgggccagccacattgtcagtcagcggctgagacccccttccccagagagtccccgtccttctccatccccacccccccgctgctgagcgtgccaggtgcccgccggaacgaaggagccgcaggccggcctaccagcccgggccaaagcccaccaggtggccctgtccatatcccctccatcctccctctgcccccttctccctctctctccctttctctgtcctgctctcctcccactatcaccagagcttcctgctcccacgggatcccggctggagattccaaaaggaggctcctggcccgggcaccgtgcccgcccagcctatatagtgctgccagaggcttatataggacctcagcaagccctccactttggaatcgttgccccgtctgctcacctcaccctcagcacccttctccatctgtcttcccttctttccccttctctttctggtttccctcaaatttcttcctcctcctccttctcctcttcctcctccccccacctcctctcacgcctccctcaccccctctccccggggcacagccctcctctccaaccttggtgccaacgccatcgcccccaccccgcgttcccgcttgcccctagagttctctgcacctgtgactggtttggcccccacccttgtctgcattgcacaccattagtgatgggtagtgagcggcacgtccacagtggggaggaggcatgcggggggctggcagactgcagcactggaatcgtaattgaactcatgtctctgtgtgtgtgtgtgtatgtgtgtgtgtctctgtttcctcccctctctcttctctgcctcttccctctcttccccacccggggccctggcctcctgcccccgtcccccaccccttcccggccccctaccctccccaggacccatgcggactgcccgcagctcctggatacagaggacatggtgcggcttcgagagcctgactggaagtgcgtgtacacgtacatccaggaattctaccgctgtctggtccagaaggggctggtaaaaaccaaaaagtcctaacccctgctcggggccccacggtgagaaacgccgcctctaccacctgccccgtttcaccagaatctgctcagcaaggccagagagggtccagggaggcgggtgggggaagtaaggggggcatttagtcaagccagaggagccagacatagccctgtcttctggcagttcagggcccagcaggtgagaccattctaaatgggcagtgatgacccaggtgggcagcactgtgatgggggaagcccaggggagatgcctgacccaggctgcaggtctgggccccccatctgaaaaaagtgcaaactaagctgggatctgaacaagttcaggctaaaggagggagagggagttccaggcagaggaatcagcctaggcttagcagggcaagagagctggagagcacagcacatcaggaagggaagaaacttgagtctggatatgagggaggagggggccacagttagaagtttgaccttctggccgagcacggtggctcatgcctgtaatcccagcactttgggaggccaaggtgggcagatcacgaggtcatgagttcgagaccagcctgaccaacatggtgaaaccccatctctactaaaaatacaaaaattagccaggcgtgtggcgcacacctgtaatcctagcgactcaggaggctgaggtaggagaatcacttgaacccaggaggcgaaggttgcaatgagctgaaatcatgccactgcactccagcctgggtgacagagcgagactccatctcaaaaaaaaaaaaaaaaaaaaaaaagtttgaccttcctcctgaggacaacaggagttataaagggtttccaaacagagaagggatggatatagcattctaggaccttcctcggatgaggcttggatgagagatgggatggactagatgactggaatagcttaagagctagagagacaggcttcccaatagatctggtttggagagggagagggaaggtcaagaagtctgccaggctcctgtgtgggcactggggagttggtggtgccatactccaaagtggggagctcaggagcaggaccagttcaacaggaagatgtttctggctggggactctggatcctaagccagctgtggcatttcctctctggtcacctcacctcagtaccaaagtaaagaattcagatcctaaactaactaccccattacagacaaggagctcagagagagacgtgggctaagactgtcctgggggtgggagggagagggaagatggttaggtcagagctggggccagaaactgagactccaaactccccacttagtggctgttttccttgccccatcactgtgttcccgcccattttgtagagaggattgaaaatagaggcccagaaggagcaaggggattggctgaaggaatgtgagtcagtgacaggtaggggcacactcagatgcccctcagggcctggagccattgtggggggcagtccacatgtgcacacacacactcagagaaggagcacagatgagtggcggatgggcttggtgctatctccagatcatatatggacttaggagctgctgcccagcaagccagcttggagggagaggggcccagcccagccctgatccagttggaaagtgtgactcagccgtgctgttgctcaagttgcctggtgtttggcctgtcactggggcagcctgagccctgagccctgagccccagtgtaaacaatggctttataaggtctccagggaagggagtggggcgggagggagcaccaggttggagagggcggtcgggatccccaggacgatagccacagctggaagaagcttcagagagaggctgcctttgcatcatggtacagctcgggaaacaagcccagtctgggatagggatgaccctaggggcacgtggcacatcagcagcagacccagaaccctctcactcatcctaaattcttgtaaggtctcaaatgagatagagaataactgtcctgttctaaagagggggaaacagtcatagaaaagggccttatctagcacccacaactggttagggatacagtctggactaaaacagaggtgttcggtgttctgcctcccaggtttcttctctgaaggagtccaggtgagctgggggtaggcccagccctaccacagttctgagtttgtccataagggcacgagatgggaggtggtcttgggttctcaggtgtcttgagaataaggagcaattgttgccattatgccttccctgccataggaaactcattcagcaacattgaatgcttgctatgtcccaggtatggcagataggagggatcaaggcagaagaggtcttgctctgggggttgagggacaggggaaaaggagccagagagcagactccagcttcagagctctgggagctgtcagttgcttaataggcacaacccactcactccagagtggggaaaaggctttgccaacacccagaactgggggcctgggtcccatgcggcctagcctgcacttactaagccatggggcttgaaacaaatggctcctctgctctgtgactcagtttccttatctgtgaagggcagctagcattctgaaggatggccagaagggtggtccccccgagcatggcatagatggtccattggtattggctgggatcctcatctgcctcctctgctctacccaaggcaggtgataagggttagagaacccctctgctgcccacacgttccctggcctccatctccagcagcagggttatccccaccccctgtcaaagaataggggtccctgggcctctcaacaggaagtaccagatcaggcagctagcagacaatcatcggtggaccacagggccactagagtgagacctatccatagataaagattggccagtgatgaagcccatctgggtgcaaaggccgagctgagaggcttctaccaactggagtgtgccagtgagggtgagcagaaggtggtctccagggagaacatgggcagggtttggagccagcacctccccagggttggaggaagcagacccaggacctgcctgactgggatggggctctcttctgccatctccgcctccacctgcctagctctgctcccccgccccgagagatgcctccaggcttgggtagatgaagccaggggcttcctgccttcctggaaggcttttccctgtctggagtttatgaaagaccagcaggcaatgcggcaataaaaaagaccttggggtagaggggcgccacgagaggcgggtctggcgctgacatccaaccccgtgccccctccctgcaggatgctggtggactgtgtgcccctggtggaggtggacgacatgatgatcatgggcaagaagcctgaccccaagtgtgtcttcacctatgtgcagtcgctctacaaccacctgcgacgccacgaactgcgcctgcgcggcaagaatgtctagcctgcccgcccgcatggccagccagtggcaagctgccgcccccactctccgggcaccgtctcctgcctgtgcgtccgcccaccgctgccctgtctgttgcgacaccctcccccccacatacacacgcagcgttttgataaattattggttttcaacg

SEQ ID NO: 14186 - DNA, 2937 bp, Homo sapiens
aaagactcagacactcagccagagacagcagcccctgccactgccccaccattaccccccatagagtccccaccagcaccatgccgggggtaccagggcctgggcctgagctggccgcagcccttgaggagcagttgggccgggcactggaggagctgcgggcggtggctgaagcaggccgggtggcagtgacccaggcagccgaggtagctgtagccaccgtggagccggtggcccgggcagctgaagagctgcgggcagagagagcagcactgagccggcggctggatgcactgagcaggcaggtggaggctgccgaggatgccgggacccccgtggcccacccacctgccttcagcacccgccgccgctcctccaccggcaccacccgcagcactagtctcatggaagcagagccagcagagcctctcgctgcagcagtggaagcggccaatggggctgagcagacccgagtgaacaaagcaccagaagggcggagccctctgagcgctgaggagctgatgactattgaggatgaaggagtcttggacaagatgctggatcagagcacggactttgaagagcggaagctcatccgggctgcacttcgtgagctccgacaaaggaagagagacccagatactccctcccgcagctactctctccttggatccagttgcctctcaaagtactgtcaacgactccttccctgaatccagatactccttctccctgctgctcctctctccctgaagtccattgatggccatcttagcctctgccccatccagcttcccttttcctggacacaactacttcctcccccagatagttcttccctggacacatctattcattcccttagattctgggttcaattgcttctcctctcaaacactctcaattactcctctgaatctagctgcttctgccagggcccactgatggccaccccagtctctatctctacccacctacttctattttaagcccagttaacccccttcactagcttctctcccagctactcttcccctggatcagattgcttctcagatcccatcaattgctcccttcctggatctaaatattcctgcctccagctgctcttctcctccaaccaaagacctgctgatggcccacccagctacttcctcactcagcttctccttccttggactcagctaccccctcactagatctagatacccctcctgacttagctactcatgcctatagaaaccctttttggatccatacccctttgagtttagctactccgtattctctagtttctgcctgagtccatcaaacccttcccacactccattccctgtcaagttatggctgtcccctcaccccagctgctcctagagaggcccttgttacctgtgtcattcatgtttctaacaagccaccctccaccccgtcttgtgtgccccatgcacctgtgcatctgtgctgtgtgggtgttggtggcccttttgcgcatgcatggggcatcccctgcccagaccagcgggacaaggagcgggaacggcggctgcaggaggcacggggccggccaggggaggggcgcggcaacacagccactgagaccaccacgaggcacagccagcgggcagctgatggctctgctgtcagcactgttaccaagactgagcggctcgtccactccaatgatggcacacggacggcccgcaccaccacagtggagtcgagtttcgtgaggcgctcggagagtaaggccacctggtgtcgccctgtgcctgcctgcctgtccgcccacctcctccggctcttccttgagctctctctccgtgtcttcaactgtgccgtcactttctcttctctgcctgcggctatcaccacccctccatacagcctcccatcccatctcctgatgtccagcccaggccctcacctggtgccccttccccttttttgcagatggcagtggcagcaccatgatgcaaaccaagaccttctcctcttcctcctcatccaagaagatgggcagcatcttcgaccgcgaggaccaggccagcccacgggccggcagcctggcggcgctcgagaaacggcaggccgagaagaagaaagagctgatgaaggcgcagagtctgcccaagacctcagcctcccaggcgcgcaaggccatgattgagaagctggagaaggagggcgcggccggcagccctggcggaccccgcgcagccgtgcagcgatccaccagcttcggggtccccaacgccaacagcatcaagcagatgctgctggactggtgtcgagccaagactcgcggctacgagcacgtcgacatccagaacttctcctccagctggagtgatgggatggccttctgtgccctggtgcacaacttcttccctgaggccttcgactatgggcagcttagccctcagaaccgacgccagaacttcgaggtggccttctcatctgcggagacccatgcggactgcccgcagctcctggatacagaggacatggtgcggcttcgagagcctgactggaagtgcgtgtacacgtacatccaggaattctaccgctgtctggtccagaaggggctggtaaaaaccaaaaagtcctaacccctgctcggggccccacggatgctggtggactgtgtgcccctggtggaggtggacgacatgatgatcatgggcaagaagcctgaccccaagtgtgtcttcacctatgtgcagtcgctctacaaccacctgcgacgccacgaactgcgcctgcgcggcaagaatgtctagcctgcccgcccgcatggccagccagtggcaagctgccgcccccactctccgggcaccgtctcctgcctgtgcgtccgcccaccgctgccctgtctgttgcgacaccctcccccccacatacacacgcagcgttttgataaattattggttttcaacg

SEQ ID NO: 14187 - DNA, 6935 bp, Homo sapiens
cagaatccaggggacggttgctgagcgggcctgggacagcgggtcgcggcacctccggcctgcgcgtgtctaatccgtctgtcgggtcccgaaagagctaagccgagcctgcgccggacgggtgggctggactgagaggtgggtgtgcggacctcgggggggatcctggtgctgccccaacgtgtccgggggtggaacccggatgtctagacaggagttctggaacgtccagacctgggagcccccacccatacgagaggtctaagccatgggataaagttatgagactgttgggggaagacgcccccggattcctaagagactccacgccccacaggggcgctagtctgtggcggcagaaaccctggggaagctgccacagaatcctgaggcccctcacaatgtccggcgaccccagactgtgtgacagggagattggagaagagcagcggcagggatcttcttataatcccatgggtgtcctagattaggcattagggtcagctgccccatagaagaacagacatggggggaatcagaatgtccgcagaacctaaggctggtgaccactggacagtcttgaagaggtttaacccagacagagtaactaggtaagaggcaaggatcctaacaggcagagattgggaggttgacacctctgagcctaccaggatgggagggggaacaagcagtgacttgaacaggctgggacccacacaccccaactgtgtggagcggtaaccctcaccccccacccatgcaccgtatggggtgacttcccaagtgactgttctgaagagagggaagggatgattgaaagatgaatcaacaggaggtggggggcaggcctggggccacacattagtcagtcaccatacattaactaagcatccacagtgtgccagaccagggcccctcaaattccagacagacattagttggggctacaggaggaaggagagatctgcgctgggaggctgggccaggatttaggggtccattttgatgggcagcactggggcaagatggggctcttgcctctgtcactgagagtgttccaggcccttgagggcactttggaagggagcttcggaagccggagatgacgaagattttgattacatccttctctgccctctaagtctttggcttcctccttgctcagtgacaaatccttggccctctccaatcttctcagtttgcctgaaatccaggggttgggcaggtcagcttctgaaagcccttccaggtggggaattgaattctgtatgaattggcaggaggtgctgggtgcctggacacctggcttcaggaggtctggacagcagagctggctccaagaatcggaagacacagtgtaccttcctatacctgggggaatgacagtggtggtggcagcaagaactacgggttcagcccacagccagaagctgagcctgcggagtgggtgggggctgggtaggccctgtggatgggtgggtggggcaggaaactggagactggagtgcaccccctggtggtaagcacagcttgggtgggtcttgccaggccctggcttctcaatccaggtccctgccctccctgttttgaggtttagacaggatgagagtccatcccaggccacacagcagactggcggccaagctggcagggctggaaccagagaccccctaccctgggtttggtgagttttccagcaaaccaccctagggcagagggcagcttccagccaggagccacattataggatgggacagtaatggacgctcctaggttagagagggaaagtaaggcacagagcctaagtgcctgtggtttctggaagccccagcatgcctgattcatgtctgtcccctgcagaattctctgagctggtgacaggtgccacaggcactggggatctcaccagaaaggaaccgacggagctaggggccagcgagatggcggacgaggccttagctgggctggatgagggagcccttcggaagctggtaagtggccccatcacccactgtggggacaggaaagccaagccagagaggcagggtcaatccagggtacctctcagctgacaggaagaagtgatgggggaaaggtcaggaggagggggacatgggaacaggggtaggccagttccatgtggctgatgcagaggcccttgtggcatgtgcctgtccatgcctggtactgaagcctagtccctcccaaccctccacagccaccacctgtttaaacagtaactgctgtagactcgcccgtatgcagccacaggtgtggggaggctggatatgcctctccagagcaatagctcgggcaatgcccacccctggaagctggcccagtgataatggtagcagcaatgattaataatgccaaggcctggcagggggcaggctgggtactgggtataccatgtcacagaataatcacagcagctctgaaagcctgggcactgcgactcaagagagttaaaatcacctgctcaaggacacccatctaagaaggagctgtgccaaaatcccaaccccatagtgggccacgggggaccagagtcctgggaaagtcaaggctggacgaggccataagagagagacaggttttgtgggcccttatggattctgtggcttctcatctcatttttctactcttgagtctcagttcctctacctgtaaaatgaagggagggagggagatgtgtttgcacacaagctctaggtcctagagttggcatggggacagaatgaggcatggacccagatctcaggtggaggaaagatgagcccactccatcccctttcttgttcctcttcctgagagccctgtctacctccatgcacagaggccgtagggcaacccagtggggcagggctccttccccaaccccaaaggccaggcagcctgacctggaggaggggccagaggagctccatctcctcagtccctgacccttgtccatgggggtaaattaaagatttactttacctagaagacaagtgacccaccccactctcataccttcccccgcaggcagaggctggaaccaaccagcgtagcccagccactgggcagtgcccagctgctgccatgacctccccaaggcactctgcctgtatgttctcggaccagcgcattagactctctgggtgtctgcctctccactatcaccgcaggatgtgtgcagcctggaggggatgaggttaggtttccaaaggtgcccgccagtcagttcgaccttccctcaggaagtccaagtcccagtgggggtcgtagaggcagcacagtccaaaaagagggaatgccaggcctggttcccgcacatcctcatctcaaggtatccacaggcaggctcagggttcttcagccgccacctccctctcttaagcgaggctcgggcggcgctggaaaagagttttggagagaagctggagcagtggttgaatctctgggaaaggacagatgagaacctgccccggtctcgggatcggtgcctctcgaagtctttccgaccccgggagcggctcctccagcacccggcgcccgccattactgcgccccgcgcgccggcccggcccccgctggcctcgtggcaagaacgggggcgtcccgagccgggctcctccccgcggggccgggccatataaggaaaagctaggcccgctccgcccgccctgcgccccagcgtctggccgatttggggacgcgggcagtcgcttccggccccggctcccgcacattcttgaggattgggccggggatgggaggaatggggacgcctggggacttgcacgccgcgtgcccctccaccacccgccgggacgccctctgcctcggtcccgagttcgagttcgacctccgccactcagctgggtgtcctggggaccttggtttcttccctttagatccggacactgaagcaggcggtagcgggtgtcttcctacctggctaccccttcggcgcctagcgcgaggcagggtgggcgaggcgagggcggcgccctgcgagggagggcggtcgcagaacctgcgggccttcagcgccccctggcgaggcttccctccaccgccggcgggacccccatgggcaaccgggggagctgggactgaaagcctggagagccccctccgttgtgctgttggggagactgaggcccagtgagacctcagggcctgccaggcgttcccaacagcgagggcagagagtacacggagagccggctccccagggggaggaagcaccctctttcctcccgggagaatttcactgggcagtttcggaaaccgccccatccccttccccttccccctcggtagacaatggcgctttgtacttccttccctccctcccacagctccctccttacacagcggtggggcctgggcgggtggaactcgggacacacagaggagacactgtggtccaacctttgcctccaggcccaaagggaagggtcgtgccagagggtgaccagtggaatgaggttgtcagtctccagccttgcccacccactttgggggatcagagggaggctcccattttccagatggggacactgaagctccgggggttgtgctgtagaggtggccaagttcctacatcaggcttttgtcagagacaaggaccccatctccgagcccagagcactgagaatggggacctaggagacaaaaggctagcccttgcccctctgggcctctttaccctctgtacagaaggggctggaccctctgtcccctccagcccccagcctccaaatgtaccacagaaggctctaggcctgagacacagccagcaccgggggctggggagtgagcctcattccccccgcctctgctataaggcctccttaggcctcagagcatctctagtccaggctagaggggtctccaacacagtgccaggatccctgaggtccccaccatgacacacagaccccagtagcagagctatcttcagcctagggcaggccctggagtcagagagacctgggttcaaatcctggctcaggtcatttgaccatgagcaaatcacatgtcctccctggacttcaatctcctcatctgtcaaatgggaataacagtagtatctagggtttttgtgggcttaggacaagtagggggctcagcacagggtttgactcacaggctctccataaatgttactgatgcctcggggtatcctgcccttcccatttgcccccttgtctctctccctcctcctgactggctagaaccaagtatgggggtgatgcttattgcaactgcagctatgtacaggagaggccaagtcactgttcccaaccccacccactggcaaatgaaaaaaccaagacacagagagtttaagggatatgctcttgatcacccagccaggattggactagggctggaaccaactaagggctctggcctgagtttcagggggtcttctcataattcctcaggaatgtggagcctggagggctcttcccccaagactctccctgctctcttcagactaggacaagctggctcatggctgagttgggccagcccacactccctgctgaaaactatctccatcccatccccacccttgccacctggccttcccgctaagcagaaaggaatgacgggggggcgctaaaaagggagatgatagagggttctttggccctacccctgaatgatttggggggtggggacagaggaaatcaccccgcctttactggctcccgtctggttatcagacccacactggaggcttatctctgccactatcttccaggggaaccctgggccagtcctctctcccttgagccacggaggatctgtatgtagcaggtggctctacatggtggaggtgtgggggaggcaacaggattggctgactcactccagagaaggtgttctttcctgaacctggttagaccagtcacccccaatttcccgggaactgaggggttgagaaccggtagaagcagctgtcacccagggatgccctctataaggccctggggtggcccctagtgccagccaccttatatgtctgggggattggtcctcccactctgcaccctggcttcttccatggtggctaggtccaggccagtgcagtggggacaatagccctcagccaggcaggactcctgagcacctgtcctcagtttccccatctgtggatgaagcagtcaacccccagctgggctgtggtgtttggtgactagaccagggagcctcccttgctcagagggtggacttcatctgtcacctttccctctagggaccctgttagtgacccacagggtggcctccctcctcctcctacaatagctccctgacttttggggatctgggctctgagaggcaggaatcgagttgtagaaaggagtgcctggcttggcacctggcacaagtgggcagtttctggctgtccactcacagttgtgtgctctgtgaaccacaatgcaaagtggactacccaagatccctgaaacagtgggctgggtctacccccgggaccctgcgtgggcaggcaggcacgtgaagagcttgggacacagggagtggacacaggccacacattgtgccctaggcagagccgtgggcagctggtgccagccctccgcccctggcagccaaaatgacctgcctctcgcacccactgcagctggaggtcacagcagatctggcagagcggcggcgcatccgctcagccatccgggaactgcagcggcaggagctggagcgcgaggaggaggccctggcatccaagcgtttccgtgccgagcggcaggacaacaaggagaactggctgcagtgagtagcggggggtggaacatgcgggtgagaaggtgagtgtgagccctggctcagctcatgtgtgcaggcaggcgtgagcacaagtgtatctgtggattgcatgtgctaatggcagtacgtccacacacgcttctgga

SEQ ID NO: 14188 - DNA, 558 bp, Homo sapiens
cagaatccaggggacggttgctgagcgggcctgggacagcgggtcgcggcacctccggcctgcgcgtgtctaatccgtctgtcgggtcccgaaagagctaagccgagcctgcgccggacgggtgggctggactgagagaattctctgagctggtgacaggtgccacaggcactggggatctcaccagaaaggaaccgacggagctaggggccagcgagatggcggacgaggccttagctgggctggatgagggagcccttcggaagctgctggaggtcacagcagatctggcagagcggcggcgcatccgctcagccatccgggaactgcagcggcaggagctggagcgcgaggaggaggccctggcatccaagcgtttccgtgccgagcggcaggacaacaaggagaactggctgcagtgagtagcggggggtggaacatgcgggtgagaaggtgagtgtgagccctggctcagctcatgtgtgcaggcaggcgtgagcacaagtgtatctgtggattgcatgtgctaatggcagtacgtccacacacgcttctgga

SEQ ID NO: 14189 - DNA, 2882 bp, Homo sapiens
cattctaggaccttcctcggatgaggcttggatgagagatgggatggactagatgactggaatagcttaagagctagagagacaggcttcccaatagatctggtttggagagggagagggaaggtcaagaagtctgccaggctcctgtgtgggcactggggagttggtggtgccatactccaaagtggggagctcaggagcaggaccagttcaacaggaagatgtttctggctggggactctggatcctaagccagctgtggcatttcctctctggtcacctcacctcagtaccaaagtaaagaattcagatcctaaactaactaccccattacagacaaggagctcagagagagacgtgggctaagactgtcctgggggtgggagggagagggaagatggttaggtcagagctggggccagaaactgagactccaaactccccacttagtggctgttttccttgccccatcactgtgttcccgcccattttgtagagaggattgaaaatagaggcccagaaggagcaaggggattggctgaaggaatgtgagtcagtgacaggtaggggcacactcagatgcccctcagggcctggagccattgtggggggcagtccacatgtgcacacacacactcagagaaggagcacagatgagtggcggatgggcttggtgctatctccagatcatatatggacttaggagctgctgcccagcaagccagcttggagggagaggggcccagcccagccctgatccagttggaaagtgtgactcagccgtgctgttgctcaagttgcctggtgtttggcctgtcactggggcagcctgagccctgagccctgagccccagtgtaaacaatggctttataaggtctccagggaagggagtggggcgggagggagcaccaggttggagagggcggtcgggatccccaggacgatagccacagctggaagaagcttcagagagaggctgcctttgcatcatggtacagctcgggaaacaagcccagtctgggatagggatgaccctaggggcacgtggcacatcagcagcagacccagaaccctctcactcatcctaaattcttgtaaggtctcaaatgagatagagaataactgtcctgttctaaagagggggaaacagtcatagaaaagggccttatctagcacccacaactggttagggatacagtctggactaaaacagaggtgttcggtgttctgcctcccaggtttcttctctgaaggagtccaggtgagctgggggtaggcccagccctaccacagttctgagtttgtccataagggcacgagatgggaggtggtcttgggttctcaggtgtcttgagaataaggagcaattgttgccattatgccttccctgccataggaaactcattcagcaacattgaatgcttgctatgtcccaggtatggcagataggagggatcaaggcagaagaggtcttgctctgggggttgagggacaggggaaaaggagccagagagcagactccagcttcagagctctgggagctgtcagttgcttaataggcacaacccactcactccagagtggggaaaaggctttgccaacacccagaactgggggcctgggtcccatgcggcctagcctgcacttactaagccatggggcttgaaacaaatggctcctctgctctgtgactcagtttccttatctgtgaagggcagctagcattctgaaggatggccagaagggtggtccccccgagcatggcatagatggtccattggtattggctgggatcctcatctgcctcctctgctctacccaaggcaggtgataagggttagagaacccctctgctgcccacacgttccctggcctccatctccagcagcagggttatccccaccccctgtcaaagaataggggtccctgggcctctcaacaggaagtaccagatcaggcagctagcagacaatcatcggtggaccacagggccactagagtgagacctatccatagataaagattggccagtgatgaagcccatctgggtgcaaaggccgagctgagaggcttctaccaactggagtgtgccagtgagggtgagcagaaggtggtctccagggagaacatgggcagggtttggagccagcacctccccagggttggaggaagcagacccaggacctgcctgactgggatggggctctcttctgccatctccgcctccacctgcctagctctgctcccccgccccgagagatgcctccaggcttgggtagatgaagccaggggcttcctgccttcctggaaggcttttccctgtctggagtttatgaaagaccagcaggcaatgcggcaataaaaaagaccttggggtagaggggcgccacgagaggcgggtctggcgctgacatccaaccccgtgccccctccctgcaggatgctggtggactgtgtgcccctggtggaggtggacgacatgatgatcatgggcaagaagcctgaccccaagtgtgtcttcacctatgtgcagtcgctctacaaccacctgcgacgccacgaactgcgcctgcgcggcaagaatgtctagcctgcccgcccgcatggccagccagtggcaagctgccgcccccactctccgggcaccgtctcctgcctgtgcgtccgcccaccgctgccctgtctgttgcgacaccctcccccccacatacacacgcagcgttttgataaattattggttttcaacgatcctgactcctctctgcgtctcctgggggtggggagggggtttgaaccgaaggcagctccgcaaggtctccaactccagcagggatcctcagaggttcttcttccgacctcccaccccacccgcccgcagcaa

SEQ ID NO: 14190 - DNA, 2608 bp, Homo sapiens
cattctaggaccttcctcggatgaggcttggatgagagatgggatggactagatgactggaatagcttaagagctagagagacaggcttcccaatagatctggtttggagagggagagggaagatggttaggtcagagctggggccagaaactgagactccaaactccccacttagtggctgttttccttgccccatcactgtgttcccgcccattttgtagagaggattgaaaatagaggcccagaaggagcaaggggattggctgaaggaatgtgagtcagtgacaggtaggggcacactcagatgcccctcagggcctggagccattgtggggggcagtccacatgtgcacacacacactcagagaaggagcacagatgagtggcggatgggcttggtgctatctccagatcatatatggacttaggagctgctgcccagcaagccagcttggagggagaggggcccagcccagccctgatccagttggaaagtgtgactcagccgtgctgttgctcaagttgcctggtgtttggcctgtcactggggcagcctgagccctgagccctgagccccagtgtaaacaatggctttataaggtctccagggaagggagtggggcgggagggagcaccaggttggagagggcggtcgggatccccaggacgatagccacagctggaagaagcttcagagagaggctgcctttgcatcatggtacagctcgggaaacaagcccagtctgggatagggatgaccctaggggcacgtggcacatcagcagcagacccagaaccctctcactcatcctaaattcttgtaaggtctcaaatgagatagagaataactgtcctgttctaaagagggggaaacagtcatagaaaagggccttatctagcacccacaactggttagggatacagtctggactaaaacagaggtgttcggtgttctgcctcccaggtttcttctctgaaggagtccaggtgagctgggggtaggcccagccctaccacagttctgagtttgtccataagggcacgagatgggaggtggtcttgggttctcaggtgtcttgagaataaggagcaattgttgccattatgccttccctgccataggaaactcattcagcaacattgaatgcttgctatgtcccaggtatggcagataggagggatcaaggcagaagaggtcttgctctgggggttgagggacaggggaaaaggagccagagagcagactccagcttcagagctctgggagctgtcagttgcttaataggcacaacccactcactccagagtggggaaaaggctttgccaacacccagaactgggggcctgggtcccatgcggcctagcctgcacttactaagccatggggcttgaaacaaatggctcctctgctctgtgactcagtttccttatctgtgaagggcagctagcattctgaaggatggccagaagggtggtccccccgagcatggcatagatggtccattggtattggctgggatcctcatctgcctcctctgctctacccaaggcaggtgataagggttagagaacccctctgctgcccacacgttccctggcctccatctccagcagcagggttatccccaccccctgtcaaagaataggggtccctgggcctctcaacaggaagtaccagatcaggcagctagcagacaatcatcggtggaccacagggccactagagtgagacctatccatagataaagattggccagtgatgaagcccatctgggtgcaaaggccgagctgagaggcttctaccaactggagtgtgccagtgagggtgagcagaaggtggtctccagggagaacatgggcagggtttggagccagcacctccccagggttggaggaagcagacccaggacctgcctgactgggatggggctctcttctgccatctccgcctccacctgcctagctctgctcccccgccccgagagatgcctccaggcttgggtagatgaagccaggggcttcctgccttcctggaaggcttttccctgtctggagtttatgaaagaccagcaggcaatgcggcaataaaaaagaccttggggtagaggggcgccacgagaggcgggtctggcgctgacatccaaccccgtgccccctccctgcaggatgctggtggactgtgtgcccctggtggaggtggacgacatgatgatcatgggcaagaagcctgaccccaagtgtgtcttcacctatgtgcagtcgctctacaaccacctgcgacgccacgaactgcgcctgcgcggcaagaatgtctagcctgcccgcccgcatggccagccagtggcaagctgccgcccccactctccgggcaccgtctcctgcctgtgcgtccgcccaccgctgccctgtctgttgcgacaccctcccccccacatacacacgcagcgttttgataaattattggttttcaacgatcctgactcctctctgcgtctcctgggggtggggagggggtttgaaccgaaggcagctccgcaaggtctccaactccagcagggatcctcagaggttcttcttccgacctcccaccccacccgcccgcagcaa

SEQ ID NO: 14191 - DNA, 19628 bp, Homo sapiens
agcgtctggccgatttggggacgcgggcagtcgcttccggccccggctcccgcacattcttgaggattgggccggggatgggaggaatggggacgcctggggacttgcacgccgcgtgcccctccaccacccgccgggacgccctctgcctcggtcccgagttcgagttcgacctccgccactcagctgggtgtcctggggaccttggtttcttccctttagatccggacactgaagcaggcggtagcgggtgtcttcctacctggctaccccttcggcgcctagcgcgaggcagggtgggcgaggcgagggcggcgccctgcgagggagggcggtcgcagaacctgcgggccttcagcgccccctggcgaggcttccctccaccgccggcgggacccccatgggcaaccgggggagctgggactgaaagcctggagagccccctccgttgtgctgttggggagactgaggcccagtgagacctcagggcctgccaggcgttcccaacagcgagggcagagagtacacggagagccggctccccagggggaggaagcaccctctttcctcccgggagaatttcactgggcagtttcggaaaccgccccatccccttccccttccccctcggtagacaatggcgctttgtacttccttccctccctcccacagctccctccttacacagcggtggggcctgggcgggtggaactcgggacacacagaggagacactgtggtccaacctttgcctccaggcccaaagggaagggtcgtgccagagggtgaccagtggaatgaggttgtcagtctccagccttgcccacccactttgggggatcagagggaggctcccattttccagatggggacactgaagctccgggggttgtgctgtagaggtggccaagttcctacatcaggcttttgtcagagacaaggaccccatctccgagcccagagcactgagaatggggacctaggagacaaaaggctagcccttgcccctctgggcctctttaccctctgtacagaaggggctggaccctctgtcccctccagcccccagcctccaaatgtaccacagaaggctctaggcctgagacacagccagcaccgggggctggggagtgagcctcattccccccgcctctgctataaggcctccttaggcctcagagcatctctagtccaggctagaggggtctccaacacagtgccaggatccctgaggtccccaccatgacacacagaccccagtagcagagctatcttcagcctagggcaggccctggagtcagagagacctgggttcaaatcctggctcaggtcatttgaccatgagcaaatcacatgtcctccctggacttcaatctcctcatctgtcaaatgggaataacagtagtatctagggtttttgtgggcttaggacaagtagggggctcagcacagggtttgactcacaggctctccataaatgttactgatgcctcggggtatcctgcccttcccatttgcccccttgtctctctccctcctcctgactggctagaaccaagtatgggggtgatgcttattgcaactgcagctatgtacaggagaggccaagtcactgttcccaaccccacccactggcaaatgaaaaaaccaagacacagagagtttaagggatatgctcttgatcacccagccaggattggactagggctggaaccaactaagggctctggcctgagtttcagggggtcttctcataattcctcaggaatgtggagcctggagggctcttcccccaagactctccctgctctcttcagactaggacaagctggctcatggctgagttgggccagcccacactccctgctgaaaactatctccatcccatccccacccttgccacctggccttcccgctaagcagaaaggaatgacgggggggcgctaaaaagggagatgatagagggttctttggccctacccctgaatgatttggggggtggggacagaggaaatcaccccgcctttactggctcccgtctggttatcagacccacactggaggcttatctctgccactatcttccaggggaaccctgggccagtcctctctcccttgagccacggaggatctgtatgtagcaggtggctctacatggtggaggtgtgggggaggcaacaggattggctgactcactccagagaaggtgttctttcctgaacctggttagaccagtcacccccaatttcccgggaactgaggggttgagaaccggtagaagcagctgtcacccagggatgccctctataaggccctggggtggcccctagtgccagccaccttatatgtctgggggattggtcctcccactctgcaccctggcttcttccatggtggctaggtccaggccagtgcagtggggacaatagccctcagccaggcaggactcctgagcacctgtcctcagtttccccatctgtggatgaagcagtcaacccccagctgggctgtggtgtttggtgactagaccagggagcctcccttgctcagagggtggacttcatctgtcacctttccctctagggaccctgttagtgacccacagggtggcctccctcctcctcctacaatagctccctgacttttggggatctgggctctgagaggcaggaatcgagttgtagaaaggagtgcctggcttggcacctggcacaagtgggcagtttctggctgtccactcacagttgtgtgctctgtgaaccacaatgcaaagtggactacccaagatccctgaaacagtgggctgggtctacccccgggaccctgcgtgggcaggcaggcacgtgaagagcttgggacacagggagtggacacaggccacacattgtgccctaggcagagccgtgggcagctggtgccagccctccgcccctggcagccaaaatgacctgcctctcgcacccactgcagctggaggtcacagcagatctggcagagcggcggcgcatccgctcagccatccgggaactgcagcggcaggagctggagcgcgaggaggaggccctggcatccaagcgtttccgtgccgagcggcaggacaacaaggagaactggctgcagtgagtagcggggggtggaacatgcgggtgagaaggtgagtgtgagccctggctcagctcatgtgtgcaggcaggcgtgagcacaagtgtatctgtggattgcatgtgctaatggcagtacgtccacacacgcttctggaaaaacagagatgtttgtgggcatggagcatgtactgattgtggcgtcgcggccgtgctgatgtagccagcacgtctgagtgtgtggtattagtgcccacgtccatgggcatatgtgtatcagtgtgcagttagagggtgtgcacagccacatgcccttctgccaaggttctgggtactctgttctggctcctacccttagcccacatcctccacgacctggccatggcagtggtggttacagtcatgatgtctctgcagctctcagcagcgggaagctgagcagcgggctgccctggcacggctggcagggcagctggagtccatgaacgatgtggaggaattgactgcactggtgaggcccaggctggggcaggggatgggggcagggcaggtgaagacctggactccacagcccaacacccgcgacctgtctcttacccacagttgcgaagcgctggtgagtatgaggagcgcaagctgatccgagctgccatccgccgtgtacgggctcaggagattgagggtatgtggcctgtcccggccccacccctgccctgctgtctgctgtccacagcacctccctgtcactcacctgccacttgctccttcccttccagctgccaccttggctgggaggttgtacagcgggcgtcccaacagtggctcaagagaggacagcaaggggctagcggcacacaggctggaacagtgtgaggtaaggagggtgggagagtggcccagtgtcctgtgcccatggataccggtagcacagagtgcctgagtgtctttgctaggctggtatttcactgtaaggggcccacccctgccatccagcctctatttagcagtcagagggatctcccagaaatgcaaatccggccctggcacctcccctgcttcaacccgtcccagggctgcccctcaccctccacacagcccacatctttaccttggcttatggggcctgcatgtcagaccccagctggctcacagttcactctattttccagagtgtgggtgagaggtcaggccatgcaggttccccaagtggccagcagaggccgctgggtccacggtcctggcaggaccccactcccactccagatgaaccaggctgaggccaggagtcaggaacctccactccagggatctattaaggctcccgtccccaataggtctcctgccatacccacccactgacatcaggacctggtcctctctgaacccctttggctaggtagtgccaagagattgggaagtggggatcagagactgcccttagcatgccagtgccagtgcttgcgcaggtgtgcctacaggaagccatgccccaccactctgctttgcatgccctgccctgggcacttgccagcctggccctcagtggtgggggtggcgttcaaagcctagggagccttggttgcatcctgtgggtcccttacaggtgccagagcgagaggaacaggaacagcaggcagaggtttcaaagccaacccccacccctgaaggcaccagccaggatgtgaccacagtgacactcctgctgcgagccccacctgggagcacatccagctcacctgcctcacccagcagttcacccacccctgcctctcctgagcctccattggagcctgccgaggcccagtgccttacagctgaggttccaggcagcccagagccaccccccagcccacccaagaccaccagccctgagcctcaggagtctccaacgctccccagcactgagggccaggtggtcaacaaggtgagtctggatgaggggcagggatgccaggcaagtgagcaggtctgggagtcaggccttgctcaggccctgttcttctcccttgcagcttctgtctggccccaaagagacccctgctgcccagagccccaccagaggcccctctgacaccaagagagcaggtgagggtcccagcaggggtagtcacaggcatctttcttcccctccccctgcctccctttccctgcctagaaaatgggctcttgtgcctggcagctctagcttcctcaggtccatgcagtccctgatactgcaccccacccctgaagtgtccccgcccccagctaggccagcctccccctccacccccatggctagaggcctcccctgcagccttgaaaggcaacgggcctcaggcacattcttctccccaataagggagtccacccatctcccagctggagctgtgggcagcactggccaggagggctgtcccccctccccatctgcagaaaggatctgggcacccttcctccagcctaagcctcgcctggcccccaggagtgtccaagtcatcctagggtcagtgtggcaggagaaggaggtgcctgtaggagagatgcagccgagtggggatgccggagtgtgggagatccaggaggggatggagaggtggggtgggggttgagtacaggaaagggtgggaagctagggaggtgtagaggagaggattatgaaaggtggacacccactatcccctgtcttttctctttccccacatggccatcaccccctccccaacctgccagacgtggctggaccccgaccctgccaacgctccctgtcggtgctcagcccccgccaaccagcccagaaccgaggtactacctattctcaccctgcctaggatctgtgcagaccctgtcccacccagttgctgacagccctcctgttccttctagagtccaccccccttgccagcggaccttcctcattccagcgggctggctctgtgcgggatcgtgtccacaagttcacatctgattctcctatggctgctaggctccaggatggcacaccccaggctgccctaagtcccctgacccccgcaaggctcctgggcccctccctcaccagcaccacccctgcctcctcctccagcggctcctcctctcggggccccagtgatacctcctcccggttcagcaaggagcaacgaggagtagcccagcccctggcccagcttcgaagctgcccccaggaggagggccccagggggcggggcttggctgctaggccccttgaaaacagagcaggggggcctgtggcacgttcagaggagcctggtgccccgctgcccgtggccgtcggcactgccgagccagggggcagtatgaagaccacattcaccatcgagatcaaggacggccgtggccaggcctccacaggccgggtgctgctgcccacaggcaaccagagggcaggtaggcgccccccactgcctccccaatggggatgagtgcctgcaaccgcacttctgcatgcaggacaggtgctgcggccaggactcagggtgtctccaaagggtgtgctgggagcgagggcattatcaaccttgtctggcactgccctcactccacctgatcctcctgacagccacctttctccccactcagaactgacactggggctgcgggcgcccccgaccctactcagcaccagtagtgggggcaagagcaccatcacccgtgtcaacagccctgggaccctggctcggctgggcagtgtcactcatgtcaccagcttcagccatgccccccccagtagccgaggaggctgcagcatcaaggtgagcccctcctcaccccaccagcctcaccatccgtcagcctcacatacactgcttcagggtgtagggctagcagggttcctctgctcctcccctactgcacacacagagaaaccgaggcccagagagggaaggtggctgctcacagaccacagccagtcggtggcagagctaaggccagaccctagcatatcagtccctaagtgtgtcggaagcttactctgtactggcgttaagcttcctggatgctgatctctgatccttagttcgaaattggttggttcattcctggtgaacagatggggaaactgaggctcagagagggtggtaagggcttgctcccctcttcctgtggcagccccagtgcccctgcgcccacccacactggacatcagccccgaggtatagagcagctcatctgctcatccaagatcagcctggcccattaggagattggagattagtgattagcatctgcgtcaacctccctgtgggggttgggcagaagctctgaggggggacagacaggcagaggggcgccaatcaggtgaggcagcagcctagcaggtgccttgggaactgaatacgcagcacccttccattattcattcccaagcccaggatccactagccgggagctcagccgggaaagggatccccaagcgggccacccggctgcccaggtaatgccctctgtgctaaaccagggactgaatgggactttggctgaggtgagatggctagaccagctttgggccttctcaggggagacagggagagagtgagggaaataaagcacccttcctttccaaaaaagcaggatccagctgccctctgacaagggattgtgtggggtggggtggggggacccgctgaggcccttgaggtggatgggaggtgccacagtgagacctgggtctgacaccaccaacttgcctcagtttacccatctggaaccaaaggggacaggtgatgtacccataatgtgcttgctcaaagtctgtggttggacgtgagcaccatgggcaggccagagggcatttatgtaagaccaagacactttttatagcagatcactcaaagtcctgcctccctgtgcctccatttcccccatctgttccagctgtctaaaacagctggagttagggtaaagggtaaaggagtacaggctgtggagtccagcagactgattctcacagctaatgtacatggtggctaggccaggtccattccctgttccctgcctcagtttccccacctgtgaggcatggggccccgatctcagtgatcttcagaacccatgcagtcttactgtgctgcaggcctatgatttctgtagggctatagccaggcctggcgatccgcctgcttgggcaggccccccctcccccactgccccttccacggaggagcccagaataggtttctatttgggctgcagctccagctggctggtggcgggctgggaggcaggggcggggcaggcccgctgcccttgcctttgccctcggaccagctgcaaagactcagacactcagccagagacagcagcccctgccactgccccaccattaccccccatagagtccccaccagcaccatgccgggggtaccagggcctgggcctgagctggccgcagcccttgaggagcagttgggccgggcactggaggagctgcgggcggtggctgaagcaggccgggtggcagtgacccaggcagccgaggtagctgtagccaccgtggagccggtggcccgggcagctgaagagctgcgggcagagagagcagcactgagccggcggctggatgcactgagcaggcaggtggaggtgctgagcctacggctgggggtcccacttgtgtccggccttgagcctgagctggagcccagcgagctgctcctggctgccgccgaccccgaggccctctttcaggctgccgaggatgccgggacccccgtggcccacccacctgccttcagcacccgccgccgctcctccaccggcaccacccgcagcactagtctcgtaagtgcttctgggttggtgggaggggtagttttgagccaggctctgcctcctcttgactttaggtatgtcaccaccttctctgagcctcagtttatctatcttgacaggggactggggcactagtgctctaagactagggcaagagggtgccaggctccagccctgaggcatgtgtggcagctgccttggcagcccctggcatgacccaggccccagcccccagctccctgccgccctgcaccctggccagaccaagcctccctgaaacagctgccacctcagctctccttacccttatagcagacggagaggccctgccaggagaggaagggccataatagttggcttggggccttgtcttcaaggggctagggagatgccctgggagggctgcagggctagagactccttagaggatggtttccagcaggggcgaggcagggggaggtggtacagaggagagcttcatagaggtcttggctcagggcagccccagtcagacacctggtcaggagcctacaggccccgggccagccctcttggcaaggtagcaggcagatggggggcaacatgtgctgcctgggcactggcccaggaggacctaggcctcgggaactggcagcacagagcagagcctgcctgggagggggctgggaacaaagcagcaaaatgaactaaggttcaggagttaggctgccttcagctcagatcccaggctgcatcacacttagagagagactgtgggcaagtcagttagctgccctgagcctcagtttccccttctgttttttttttttttttttccggtcttgttttctttgcaacagggtcttactctcttgcccagactggagtgcagctgcatgatcatagctctctgcagcctctaactcctgggctcaagtaatcctcctacctcagctttctgagtaggtgggactacaggtgcacaccaccatgcctagctaattttttatttttgtttttgtagagatgcggtctcgctatgttacccaggttggtctcaaactgctggcaacaagtgatccctcccacctcggcctcccaaactgttgacattacaggcatgagccactgcgcccggccttcccttctgttaaatagggacagtaaagtccctagtgtttatacaacacttactatggactggaaatcatcattattatcactatccattgtattaatacaattcggggtacgtgggaagccctacaacaaaactgtcagtgcctcttccctgactgacgctgacatggccatctttgggcaggcaggctggcaggctagtggttatttccaaggcgtgccagcaaccctaggatctgcttccctatccattggagacatgatgagtttcacccatacccctgcttaaagtccatgccctctccccaccctgcagatggaagcagagccagcagagcctctcgctgcagcagtggaagcggccaatggggctgagcagacccgagtgaacaaagcaccagaagggcggagccctctgagcgctgaggagctgatgactattgaggatgaaggagtcttggacaagatggtatagccagatccggtgggctgggggttggcagaggccagcaggcaccaggtaggcaatgatgggctctatatgcagctggatcagagcacggactttgaagagcggaagctcatccgggctgcacttcgtgagctccgacaaaggaagagaggtagagagccagttgccctaccctagatccagctgccccattccccagctgctcccctcatactctggggtccatttgtggacaccccagcttaataactgccctacccagcttctccttctctagacccagcagttcccttggctattccctgctggatccagctgctccttccctagctccttctctcccgctggtgaccccagttattctccccaaccagcttctcttctccttcctagacccagatactccctcccgcagctactctctccttggatccagttgcctctcaaagtactgtcaacgactccttccctgaatccagatactccttctccctgctgctcctctctccctgaagtccattgatggccatcttagcctctgccccatccagcttcccttttcctggacacaactacttcctcccccagatagttcttccctggacacatctattcattcccttagattctgggttcaattgcttctcctctcaaacactctcaattactcctctgaatctagctgcttctgccagggcccactgatggccaccccagtctctatctctacccacctacttctattttaagcccagttaacccccttcactagcttctctcccagctactcttcccctggatcagattgcttctcagatcccatcaattgctcccttcctggatctaaatattcctgcctccagctgctcttctcctccaaccaaagacctgctgatggcccacccagctacttcctcactcagcttctccttccttggactcagctaccccctcactagatctagatacccctcctgacttagctactcatgcctatagaaaccctttttggatccatacccctttgagtttagctactccgtattctctagtttctgcctgagtccatcaaacccttcccacactccattccctgtcaagttatggctgtcccctcaccccagctgctcctagagaggcccttgttacctgtgtcattcatgtttctaacaagccaccctccaccccgtcttgtgtgccccatgcacctgtgcatctgtgctgtgtgggtgttggtggcccttttgcgcatgcatggggcatcccctgcccagaccagcgggacaaggagcgggaacggcggctgcaggaggcacggggccggccaggggaggggcgcggcaacacagccactgagaccaccacgaggcacagccagcgggcagctgatggctctgctgtcagcactgttaccaagactgagcggctcgtccactccagtaaggggccaaatggggccggcccagggctcagggtgggaacacatcctcccccagccccctgtgcctttcacatccttctcatcccctgcccctgcagatgatggcacacggacggcccgcaccaccacagtggagtcgagtttcgtgaggcgctcggagagtaaggccacctggtgtcgccctgtgcctgcctgcctgtccgcccacctcctccggctcttccttgagctctctctccgtgtcttcaactgtgccgtcactttctcttctctgcctgcggctatcaccacccctccatacagcctcccatcccatctcctgatgtccagcccaggccctcacctggtgccccttccccttttttgcagatggcagtggcagcaccatgatgcaaaccaagaccttctcctcttcctcctcatccaagaagatgggcaggtgagcaccagcacccaatccctgaccatagaggagtcagtgccacaggggacctaactgcaaacccgttttacagaggggtgggctgggcacagtggctcttgcctgtaatcccagcactttgggaggccgaggtgggcggatcacttgaggtcaggagttcaagaccagcctggccaacatggtaaaacctcatctctactaaaaatacaaaaattagccgggcgtggtggcaggcacctgtaatcccaactactggggaggccgaggcacaagaatcacttgaacctgggaggcggaggttgcagtgagctgagatcactccactgcactccagtctgggcaacagagcgagactcagtctcaaaaataaatagataaataaataaataaataaataaataaataaataaaacagaggggtagactgggatgctgggaggtaataggtctatagccagggaggggcaaagtgagagttaaggatcctgctctccttgggatctcattttattctcaaccacaccacaggagaggtggatgctcagggaggccagtgagttgcttaggggctcacatctctgagtggctgcaatagcattgaacacttacagaggcctacctaccacactgagctgcctggtggcactgccacttcccagtatctgcaaaccatgtcccaggtcacacagcacctttataccttagccccatgagaaaggagggtacccccatgtaacagaggctgttggggctggcagaaagcaggaacaggatcagaatccaggatgagaaccaaaggggtccagagactctgaatcagagagaccttgttcaagttctagttccgcccatcacgtcctctgaaatcttaggcaagttactgccagaggtctcagtttcctcacctttagtggaattggtaaggcccctccctgctcttgtgaagtttaaaatggcacacaggaaaggatcaacagagatgaattattattattactattattatgctagtcatcatttttattatcggatagtgcccagaagctgaactcccctgtaacttgagggtacaatgaggcttctcagagaactactcgtgggtgggggagggggaggcggaaacctgttgaaaaccttgctgtcatttgagactcagtgtactcctctaaaatgcgtgtgatgaggacgcctccctccctggcaggcgtttgtggcagtggagatactagtgtgctacaagaccccccctcctcctcgcgagtggtggtccaggctggggagcagccctgctctccctgcctaacatgcgcctccccaacccctagcatcttcgaccgcgaggaccaggccagcccacgggccggcagcctggcggcgctcgagaaacggcaggccgagaagaagaaagagctgatgaaggcgcagagtctgcccaagacctcagcctcccaggcgcgcaaggccatgattgagaagctggagaaggagggcgcggccgggtgagctgcagaagtgggctgggcagtggggggcggggcgtgataggcagtggggggcggggcttgatagttggcccggcagaggcgggaagaccgcgcggctagatctgtggtgcaaaggcccgaaggtcatggaaggcggggcctgggatccactgggtgggcccaccgaggcatgccccttatagtcgtgtgacctggtcctgacaccgcccctacagcagccctggcggaccccgcgcagccgtgcagcgatccaccagcttcggggtccccaacgccaacagcatcaagcagatgctgctggactggtgtcgagccaagactcgcggctacgaggtgagccccgggaggccagggggcctggaggcctccccagaccccagctcaacacctccttcttagcagagctcctattacccagtacacttcctgccactgtgtggcctcacagggaacatggaaaggctcttggggtgaggaaactgaggctcaaagaggacacaaggcaagccctagattccagaatcagtgatgaagtaacagggcctcttgggtggtgggcagggttcaaggccggatcccactcttggagtcccctccttgttgctctgtaggaggccctgagtcaatttctctaaatgagggaaggagtgatgaggcatgaccatagccttagctgggtggcgctgggcctctcagtagctctgtcccttgaaattgcaaatatgggagttgacaggctgacttggaggaggctcatgttccaactattcactcattgtgcaagctacggggcctctttgtgcccagtgccctaggtctggaataacagaatgctgaggggtagacagcaggggggagttgcccccaggttcctgaccagtcctcctacggcttatagcacgtcgacatccagaacttctcctccagctggagtgatgggatggccttctgtgccctggtgcacaacttcttccctgaggccttcgactatgggcagcttagccctcagaaccgacgccagaacttcgaggtggccttctcatctgcggagtaagtgtgggccctggccctgctaatgttgctgcacatctggggctggacatcgggaccaggcccagttgccctgagaacccctggagcgggccagccacattgtcagtcagcggctgagacccccttccccagagagtccccgtccttctccatccccacccccccgctgctgagcgtgccaggtgcccgccggaacgaaggagccgcaggccggcctaccagcccgggccaaagcccaccaggtggccctgtccatatcccctccatcctccctctgcccccttctccctctctctccctttctctgtcctgctctcctcccactatcaccagagcttcctgctcccacgggatcccggctggagattccaaaaggaggctcctggcccgggcaccgtgcccgcccagcctatatagtgctgccagaggcttatataggacctcagcaagccctccactttggaatcgttgccccgtctgctcacctcaccctcagcacccttctccatctgtcttcccttctttccccttctctttctggtttccctcaaatttcttcctcctcctccttctcctcttcctcctccccccacctcctctcacgcctccctcaccccctctccccggggcacagccctcctctccaaccttggtgccaacgccatcgcccccaccccgcgttcccgcttgcccctagagttctctgcacctgtgactggtttggcccccacccttgtctgcattgcacaccattagtgatgggtagtgagcggcacgtccacagtggggaggaggcatgcggggggctggcagactgcagcactggaatcgtaattgaactcatgtctctgtgtgtgtgtgtgtatgtgtgtgtgtctctgtttcctcccctctctcttctctgcctcttccctctcttccccacccggggccctggcctcctgcccccgtcccccaccccttcccggccccctaccctccccaggacccatgcggactgcccgcagctcctggatacagaggacatggtgcggcttcgagagcctgactggaagtgcgtgtacacgtacatccaggaattctaccgctgtctggtccagaaggggctggtaaaaaccaaaaagtcctaacccctgctcggggccccacggtgagaaacgccgcctctaccacctgccccgtttcaccagaatctgctcagcaaggccagagagggtccagggaggcgggtgggggaagtaaggggggcatttagtcaagccagaggagccagacatagccctgtcttctggcagttcagggcccagcaggtgagaccattctaaatgggcagtgatgacccaggtgggcagcactgtgatgggggaagcccaggggagatgcctgacccaggctgcaggtctgggccccccatctgaaaaaagtgcaaactaagctgggatctgaacaagttcaggctaaaggagggagagggagttccaggcagaggaatcagcctaggcttagcagggcaagagagctggagagcacagcacatcaggaagggaagaaacttgagtctggatatgagggaggagggggccacagttagaagtttgaccttctggccgagcacggtggctcatgcctgtaatcccagcactttgggaggccaaggtgggcagatcacgaggtcatgagttcgagaccagcctgaccaacatggtgaaaccccatctctactaaaaatacaaaaattagccaggcgtgtggcgcacacctgtaatcctagcgactcaggaggctgaggtaggagaatcacttgaacccaggaggcgaaggttgcaatgagctgaaatcatgccactgcactccagcctgggtgacagagcgagactccatctcaaaaaaaaaaaaaaaaaaaaaaaagtttgaccttcctcctgaggacaacaggagttataaagggtttccaaacagagaagggatggatatagcattctaggaccttcctcggatgaggcttggatgagagatgggatggactagatgactggaatagcttaagagctagagagacaggcttcccaatagatctggtttggagagggagagggaaggtcaagaagtctgccaggctcctgtgtgggcactggggagttggtggtgccatactccaaagtggggagctcaggagcaggaccagttcaacaggaagatgtttctggctggggactctggatcctaagccagctgtggcatttcctctctggtcacctcacctcagtaccaaagtaaagaattcagatcctaaactaactaccccattacagacaaggagctcagagagagacgtgggctaagactgtcctgggggtgggagggagagggaagatggttaggtcagagctggggccagaaactgagactccaaactccccacttagtggctgttttccttgccccatcactgtgttcccgcccattttgtagagaggattgaaaatagaggcccagaaggagcaaggggattggctgaaggaatgtgagtcagtgacaggtaggggcacactcagatgcccctcagggcctggagccattgtggggggcagtccacatgtgcacacacacactcagagaaggagcacagatgagtggcggatgggcttggtgctatctccagatcatatatggacttaggagctgctgcccagcaagccagcttggagggagaggggcccagcccagccctgatccagttggaaagtgtgactcagccgtgctgttgctcaagttgcctggtgtttggcctgtcactggggcagcctgagccctgagccctgagccccagtgtaaacaatggctttataaggtctccagggaagggagtggggcgggagggagcaccaggttggagagggcggtcgggatccccaggacgatagccacagctggaagaagcttcagagagaggctgcctttgcatcatggtacagctcgggaaacaagcccagtctgggatagggatgaccctaggggcacgtggcacatcagcagcagacccagaaccctctcactcatcctaaattcttgtaaggtctcaaatgagatagagaataactgtcctgttctaaagagggggaaacagtcatagaaaagggccttatctagcacccacaactggttagggatacagtctggactaaaacagaggtgttcggtgttctgcctcccaggtttcttctctgaaggagtccaggtgagctgggggtaggcccagccctaccacagttctgagtttgtccataagggcacgagatgggaggtggtcttgggttctcaggtgtcttgagaataaggagcaattgttgccattatgccttccctgccataggaaactcattcagcaacattgaatgcttgctatgtcccaggtatggcagataggagggatcaaggcagaagaggtcttgctctgggggttgagggacaggggaaaaggagccagagagcagactccagcttcagagctctgggagctgtcagttgcttaataggcacaacccactcactccagagtggggaaaaggctttgccaacacccagaactgggggcctgggtcccatgcggcctagcctgcacttactaagccatggggcttgaaacaaatggctcctctgctctgtgactcagtttccttatctgtgaagggcagctagcattctgaaggatggccagaagggtggtccccccgagcatggcatagatggtccattggtattggctgggatcctcatctgcctcctctgctctacccaaggcaggtgataagggttagagaacccctctgctgcccacacgttccctggcctccatctccagcagcagggttatccccaccccctgtcaaagaataggggtccctgggcctctcaacaggaagtaccagatcaggcagctagcagacaatcatcggtggaccacagggccactagagtgagacctatccatagataaagattggccagtgatgaagcccatctgggtgcaaaggccgagctgagaggcttctaccaactggagtgtgccagtgagggtgagcagaaggtggtctccagggagaacatgggcagggtttggagccagcacctccccagggttggaggaagcagacccaggacctgcctgactgggatggggctctcttctgccatctccgcctccacctgcctagctctgctcccccgccccgagagatgcctccaggcttgggtagatgaagccaggggcttcctgccttcctggaaggcttttccctgtctggagtttatgaaagaccagcaggcaatgcggcaataaaaaagaccttggggtagaggggcgccacgagaggcgggtctggcgctgacatccaaccccgtgccccctccctgcaggatgctggtggactgtgtgcccctggtggaggtggacgacatgatgatcatgggcaagaagcctgaccccaagtgtgtcttcacctatgtgcagtcgctctacaaccacctgcgacgccacgaactgcgcctgcgcggcaagaatgtctagcctgcccgcccgcatggccagccagtggcaagctgccgcccccactctccgggcaccgtctcctgcctgtgcgtccgcccaccgctgccctgtctgttgcgacaccctcccccccacatacacacgcagcgttttgataaattattggttttcaacg

SEQ ID NO: 14192 - DNA, 3321 bp, Homo sapiens
agcgtctggccgatttggggacgcgggcagtcgcttccggccccggctcccgcacattcttgaggattgggccggggatgggaggaatggggacgcctggggacttgcacgccgcgtgcccctccaccacccgccgggacgccctctgcctcggtcccgagttcgagttcgacctccgccactcagctgggtgtcctggggaccttggtttcttccctttagatccggacactgaagcaggcggtagcgggtgtcttcctacctggctaccccttcggcgcctagcgcgaggcaggctggaggtcacagcagatctggcagagcggcggcgcatccgctcagccatccgggaactgcagcggcaggagctggagcgcgaggaggaggccctggcatccaagcgtttccgtgccgagcggcaggacaacaaggagaactggctgcactctcagcagcgggaagctgagcagcgggctgccctggcacggctggcagggcagctggagtccatgaacgatgtggaggaattgactgcactgttgcgaagcgctggtgagtatgaggagcgcaagctgatccgagctgccatccgccgtgtacgggctcaggagattgaggctgccaccttggctgggaggttgtacagcgggcgtcccaacagtggctcaagagaggacagcaaggggctagcggcacacaggctggaacagtgtgaggtgccagagcgagaggaacaggaacagcaggcagaggtttcaaagccaacccccacccctgaaggcaccagccaggatgtgaccacagtgacactcctgctgcgagccccacctgggagcacatccagctcacctgcctcacccagcagttcacccacccctgcctctcctgagcctccattggagcctgccgaggcccagtgccttacagctgaggttccaggcagcccagagccaccccccagcccacccaagaccaccagccctgagcctcaggagtctccaacgctccccagcactgagggccaggtggtcaacaagcttctgtctggccccaaagagacccctgctgcccagagccccaccagaggcccctctgacaccaagagagcagacgtggctggaccccgaccctgccaacgctccctgtcggtgctcagcccccgccaaccagcccagaaccgagagtccaccccccttgccagcggaccttcctcattccagcgggctggctctgtgcgggatcgtgtccacaagttcacatctgattctcctatggctgctaggctccaggatggcacaccccaggctgccctaagtcccctgacccccgcaaggctcctgggcccctccctcaccagcaccacccctgcctcctcctccagcggctcctcctctcggggccccagtgatacctcctcccggttcagcaaggagcaacgaggagtagcccagcccctggcccagcttcgaagctgcccccaggaggagggccccagggggcggggcttggctgctaggccccttgaaaacagagcaggggggcctgtggcacgttcagaggagcctggtgccccgctgcccgtggccgtcggcactgccgagccagggggcagtatgaagaccacattcaccatcgagatcaaggacggccgtggccaggcctccacaggccgggtgctgctgcccacaggcaaccagagggcagaactgacactggggctgcgggcgcccccgaccctactcagcaccagtagtgggggcaagagcaccatcacccgtgtcaacagccctgggaccctggctcggctgggcagtgtcactcatgtcaccagcttcagccatgccccccccagtagccgaggaggctgcagcatcaagatggaagcagagccagcagagcctctcgctgcagcagtggaagcggccaatggggctgagcagacccgagtgaacaaagcaccagaagggcggagccctctgagcgctgaggagctgatgactattgaggatgaaggagtcttggacaagatgctggatcagagcacggactttgaagagcggaagctcatccgggctgcacttcgtgagctccgacaaaggaagagagaccagcgggacaaggagcgggaacggcggctgcaggaggcacggggccggccaggggaggggcgcggcaacacagccactgagaccaccacgaggcacagccagcgggcagctgatggctctgctgtcagcactgttaccaagactgagcggctcgtccactccaatgatggcacacggacggcccgcaccaccacagtggagtcgagtttcgtgaggcgctcggagaatggcagtggcagcaccatgatgcaaaccaagaccttctcctcttcctcctcatccaagaagatgggcagcatcttcgaccgcgaggaccaggccagcccacgggccggcagcctggcggcgctcgagaaacggcaggccgagaagaagaaagagctgatgaaggcgcagagtctgcccaagacctcagcctcccaggcgcgcaaggccatgattgagaagctggagaaggagggcgcggccggcagccctggcggaccccgcgcagccgtgcagcgatccaccagcttcggggtccccaacgccaacagcatcaagcagatgctgctggactggtgtcgagccaagactcgcggctacgagcacgtcgacatccagaacttctcctccagctggagtgatgggatggccttctgtgccctggtgcacaacttcttccctgaggccttcgactatgggcagcttagccctcagaaccgacgccagaacttcgaggtggccttctcatctgcggagacccatgcggactgcccgcagctcctggatacagaggacatggtgcggcttcgagagcctgactggaagtgcgtgtacacgtacatccaggaattctaccgctgtctggtccagaaggggctggtaaaaaccaaaaagtcctaacccctgctcggggccccacggatgctggtggactgtgtgcccctggtggaggtggacgacatgatgatcatgggcaagaagcctgaccccaagtgtgtcttcacctatgtgcagtcgctctacaaccacctgcgacgccacgaactgcgcctgcgcggcaagaatgtctagcctgcccgcccgcatggccagccagtggcaagctgccgcccccactctccgggcaccgtctcctgcctgtgcgtccgcccaccgctgccctgtctgttgcgacaccctcccccccacatacacacgcagcgttttgataaattattggttttcaacg

SEQ ID NO: 14193 - DNA, 21764 bp, Homo sapiens
ttgccaggccctggcttctcaatccaggtccctgccctccctgttttgaggtttagacaggatgagagtccatcccaggccacacagcagactggcggccaagctggcagggctggaaccagagaccccctaccctgggtttggtgagttttccagcaaaccaccctagggcagagggcagcttccagccaggagccacattataggatgggacagtaatggacgctcctaggttagagagggaaagtaaggcacagagcctaagtgcctgtggtttctggaagccccagcatgcctgattcatgtctgtcccctgcagaattctctgagctggtgacaggtgccacaggcactggggatctcaccagaaaggaaccgacggagctaggggccagcgagatggcggacgaggccttagctgggctggatgagggagcccttcggaagctggtaagtggccccatcacccactgtggggacaggaaagccaagccagagaggcagggtcaatccagggtacctctcagctgacaggaagaagtgatgggggaaaggtcaggaggagggggacatgggaacaggggtaggccagttccatgtggctgatgcagaggcccttgtggcatgtgcctgtccatgcctggtactgaagcctagtccctcccaaccctccacagccaccacctgtttaaacagtaactgctgtagactcgcccgtatgcagccacaggtgtggggaggctggatatgcctctccagagcaatagctcgggcaatgcccacccctggaagctggcccagtgataatggtagcagcaatgattaataatgccaaggcctggcagggggcaggctgggtactgggtataccatgtcacagaataatcacagcagctctgaaagcctgggcactgcgactcaagagagttaaaatcacctgctcaaggacacccatctaagaaggagctgtgccaaaatcccaaccccatagtgggccacgggggaccagagtcctgggaaagtcaaggctggacgaggccataagagagagacaggttttgtgggcccttatggattctgtggcttctcatctcatttttctactcttgagtctcagttcctctacctgtaaaatgaagggagggagggagatgtgtttgcacacaagctctaggtcctagagttggcatggggacagaatgaggcatggacccagatctcaggtggaggaaagatgagcccactccatcccctttcttgttcctcttcctgagagccctgtctacctccatgcacagaggccgtagggcaacccagtggggcagggctccttccccaaccccaaaggccaggcagcctgacctggaggaggggccagaggagctccatctcctcagtccctgacccttgtccatgggggtaaattaaagatttactttacctagaagacaagtgacccaccccactctcataccttcccccgcaggcagaggctggaaccaaccagcgtagcccagccactgggcagtgcccagctgctgccatgacctccccaaggcactctgcctgtatgttctcggaccagcgcattagactctctgggtgtctgcctctccactatcaccgcaggatgtgtgcagcctggaggggatgaggttaggtttccaaaggtgcccgccagtcagttcgaccttccctcaggaagtccaagtcccagtgggggtcgtagaggcagcacagtccaaaaagagggaatgccaggcctggttcccgcacatcctcatctcaaggtatccacaggcaggctcagggttcttcagccgccacctccctctcttaagcgaggctcgggcggcgctggaaaagagttttggagagaagctggagcagtggttgaatctctgggaaaggacagatgagaacctgccccggtctcgggatcggtgcctctcgaagtctttccgaccccgggagcggctcctccagcacccggcgcccgccattactgcgccccgcgcgccggcccggcccccgctggcctcgtggcaagaacgggggcgtcccgagccgggctcctccccgcggggccgggccatataaggaaaagctaggcccgctccgcccgccctgcgccccagcgtctggccgatttggggacgcgggcagtcgcttccggccccggctcccgcacattcttgaggattgggccggggatgggaggaatggggacgcctggggacttgcacgccgcgtgcccctccaccacccgccgggacgccctctgcctcggtcccgagttcgagttcgacctccgccactcagctgggtgtcctggggaccttggtttcttccctttagatccggacactgaagcaggcggtagcgggtgtcttcctacctggctaccccttcggcgcctagcgcgaggcagggtgggcgaggcgagggcggcgccctgcgagggagggcggtcgcagaacctgcgggccttcagcgccccctggcgaggcttccctccaccgccggcgggacccccatgggcaaccgggggagctgggactgaaagcctggagagccccctccgttgtgctgttggggagactgaggcccagtgagacctcagggcctgccaggcgttcccaacagcgagggcagagagtacacggagagccggctccccagggggaggaagcaccctctttcctcccgggagaatttcactgggcagtttcggaaaccgccccatccccttccccttccccctcggtagacaatggcgctttgtacttccttccctccctcccacagctccctccttacacagcggtggggcctgggcgggtggaactcgggacacacagaggagacactgtggtccaacctttgcctccaggcccaaagggaagggtcgtgccagagggtgaccagtggaatgaggttgtcagtctccagccttgcccacccactttgggggatcagagggaggctcccattttccagatggggacactgaagctccgggggttgtgctgtagaggtggccaagttcctacatcaggcttttgtcagagacaaggaccccatctccgagcccagagcactgagaatggggacctaggagacaaaaggctagcccttgcccctctgggcctctttaccctctgtacagaaggggctggaccctctgtcccctccagcccccagcctccaaatgtaccacagaaggctctaggcctgagacacagccagcaccgggggctggggagtgagcctcattccccccgcctctgctataaggcctccttaggcctcagagcatctctagtccaggctagaggggtctccaacacagtgccaggatccctgaggtccccaccatgacacacagaccccagtagcagagctatcttcagcctagggcaggccctggagtcagagagacctgggttcaaatcctggctcaggtcatttgaccatgagcaaatcacatgtcctccctggacttcaatctcctcatctgtcaaatgggaataacagtagtatctagggtttttgtgggcttaggacaagtagggggctcagcacagggtttgactcacaggctctccataaatgttactgatgcctcggggtatcctgcccttcccatttgcccccttgtctctctccctcctcctgactggctagaaccaagtatgggggtgatgcttattgcaactgcagctatgtacaggagaggccaagtcactgttcccaaccccacccactggcaaatgaaaaaaccaagacacagagagtttaagggatatgctcttgatcacccagccaggattggactagggctggaaccaactaagggctctggcctgagtttcagggggtcttctcataattcctcaggaatgtggagcctggagggctcttcccccaagactctccctgctctcttcagactaggacaagctggctcatggctgagttgggccagcccacactccctgctgaaaactatctccatcccatccccacccttgccacctggccttcccgctaagcagaaaggaatgacgggggggcgctaaaaagggagatgatagagggttctttggccctacccctgaatgatttggggggtggggacagaggaaatcaccccgcctttactggctcccgtctggttatcagacccacactggaggcttatctctgccactatcttccaggggaaccctgggccagtcctctctcccttgagccacggaggatctgtatgtagcaggtggctctacatggtggaggtgtgggggaggcaacaggattggctgactcactccagagaaggtgttctttcctgaacctggttagaccagtcacccccaatttcccgggaactgaggggttgagaaccggtagaagcagctgtcacccagggatgccctctataaggccctggggtggcccctagtgccagccaccttatatgtctgggggattggtcctcccactctgcaccctggcttcttccatggtggctaggtccaggccagtgcagtggggacaatagccctcagccaggcaggactcctgagcacctgtcctcagtttccccatctgtggatgaagcagtcaacccccagctgggctgtggtgtttggtgactagaccagggagcctcccttgctcagagggtggacttcatctgtcacctttccctctagggaccctgttagtgacccacagggtggcctccctcctcctcctacaatagctccctgacttttggggatctgggctctgagaggcaggaatcgagttgtagaaaggagtgcctggcttggcacctggcacaagtgggcagtttctggctgtccactcacagttgtgtgctctgtgaaccacaatgcaaagtggactacccaagatccctgaaacagtgggctgggtctacccccgggaccctgcgtgggcaggcaggcacgtgaagagcttgggacacagggagtggacacaggccacacattgtgccctaggcagagccgtgggcagctggtgccagccctccgcccctggcagccaaaatgacctgcctctcgcacccactgcagctggaggtcacagcagatctggcagagcggcggcgcatccgctcagccatccgggaactgcagcggcaggagctggagcgcgaggaggaggccctggcatccaagcgtttccgtgccgagcggcaggacaacaaggagaactggctgcagtgagtagcggggggtggaacatgcgggtgagaaggtgagtgtgagccctggctcagctcatgtgtgcaggcaggcgtgagcacaagtgtatctgtggattgcatgtgctaatggcagtacgtccacacacgcttctggaaaaacagagatgtttgtgggcatggagcatgtactgattgtggcgtcgcggccgtgctgatgtagccagcacgtctgagtgtgtggtattagtgcccacgtccatgggcatatgtgtatcagtgtgcagttagagggtgtgcacagccacatgcccttctgccaaggttctgggtactctgttctggctcctacccttagcccacatcctccacgacctggccatggcagtggtggttacagtcatgatgtctctgcagctctcagcagcgggaagctgagcagcgggctgccctggcacggctggcagggcagctggagtccatgaacgatgtggaggaattgactgcactggtgaggcccaggctggggcaggggatgggggcagggcaggtgaagacctggactccacagcccaacacccgcgacctgtctcttacccacagttgcgaagcgctggtgagtatgaggagcgcaagctgatccgagctgccatccgccgtgtacgggctcaggagattgagggtatgtggcctgtcccggccccacccctgccctgctgtctgctgtccacagcacctccctgtcactcacctgccacttgctccttcccttccagctgccaccttggctgggaggttgtacagcgggcgtcccaacagtggctcaagagaggacagcaaggggctagcggcacacaggctggaacagtgtgaggtaaggagggtgggagagtggcccagtgtcctgtgcccatggataccggtagcacagagtgcctgagtgtctttgctaggctggtatttcactgtaaggggcccacccctgccatccagcctctatttagcagtcagagggatctcccagaaatgcaaatccggccctggcacctcccctgcttcaacccgtcccagggctgcccctcaccctccacacagcccacatctttaccttggcttatggggcctgcatgtcagaccccagctggctcacagttcactctattttccagagtgtgggtgagaggtcaggccatgcaggttccccaagtggccagcagaggccgctgggtccacggtcctggcaggaccccactcccactccagatgaaccaggctgaggccaggagtcaggaacctccactccagggatctattaaggctcccgtccccaataggtctcctgccatacccacccactgacatcaggacctggtcctctctgaacccctttggctaggtagtgccaagagattgggaagtggggatcagagactgcccttagcatgccagtgccagtgcttgcgcaggtgtgcctacaggaagccatgccccaccactctgctttgcatgccctgccctgggcacttgccagcctggccctcagtggtgggggtggcgttcaaagcctagggagccttggttgcatcctgtgggtcccttacaggtgccagagcgagaggaacaggaacagcaggcagaggtttcaaagccaacccccacccctgaaggcaccagccaggatgtgaccacagtgacactcctgctgcgagccccacctgggagcacatccagctcacctgcctcacccagcagttcacccacccctgcctctcctgagcctccattggagcctgccgaggcccagtgccttacagctgaggttccaggcagcccagagccaccccccagcccacccaagaccaccagccctgagcctcaggagtctccaacgctccccagcactgagggccaggtggtcaacaaggtgagtctggatgaggggcagggatgccaggcaagtgagcaggtctgggagtcaggccttgctcaggccctgttcttctcccttgcagcttctgtctggccccaaagagacccctgctgcccagagccccaccagaggcccctctgacaccaagagagcaggtgagggtcccagcaggggtagtcacaggcatctttcttcccctccccctgcctccctttccctgcctagaaaatgggctcttgtgcctggcagctctagcttcctcaggtccatgcagtccctgatactgcaccccacccctgaagtgtccccgcccccagctaggccagcctccccctccacccccatggctagaggcctcccctgcagccttgaaaggcaacgggcctcaggcacattcttctccccaataagggagtccacccatctcccagctggagctgtgggcagcactggccaggagggctgtcccccctccccatctgcagaaaggatctgggcacccttcctccagcctaagcctcgcctggcccccaggagtgtccaagtcatcctagggtcagtgtggcaggagaaggaggtgcctgtaggagagatgcagccgagtggggatgccggagtgtgggagatccaggaggggatggagaggtggggtgggggttgagtacaggaaagggtgggaagctagggaggtgtagaggagaggattatgaaaggtggacacccactatcccctgtcttttctctttccccacatggccatcaccccctccccaacctgccagacgtggctggaccccgaccctgccaacgctccctgtcggtgctcagcccccgccaaccagcccagaaccgaggtactacctattctcaccctgcctaggatctgtgcagaccctgtcccacccagttgctgacagccctcctgttccttctagagtccaccccccttgccagcggaccttcctcattccagcgggctggctctgtgcgggatcgtgtccacaagttcacatctgattctcctatggctgctaggctccaggatggcacaccccaggctgccctaagtcccctgacccccgcaaggctcctgggcccctccctcaccagcaccacccctgcctcctcctccagcggctcctcctctcggggccccagtgatacctcctcccggttcagcaaggagcaacgaggagtagcccagcccctggcccagcttcgaagctgcccccaggaggagggccccagggggcggggcttggctgctaggccccttgaaaacagagcaggggggcctgtggcacgttcagaggagcctggtgccccgctgcccgtggccgtcggcactgccgagccagggggcagtatgaagaccacattcaccatcgagatcaaggacggccgtggccaggcctccacaggccgggtgctgctgcccacaggcaaccagagggcaggtaggcgccccccactgcctccccaatggggatgagtgcctgcaaccgcacttctgcatgcaggacaggtgctgcggccaggactcagggtgtctccaaagggtgtgctgggagcgagggcattatcaaccttgtctggcactgccctcactccacctgatcctcctgacagccacctttctccccactcagaactgacactggggctgcgggcgcccccgaccctactcagcaccagtagtgggggcaagagcaccatcacccgtgtcaacagccctgggaccctggctcggctgggcagtgtcactcatgtcaccagcttcagccatgccccccccagtagccgaggaggctgcagcatcaaggtgagcccctcctcaccccaccagcctcaccatccgtcagcctcacatacactgcttcagggtgtagggctagcagggttcctctgctcctcccctactgcacacacagagaaaccgaggcccagagagggaaggtggctgctcacagaccacagccagtcggtggcagagctaaggccagaccctagcatatcagtccctaagtgtgtcggaagcttactctgtactggcgttaagcttcctggatgctgatctctgatccttagttcgaaattggttggttcattcctggtgaacagatggggaaactgaggctcagagagggtggtaagggcttgctcccctcttcctgtggcagccccagtgcccctgcgcccacccacactggacatcagccccgaggtatagagcagctcatctgctcatccaagatcagcctggcccattaggagattggagattagtgattagcatctgcgtcaacctccctgtgggggttgggcagaagctctgaggggggacagacaggcagaggggcgccaatcaggtgaggcagcagcctagcaggtgccttgggaactgaatacgcagcacccttccattattcattcccaagcccaggatccactagccgggagctcagccgggaaagggatccccaagcgggccacccggctgcccaggtaatgccctctgtgctaaaccagggactgaatgggactttggctgaggtgagatggctagaccagctttgggccttctcaggggagacagggagagagtgagggaaataaagcacccttcctttccaaaaaagcaggatccagctgccctctgacaagggattgtgtggggtggggtggggggacccgctgaggcccttgaggtggatgggaggtgccacagtgagacctgggtctgacaccaccaacttgcctcagtttacccatctggaaccaaaggggacaggtgatgtacccataatgtgcttgctcaaagtctgtggttggacgtgagcaccatgggcaggccagagggcatttatgtaagaccaagacactttttatagcagatcactcaaagtcctgcctccctgtgcctccatttcccccatctgttccagctgtctaaaacagctggagttagggtaaagggtaaaggagtacaggctgtggagtccagcagactgattctcacagctaatgtacatggtggctaggccaggtccattccctgttccctgcctcagtttccccacctgtgaggcatggggccccgatctcagtgatcttcagaacccatgcagtcttactgtgctgcaggcctatgatttctgtagggctatagccaggcctggcgatccgcctgcttgggcaggccccccctcccccactgccccttccacggaggagcccagaataggtttctatttgggctgcagctccagctggctggtggcgggctgggaggcaggggcggggcaggcccgctgcccttgcctttgccctcggaccagctgcaaagactcagacactcagccagagacagcagcccctgccactgccccaccattaccccccatagagtccccaccagcaccatgccgggggtaccagggcctgggcctgagctggccgcagcccttgaggagcagttgggccgggcactggaggagctgcgggcggtggctgaagcaggccgggtggcagtgacccaggcagccgaggtagctgtagccaccgtggagccggtggcccgggcagctgaagagctgcgggcagagagagcagcactgagccggcggctggatgcactgagcaggcaggtggaggtgctgagcctacggctgggggtcccacttgtgtccggccttgagcctgagctggagcccagcgagctgctcctggctgccgccgaccccgaggccctctttcaggctgccgaggatgccgggacccccgtggcccacccacctgccttcagcacccgccgccgctcctccaccggcaccacccgcagcactagtctcgtaagtgcttctgggttggtgggaggggtagttttgagccaggctctgcctcctcttgactttaggtatgtcaccaccttctctgagcctcagtttatctatcttgacaggggactggggcactagtgctctaagactagggcaagagggtgccaggctccagccctgaggcatgtgtggcagctgccttggcagcccctggcatgacccaggccccagcccccagctccctgccgccctgcaccctggccagaccaagcctccctgaaacagctgccacctcagctctccttacccttatagcagacggagaggccctgccaggagaggaagggccataatagttggcttggggccttgtcttcaaggggctagggagatgccctgggagggctgcagggctagagactccttagaggatggtttccagcaggggcgaggcagggggaggtggtacagaggagagcttcatagaggtcttggctcagggcagccccagtcagacacctggtcaggagcctacaggccccgggccagccctcttggcaaggtagcaggcagatggggggcaacatgtgctgcctgggcactggcccaggaggacctaggcctcgggaactggcagcacagagcagagcctgcctgggagggggctgggaacaaagcagcaaaatgaactaaggttcaggagttaggctgccttcagctcagatcccaggctgcatcacacttagagagagactgtgggcaagtcagttagctgccctgagcctcagtttccccttctgttttttttttttttttttccggtcttgttttctttgcaacagggtcttactctcttgcccagactggagtgcagctgcatgatcatagctctctgcagcctctaactcctgggctcaagtaatcctcctacctcagctttctgagtaggtgggactacaggtgcacaccaccatgcctagctaattttttatttttgtttttgtagagatgcggtctcgctatgttacccaggttggtctcaaactgctggcaacaagtgatccctcccacctcggcctcccaaactgttgacattacaggcatgagccactgcgcccggccttcccttctgttaaatagggacagtaaagtccctagtgtttatacaacacttactatggactggaaatcatcattattatcactatccattgtattaatacaattcggggtacgtgggaagccctacaacaaaactgtcagtgcctcttccctgactgacgctgacatggccatctttgggcaggcaggctggcaggctagtggttatttccaaggcgtgccagcaaccctaggatctgcttccctatccattggagacatgatgagtttcacccatacccctgcttaaagtccatgccctctccccaccctgcagatggaagcagagccagcagagcctctcgctgcagcagtggaagcggccaatggggctgagcagacccgagtgaacaaagcaccagaagggcggagccctctgagcgctgaggagctgatgactattgaggatgaaggagtcttggacaagatggtatagccagatccggtgggctgggggttggcagaggccagcaggcaccaggtaggcaatgatgggctctatatgcagctggatcagagcacggactttgaagagcggaagctcatccgggctgcacttcgtgagctccgacaaaggaagagaggtagagagccagttgccctaccctagatccagctgccccattccccagctgctcccctcatactctggggtccatttgtggacaccccagcttaataactgccctacccagcttctccttctctagacccagcagttcccttggctattccctgctggatccagctgctccttccctagctccttctctcccgctggtgaccccagttattctccccaaccagcttctcttctccttcctagacccagatactccctcccgcagctactctctccttggatccagttgcctctcaaagtactgtcaacgactccttccctgaatccagatactccttctccctgctgctcctctctccctgaagtccattgatggccatcttagcctctgccccatccagcttcccttttcctggacacaactacttcctcccccagatagttcttccctggacacatctattcattcccttagattctgggttcaattgcttctcctctcaaacactctcaattactcctctgaatctagctgcttctgccagggcccactgatggccaccccagtctctatctctacccacctacttctattttaagcccagttaacccccttcactagcttctctcccagctactcttcccctggatcagattgcttctcagatcccatcaattgctcccttcctggatctaaatattcctgcctccagctgctcttctcctccaaccaaagacctgctgatggcccacccagctacttcctcactcagcttctccttccttggactcagctaccccctcactagatctagatacccctcctgacttagctactcatgcctatagaaaccctttttggatccatacccctttgagtttagctactccgtattctctagtttctgcctgagtccatcaaacccttcccacactccattccctgtcaagttatggctgtcccctcaccccagctgctcctagagaggcccttgttacctgtgtcattcatgtttctaacaagccaccctccaccccgtcttgtgtgccccatgcacctgtgcatctgtgctgtgtgggtgttggtggcccttttgcgcatgcatggggcatcccctgcccagaccagcgggacaaggagcgggaacggcggctgcaggaggcacggggccggccaggggaggggcgcggcaacacagccactgagaccaccacgaggcacagccagcgggcagctgatggctctgctgtcagcactgttaccaagactgagcggctcgtccactccagtaaggggccaaatggggccggcccagggctcagggtgggaacacatcctcccccagccccctgtgcctttcacatccttctcatcccctgcccctgcagatgatggcacacggacggcccgcaccaccacagtggagtcgagtttcgtgaggcgctcggagagtaaggccacctggtgtcgccctgtgcctgcctgcctgtccgcccacctcctccggctcttccttgagctctctctccgtgtcttcaactgtgccgtcactttctcttctctgcctgcggctatcaccacccctccatacagcctcccatcccatctcctgatgtccagcccaggccctcacctggtgccccttccccttttttgcagatggcagtggcagcaccatgatgcaaaccaagaccttctcctcttcctcctcatccaagaagatgggcaggtgagcaccagcacccaatccctgaccatagaggagtcagtgccacaggggacctaactgcaaacccgttttacagaggggtgggctgggcacagtggctcttgcctgtaatcccagcactttgggaggccgaggtgggcggatcacttgaggtcaggagttcaagaccagcctggccaacatggtaaaacctcatctctactaaaaatacaaaaattagccgggcgtggtggcaggcacctgtaatcccaactactggggaggccgaggcacaagaatcacttgaacctgggaggcggaggttgcagtgagctgagatcactccactgcactccagtctgggcaacagagcgagactcagtctcaaaaataaatagataaataaataaataaataaataaataaataaataaaacagaggggtagactgggatgctgggaggtaataggtctatagccagggaggggcaaagtgagagttaaggatcctgctctccttgggatctcattttattctcaaccacaccacaggagaggtggatgctcagggaggccagtgagttgcttaggggctcacatctctgagtggctgcaatagcattgaacacttacagaggcctacctaccacactgagctgcctggtggcactgccacttcccagtatctgcaaaccatgtcccaggtcacacagcacctttataccttagccccatgagaaaggagggtacccccatgtaacagaggctgttggggctggcagaaagcaggaacaggatcagaatccaggatgagaaccaaaggggtccagagactctgaatcagagagaccttgttcaagttctagttccgcccatcacgtcctctgaaatcttaggcaagttactgccagaggtctcagtttcctcacctttagtggaattggtaaggcccctccctgctcttgtgaagtttaaaatggcacacaggaaaggatcaacagagatgaattattattattactattattatgctagtcatcatttttattatcggatagtgcccagaagctgaactcccctgtaacttgagggtacaatgaggcttctcagagaactactcgtgggtgggggagggggaggcggaaacctgttgaaaaccttgctgtcatttgagactcagtgtactcctctaaaatgcgtgtgatgaggacgcctccctccctggcaggcgtttgtggcagtggagatactagtgtgctacaagaccccccctcctcctcgcgagtggtggtccaggctggggagcagccctgctctccctgcctaacatgcgcctccccaacccctagcatcttcgaccgcgaggaccaggccagcccacgggccggcagcctggcggcgctcgagaaacggcaggccgagaagaagaaagagctgatgaaggcgcagagtctgcccaagacctcagcctcccaggcgcgcaaggccatgattgagaagctggagaaggagggcgcggccgggtgagctgcagaagtgggctgggcagtggggggcggggcgtgataggcagtggggggcggggcttgatagttggcccggcagaggcgggaagaccgcgcggctagatctgtggtgcaaaggcccgaaggtcatggaaggcggggcctgggatccactgggtgggcccaccgaggcatgccccttatagtcgtgtgacctggtcctgacaccgcccctacagcagccctggcggaccccgcgcagccgtgcagcgatccaccagcttcggggtccccaacgccaacagcatcaagcagatgctgctggactggtgtcgagccaagactcgcggctacgaggtgagccccgggaggccagggggcctggaggcctccccagaccccagctcaacacctccttcttagcagagctcctattacccagtacacttcctgccactgtgtggcctcacagggaacatggaaaggctcttggggtgaggaaactgaggctcaaagaggacacaaggcaagccctagattccagaatcagtgatgaagtaacagggcctcttgggtggtgggcagggttcaaggccggatcccactcttggagtcccctccttgttgctctgtaggaggccctgagtcaatttctctaaatgagggaaggagtgatgaggcatgaccatagccttagctgggtggcgctgggcctctcagtagctctgtcccttgaaattgcaaatatgggagttgacaggctgacttggaggaggctcatgttccaactattcactcattgtgcaagctacggggcctctttgtgcccagtgccctaggtctggaataacagaatgctgaggggtagacagcaggggggagttgcccccaggttcctgaccagtcctcctacggcttatagcacgtcgacatccagaacttctcctccagctggagtgatgggatggccttctgtgccctggtgcacaacttcttccctgaggccttcgactatgggcagcttagccctcagaaccgacgccagaacttcgaggtggccttctcatctgcggagtaagtgtgggccctggccctgctaatgttgctgcacatctggggctggacatcgggaccaggcccagttgccctgagaacccctggagcgggccagccacattgtcagtcagcggctgagacccccttccccagagagtccccgtccttctccatccccacccccccgctgctgagcgtgccaggtgcccgccggaacgaaggagccgcaggccggcctaccagcccgggccaaagcccaccaggtggccctgtccatatcccctccatcctccctctgcccccttctccctctctctccctttctctgtcctgctctcctcccactatcaccagagcttcctgctcccacgggatcccggctggagattccaaaaggaggctcctggcccgggcaccgtgcccgcccagcctatatagtgctgccagaggcttatataggacctcagcaagccctccactttggaatcgttgccccgtctgctcacctcaccctcagcacccttctccatctgtcttcccttctttccccttctctttctggtttccctcaaatttcttcctcctcctccttctcctcttcctcctccccccacctcctctcacgcctccctcaccccctctccccggggcacagccctcctctccaaccttggtgccaacgccatcgcccccaccccgcgttcccgcttgcccctagagttctctgcacctgtgactggtttggcccccacccttgtctgcattgcacaccattagtgatgggtagtgagcggcacgtccacagtggggaggaggcatgcggggggctggcagactgcagcactggaatcgtaattgaactcatgtctctgtgtgtgtgtgtgtatgtgtgtgtgtctctgtttcctcccctctctcttctctgcctcttccctctcttccccacccggggccctggcctcctgcccccgtcccccaccccttcccggccccctaccctccccaggacccatgcggactgcccgcagctcctggatacagaggacatggtgcggcttcgagagcctgactggaagtgcgtgtacacgtacatccaggaattctaccgctgtctggtccagaaggggctggtaaaaaccaaaaagtcctaacccctgctcggggccccacggtgagaaacgccgcctctaccacctgccccgtttcaccagaatctgctcagcaaggccagagagggtccagggaggcgggtgggggaagtaaggggggcatttagtcaagccagaggagccagacatagccctgtcttctggcagttcagggcccagcaggtgagaccattctaaatgggcagtgatgacccaggtgggcagcactgtgatgggggaagcccaggggagatgcctgacccaggctgcaggtctgggccccccatctgaaaaaagtgcaaactaagctgggatctgaacaagttcaggctaaaggagggagagggagttccaggcagaggaatcagcctaggcttagcagggcaagagagctggagagcacagcacatcaggaagggaagaaacttgagtctggatatgagggaggagggggccacagttagaagtttgaccttctggccgagcacggtggctcatgcctgtaatcccagcactttgggaggccaaggtgggcagatcacgaggtcatgagttcgagaccagcctgaccaacatggtgaaaccccatctctactaaaaatacaaaaattagccaggcgtgtggcgcacacctgtaatcctagcgactcaggaggctgaggtaggagaatcacttgaacccaggaggcgaaggttgcaatgagctgaaatcatgccactgcactccagcctgggtgacagagcgagactccatctcaaaaaaaaaaaaaaaaaaaaaaaagtttgaccttcctcctgaggacaacaggagttataaagggtttccaaacagagaagggatggatatagcattctaggaccttcctcggatgaggcttggatgagagatgggatggactagatgactggaatagcttaagagctagagagacaggcttcccaatagatctggtttggagagggagagggaaggtcaagaagtctgccaggctcctgtgtgggcactggggagttggtggtgccatactccaaagtggggagctcaggagcaggaccagttcaacaggaagatgtttctggctggggactctggatcctaagccagctgtggcatttcctctctggtcacctcacctcagtaccaaagtaaagaattcagatcctaaactaactaccccattacagacaaggagctcagagagagacgtgggctaagactgtcctgggggtgggagggagagggaagatggttaggtcagagctggggccagaaactgagactccaaactccccacttagtggctgttttccttgccccatcactgtgttcccgcccattttgtagagaggattgaaaatagaggcccagaaggagcaaggggattggctgaaggaatgtgagtcagtgacaggtaggggcacactcagatgcccctcagggcctggagccattgtggggggcagtccacatgtgcacacacacactcagagaaggagcacagatgagtggcggatgggcttggtgctatctccagatcatatatggacttaggagctgctgcccagcaagccagcttggagggagaggggcccagcccagccctgatccagttggaaagtgtgactcagccgtgctgttgctcaagttgcctggtgtttggcctgtcactggggcagcctgagccctgagccctgagccccagtgtaaacaatggctttataaggtctccagggaagggagtggggcgggagggagcaccaggttggagagggcggtcgggatccccaggacgatagccacagctggaagaagcttcagagagaggctgcctttgcatcatggtacagctcgggaaacaagcccagtctgggatagggatgaccctaggggcacgtggcacatcagcagcagacccagaaccctctcactcatcctaaattcttgtaaggtctcaaatgagatagagaataactgtcctgttctaaagagggggaaacagtcatagaaaagggccttatctagcacccacaactggttagggatacagtctggactaaaacagaggtgttcggtgttctgcctcccaggtttcttctctgaaggagtccaggtgagctgggggtaggcccagccctaccacagttctgagtttgtccataagggcacgagatgggaggtggtcttgggttctcaggtgtcttgagaataaggagcaattgttgccattatgccttccctgccataggaaactcattcagcaacattgaatgcttgctatgtcccaggtatggcagataggagggatcaaggcagaagaggtcttgctctgggggttgagggacaggggaaaaggagccagagagcagactccagcttcagagctctgggagctgtcagttgcttaataggcacaacccactcactccagagtggggaaaaggctttgccaacacccagaactgggggcctgggtcccatgcggcctagcctgcacttactaagccatggggcttgaaacaaatggctcctctgctctgtgactcagtttccttatctgtgaagggcagctagcattctgaaggatggccagaagggtggtccccccgagcatggcatagatggtccattggtattggctgggatcctcatctgcctcctctgctctacccaaggcaggtgataagggttagagaacccctctgctgcccacacgttccctggcctccatctccagcagcagggttatccccaccccctgtcaaagaataggggtccctgggcctctcaacaggaagtaccagatcaggcagctagcagacaatcatcggtggaccacagggccactagagtgagacctatccatagataaagattggccagtgatgaagcccatctgggtgcaaaggccgagctgagaggcttctaccaactggagtgtgccagtgagggtgagcagaaggtggtctccagggagaacatgggcagggtttggagccagcacctccccagggttggaggaagcagacccaggacctgcctgactgggatggggctctcttctgccatctccgcctccacctgcctagctctgctcccccgccccgagagatgcctccaggcttgggtagatgaagccaggggcttcctgccttcctggaaggcttttccctgtctggagtttatgaaagaccagcaggcaatgcggcaataaaaaagaccttggggtagaggggcgccacgagaggcgggtctggcgctgacatccaaccccgtgccccctccctgcaggatgctggtggactgtgtgcccctggtggaggtggacgacatgatgatcatgggcaagaagcctgaccccaagtgtgtcttcacctatgtgcagtcgctctacaaccacctgcgacgccacgaactgcgcctgcgcggcaagaatgtctagcctgcccgcccgcatggccagccagtggcaagctgccgcccccactctccgggcaccgtctcctgcctgtgcgtccgcccaccgctgccctgtctgttgcgacaccctcccccccacatacacacgcagcgttttgataaattattggttttcaacg

SEQ ID NO: 14194 - DNA, 3227 bp, Homo sapiens
ttgccaggccctggcttctcaatccaggtccctgccctccctgttttgaggtttagacaggatgagagtccatcccaggccacacagcagactggcggccaagctggcagggctggaaccagagaccccctaccctgggtttgaattctctgagctggtgacaggtgccacaggcactggggatctcaccagaaaggaaccgacggagctaggggccagcgagatggcggacgaggccttagctgggctggatgagggagcccttcggaagctgctggaggtcacagcagatctggcagagcggcggcgcatccgctcagccatccgggaactgcagcggcaggagctggagcgcgaggaggaggccctggcatccaagcgtttccgtgccgagcggcaggacaacaaggagaactggctgcactctcagcagcgggaagctgagcagcgggctgccctggcacggctggcagggcagctggagtccatgaacgatgtggaggaattgactgcactgttgcgaagcgctggtgagtatgaggagcgcaagctgatccgagctgccatccgccgtgtacgggctcaggagattgaggctgccaccttggctgggaggttgtacagcgggcgtcccaacagtggctcaagagaggacagcaaggggctagcggcacacaggctggaacagtgtgaggtgccagagcgagaggaacaggaacagcaggcagaggtttcaaagccaacccccacccctgaaggcaccagccaggatgtgaccacagtgacactcctgctgcgagccccacctgggagcacatccagctcacctgcctcacccagcagttcacccacccctgcctctcctgagcctccattggagcctgccgaggcccagtgccttacagctgaggttccaggcagcccagagccaccccccagcccacccaagaccaccagccctgagcctcaggagtctccaacgctccccagcactgagggccaggtggtcaacaagcttctgtctggccccaaagagacccctgctgcccagagccccaccagaggcccctctgacaccaagagagcagacgtggctggaccccgaccctgccaacgctccctgtcggtgctcagcccccgccaaccagcccagaaccgagagtccaccccccttgccagcggaccttcctcattccagcgggctggctctgtgcgggatcgtgtccacaagttcacatctgattctcctatggctgctaggctccaggatggcacaccccaggctgccctaagtcccctgacccccgcaaggctcctgggcccctccctcaccagcaccacccctgcctcctcctccagcggctcctcctctcggggccccagtgatacctcctcccggttcagcaaggagcaacgaggagtagcccagcccctggcccagcttcgaagctgcccccaggaggagggccccagggggcggggcttggctgctaggccccttgaaaacagagcaggggggcctgtggcacgttcagaggagcctggtgccccgctgcccgtggccgtcggcactgccgagccagggggcagtatgaagaccacattcaccatcgagatcaaggacggccgtggccaggcctccacaggccgggtgctgctgcccacaggcaaccagagggcagaactgacactggggctgcgggcgcccccgaccctactcagcaccagtagtgggggcaagagcaccatcacccgtgtcaacagccctgggaccctggctcggctgggcagtgtcactcatgtcaccagcttcagccatgccccccccagtagccgaggaggctgcagcatcaaggctgccgaggatgccgggacccccgtggcccacccacctgccttcagcacccgccgccgctcctccaccggcaccacccgcagcactagtctcatggaagcagagccagcagagcctctcgctgcagcagtggaagcggccaatggggctgagcagacccgagtgaacaaagcaccagaagggcggagccctctgagcgctgaggagctgatgactattgaggatgaaggagtcttggacaagatgctggatcagagcacggactttgaagagcggaagctcatccgggctgcacttcgtgagctccgacaaaggaagagagaccagcgggacaaggagcgggaacggcggctgcaggaggcacggggccggccaggggaggggcgcggcaacacagccactgagaccaccacgaggcacagccagcgggcagctgatggctctgctgtcagcactgttaccaagactgagcggctcgtccactccaatgatggcacacggacggcccgcaccaccacagtggagtcgagtttcgtgaggcgctcggagaatggcagtggcagcaccatgatgcaaaccaagaccttctcctcttcctcctcatccaagaagatgggcagcatcttcgaccgcgaggaccaggccagcccacgggccggcagcctggcggcgctcgagaaacggcaggccgagaagaagaaagagctgatgaaggcgcagagtctgcccaagacctcagcctcccaggcgcgcaaggccatgattgagaagctggagaaggagggcgcggccggcagccctggcggaccccgcgcagccgtgcagcgatccaccagcttcggggtccccaacgccaacagcatcaagcagatgctgctggactggtgtcgagccaagactcgcggctacgagcacgtcgacatccagaacttctcctccagctggagtgatgggatggccttctgtgccctggtgcacaacttcttccctgaggccttcgactatgggcagcttagccctcagaaccgacgccagaacttcgaggtggccttctcatctgcggagatgctggtggactgtgtgcccctggtggaggtggacgacatgatgatcatgggcaagaagcctgaccccaagtgtgtcttcacctatgtgcagtcgctctacaaccacctgcgacgccacgaactgcgcctgcgcggcaagaatgtctagcctgcccgcccgcatggccagccagtggcaagctgccgcccccactctccgggcaccgtctcctgcctgtgcgtccgcccaccgctgccctgtctgttgcgacaccctcccccccacatacacacgcagcgttttgataaattattggttttcaacg

SEQ ID NO: 14195 - DNA, 9065 bp, Homo sapiens
gcggaagctcatccgggctgcacttcgtgagctccgacaaaggaagagaggtagagagccagttgccctaccctagatccagctgccccattccccagctgctcccctcatactctggggtccatttgtggacaccccagcttaataactgccctacccagcttctccttctctagacccagcagttcccttggctattccctgctggatccagctgctccttccctagctccttctctcccgctggtgaccccagttattctccccaaccagcttctcttctccttcctagacccagatactccctcccgcagctactctctccttggatccagttgcctctcaaagtactgtcaacgactccttccctgaatccagatactccttctccctgctgctcctctctccctgaagtccattgatggccatcttagcctctgccccatccagcttcccttttcctggacacaactacttcctcccccagatagttcttccctggacacatctattcattcccttagattctgggttcaattgcttctcctctcaaacactctcaattactcctctgaatctagctgcttctgccagggcccactgatggccaccccagtctctatctctacccacctacttctattttaagcccagttaacccccttcactagcttctctcccagctactcttcccctggatcagattgcttctcagatcccatcaattgctcccttcctggatctaaatattcctgcctccagctgctcttctcctccaaccaaagacctgctgatggcccacccagctacttcctcactcagcttctccttccttggactcagctaccccctcactagatctagatacccctcctgacttagctactcatgcctatagaaaccctttttggatccatacccctttgagtttagctactccgtattctctagtttctgcctgagtccatcaaacccttcccacactccattccctgtcaagttatggctgtcccctcaccccagctgctcctagagaggcccttgttacctgtgtcattcatgtttctaacaagccaccctccaccccgtcttgtgtgccccatgcacctgtgcatctgtgctgtgtgggtgttggtggcccttttgcgcatgcatggggcatcccctgcccagaccagcgggacaaggagcgggaacggcggctgcaggaggcacggggccggccaggggaggggcgcggcaacacagccactgagaccaccacgaggcacagccagcgggcagctgatggctctgctgtcagcactgttaccaagactgagcggctcgtccactccagtaaggggccaaatggggccggcccagggctcagggtgggaacacatcctcccccagccccctgtgcctttcacatccttctcatcccctgcccctgcagatgatggcacacggacggcccgcaccaccacagtggagtcgagtttcgtgaggcgctcggagagtaaggccacctggtgtcgccctgtgcctgcctgcctgtccgcccacctcctccggctcttccttgagctctctctccgtgtcttcaactgtgccgtcactttctcttctctgcctgcggctatcaccacccctccatacagcctcccatcccatctcctgatgtccagcccaggccctcacctggtgccccttccccttttttgcagatggcagtggcagcaccatgatgcaaaccaagaccttctcctcttcctcctcatccaagaagatgggcaggtgagcaccagcacccaatccctgaccatagaggagtcagtgccacaggggacctaactgcaaacccgttttacagaggggtgggctgggcacagtggctcttgcctgtaatcccagcactttgggaggccgaggtgggcggatcacttgaggtcaggagttcaagaccagcctggccaacatggtaaaacctcatctctactaaaaatacaaaaattagccgggcgtggtggcaggcacctgtaatcccaactactggggaggccgaggcacaagaatcacttgaacctgggaggcggaggttgcagtgagctgagatcactccactgcactccagtctgggcaacagagcgagactcagtctcaaaaataaatagataaataaataaataaataaataaataaataaataaaacagaggggtagactgggatgctgggaggtaataggtctatagccagggaggggcaaagtgagagttaaggatcctgctctccttgggatctcattttattctcaaccacaccacaggagaggtggatgctcagggaggccagtgagttgcttaggggctcacatctctgagtggctgcaatagcattgaacacttacagaggcctacctaccacactgagctgcctggtggcactgccacttcccagtatctgcaaaccatgtcccaggtcacacagcacctttataccttagccccatgagaaaggagggtacccccatgtaacagaggctgttggggctggcagaaagcaggaacaggatcagaatccaggatgagaaccaaaggggtccagagactctgaatcagagagaccttgttcaagttctagttccgcccatcacgtcctctgaaatcttaggcaagttactgccagaggtctcagtttcctcacctttagtggaattggtaaggcccctccctgctcttgtgaagtttaaaatggcacacaggaaaggatcaacagagatgaattattattattactattattatgctagtcatcatttttattatcggatagtgcccagaagctgaactcccctgtaacttgagggtacaatgaggcttctcagagaactactcgtgggtgggggagggggaggcggaaacctgttgaaaaccttgctgtcatttgagactcagtgtactcctctaaaatgcgtgtgatgaggacgcctccctccctggcaggcgtttgtggcagtggagatactagtgtgctacaagaccccccctcctcctcgcgagtggtggtccaggctggggagcagccctgctctccctgcctaacatgcgcctccccaacccctagcatcttcgaccgcgaggaccaggccagcccacgggccggcagcctggcggcgctcgagaaacggcaggccgagaagaagaaagagctgatgaaggcgcagagtctgcccaagacctcagcctcccaggcgcgcaaggccatgattgagaagctggagaaggagggcgcggccgggtgagctgcagaagtgggctgggcagtggggggcggggcgtgataggcagtggggggcggggcttgatagttggcccggcagaggcgggaagaccgcgcggctagatctgtggtgcaaaggcccgaaggtcatggaaggcggggcctgggatccactgggtgggcccaccgaggcatgccccttatagtcgtgtgacctggtcctgacaccgcccctacagcagccctggcggaccccgcgcagccgtgcagcgatccaccagcttcggggtccccaacgccaacagcatcaagcagatgctgctggactggtgtcgagccaagactcgcggctacgaggtgagccccgggaggccagggggcctggaggcctccccagaccccagctcaacacctccttcttagcagagctcctattacccagtacacttcctgccactgtgtggcctcacagggaacatggaaaggctcttggggtgaggaaactgaggctcaaagaggacacaaggcaagccctagattccagaatcagtgatgaagtaacagggcctcttgggtggtgggcagggttcaaggccggatcccactcttggagtcccctccttgttgctctgtaggaggccctgagtcaatttctctaaatgagggaaggagtgatgaggcatgaccatagccttagctgggtggcgctgggcctctcagtagctctgtcccttgaaattgcaaatatgggagttgacaggctgacttggaggaggctcatgttccaactattcactcattgtgcaagctacggggcctctttgtgcccagtgccctaggtctggaataacagaatgctgaggggtagacagcaggggggagttgcccccaggttcctgaccagtcctcctacggcttatagcacgtcgacatccagaacttctcctccagctggagtgatgggatggccttctgtgccctggtgcacaacttcttccctgaggccttcgactatgggcagcttagccctcagaaccgacgccagaacttcgaggtggccttctcatctgcggagtaagtgtgggccctggccctgctaatgttgctgcacatctggggctggacatcgggaccaggcccagttgccctgagaacccctggagcgggccagccacattgtcagtcagcggctgagacccccttccccagagagtccccgtccttctccatccccacccccccgctgctgagcgtgccaggtgcccgccggaacgaaggagccgcaggccggcctaccagcccgggccaaagcccaccaggtggccctgtccatatcccctccatcctccctctgcccccttctccctctctctccctttctctgtcctgctctcctcccactatcaccagagcttcctgctcccacgggatcccggctggagattccaaaaggaggctcctggcccgggcaccgtgcccgcccagcctatatagtgctgccagaggcttatataggacctcagcaagccctccactttggaatcgttgccccgtctgctcacctcaccctcagcacccttctccatctgtcttcccttctttccccttctctttctggtttccctcaaatttcttcctcctcctccttctcctcttcctcctccccccacctcctctcacgcctccctcaccccctctccccggggcacagccctcctctccaaccttggtgccaacgccatcgcccccaccccgcgttcccgcttgcccctagagttctctgcacctgtgactggtttggcccccacccttgtctgcattgcacaccattagtgatgggtagtgagcggcacgtccacagtggggaggaggcatgcggggggctggcagactgcagcactggaatcgtaattgaactcatgtctctgtgtgtgtgtgtgtatgtgtgtgtgtctctgtttcctcccctctctcttctctgcctcttccctctcttccccacccggggccctggcctcctgcccccgtcccccaccccttcccggccccctaccctccccaggacccatgcggactgcccgcagctcctggatacagaggacatggtgcggcttcgagagcctgactggaagtgcgtgtacacgtacatccaggaattctaccgctgtctggtccagaaggggctggtaaaaaccaaaaagtcctaacccctgctcggggccccacggtgagaaacgccgcctctaccacctgccccgtttcaccagaatctgctcagcaaggccagagagggtccagggaggcgggtgggggaagtaaggggggcatttagtcaagccagaggagccagacatagccctgtcttctggcagttcagggcccagcaggtgagaccattctaaatgggcagtgatgacccaggtgggcagcactgtgatgggggaagcccaggggagatgcctgacccaggctgcaggtctgggccccccatctgaaaaaagtgcaaactaagctgggatctgaacaagttcaggctaaaggagggagagggagttccaggcagaggaatcagcctaggcttagcagggcaagagagctggagagcacagcacatcaggaagggaagaaacttgagtctggatatgagggaggagggggccacagttagaagtttgaccttctggccgagcacggtggctcatgcctgtaatcccagcactttgggaggccaaggtgggcagatcacgaggtcatgagttcgagaccagcctgaccaacatggtgaaaccccatctctactaaaaatacaaaaattagccaggcgtgtggcgcacacctgtaatcctagcgactcaggaggctgaggtaggagaatcacttgaacccaggaggcgaaggttgcaatgagctgaaatcatgccactgcactccagcctgggtgacagagcgagactccatctcaaaaaaaaaaaaaaaaaaaaaaaagtttgaccttcctcctgaggacaacaggagttataaagggtttccaaacagagaagggatggatatagcattctaggaccttcctcggatgaggcttggatgagagatgggatggactagatgactggaatagcttaagagctagagagacaggcttcccaatagatctggtttggagagggagagggaaggtcaagaagtctgccaggctcctgtgtgggcactggggagttggtggtgccatactccaaagtggggagctcaggagcaggaccagttcaacaggaagatgtttctggctggggactctggatcctaagccagctgtggcatttcctctctggtcacctcacctcagtaccaaagtaaagaattcagatcctaaactaactaccccattacagacaaggagctcagagagagacgtgggctaagactgtcctgggggtgggagggagagggaagatggttaggtcagagctggggccagaaactgagactccaaactccccacttagtggctgttttccttgccccatcactgtgttcccgcccattttgtagagaggattgaaaatagaggcccagaaggagcaaggggattggctgaaggaatgtgagtcagtgacaggtaggggcacactcagatgcccctcagggcctggagccattgtggggggcagtccacatgtgcacacacacactcagagaaggagcacagatgagtggcggatgggcttggtgctatctccagatcatatatggacttaggagctgctgcccagcaagccagcttggagggagaggggcccagcccagccctgatccagttggaaagtgtgactcagccgtgctgttgctcaagttgcctggtgtttggcctgtcactggggcagcctgagccctgagccctgagccccagtgtaaacaatggctttataaggtctccagggaagggagtggggcgggagggagcaccaggttggagagggcggtcgggatccccaggacgatagccacagctggaagaagcttcagagagaggctgcctttgcatcatggtacagctcgggaaacaagcccagtctgggatagggatgaccctaggggcacgtggcacatcagcagcagacccagaaccctctcactcatcctaaattcttgtaaggtctcaaatgagatagagaataactgtcctgttctaaagagggggaaacagtcatagaaaagggccttatctagcacccacaactggttagggatacagtctggactaaaacagaggtgttcggtgttctgcctcccaggtttcttctctgaaggagtccaggtgagctgggggtaggcccagccctaccacagttctgagtttgtccataagggcacgagatgggaggtggtcttgggttctcaggtgtcttgagaataaggagcaattgttgccattatgccttccctgccataggaaactcattcagcaacattgaatgcttgctatgtcccaggtatggcagataggagggatcaaggcagaagaggtcttgctctgggggttgagggacaggggaaaaggagccagagagcagactccagcttcagagctctgggagctgtcagttgcttaataggcacaacccactcactccagagtggggaaaaggctttgccaacacccagaactgggggcctgggtcccatgcggcctagcctgcacttactaagccatggggcttgaaacaaatggctcctctgctctgtgactcagtttccttatctgtgaagggcagctagcattctgaaggatggccagaagggtggtccccccgagcatggcatagatggtccattggtattggctgggatcctcatctgcctcctctgctctacccaaggcaggtgataagggttagagaacccctctgctgcccacacgttccctggcctccatctccagcagcagggttatccccaccccctgtcaaagaataggggtccctgggcctctcaacaggaagtaccagatcaggcagctagcagacaatcatcggtggaccacagggccactagagtgagacctatccatagataaagattggccagtgatgaagcccatctgggtgcaaaggccgagctgagaggcttctaccaactggagtgtgccagtgagggtgagcagaaggtggtctccagggagaacatgggcagggtttggagccagcacctccccagggttggaggaagcagacccaggacctgcctgactgggatggggctctcttctgccatctccgcctccacctgcctagctctgctcccccgccccgagagatgcctccaggcttgggtagatgaagccaggggcttcctgccttcctggaaggcttttccctgtctggagtttatgaaagaccagcaggcaatgcggcaataaaaaagaccttggggtagaggggcgccacgagaggcgggtctggcgctgacatccaaccccgtgccccctccctgcaggatgctggtggactgtgtgcccctggtggaggtggacgacatgatgatcatgggcaagaagcctgaccccaagtgtgtcttcacctatgtgcagtcgctctacaaccacctgcgacgccacgaactgcgcctgcgcggcaagaatgtctagcctgcccgcccgcatggccagccagtggcaagctgccgcccccactctccgggcaccgtctcctgcctgtgcgtccgcccaccgctgccctgtctgttgcgacaccctcccccccacatacacacgcagcgttttgataaattattggttttcaacga

SEQ ID NO: 14196 - DNA, 1263 bp, Homo sapiens
gcggaagctcatccgggctgcacttcgtgagctccgacaaaggaagagagaccagcgggacaaggagcgggaacggcggctgcaggaggcacggggccggccaggggaggggcgcggcaacacagccactgagaccaccacgaggcacagccagcgggcagctgatggctctgctgtcagcactgttaccaagactgagcggctcgtccactccaatgatggcacacggacggcccgcaccaccacagtggagtcgagtttcgtgaggcgctcggagaatggcagtggcagcaccatgatgcaaaccaagaccttctcctcttcctcctcatccaagaagatgggcagcatcttcgaccgcgaggaccaggccagcccacgggccggcagcctggcggcgctcgagaaacggcaggccgagaagaagaaagagctgatgaaggcgcagagtctgcccaagacctcagcctcccaggcgcgcaaggccatgattgagaagctggagaaggagggcgcggccggccctggcggaccccgcgcagccgtgcagcgatccaccagcttcggggtccccaacgccaacagcatcaagcagatgctgctggactggtgtcgagccaagactcgcggctacgagcacgtcgacatccagaacttctcctccagctggagtgatgggatggccttctgtgccctggtgcacaacttcttccctgaggccttcgactatgggcagcttagccctcagaaccgacgccagaacttcgaggtggccttctcatctgcggagacccatgcggactgcccgcagctcctggatacagaggacatggtgcggcttcgagagcctgactggaagtgcgtgtacacgtacatccaggaattctaccgctgtctggtccagaaggggctggtaaaaaccaaaaagtcctaacccctgctcggggccccacggatgctggtggactgtgtgcccctggtggaggtggacgacatgatgatcatgggcaagaagcctgaccccaagtgtgtcttcacctatgtgcagtcgctctacaaccacctgcgacgccacgaactgcgcctgcgcggcaagaatgtctagcctgcccgcccgcatggccagccagtggcaagctgccgcccccactctccgggcaccgtctcctgcctgtgcgtccgcccaccgctgccctgtctgttgcgacaccctcccccccacatacacacgcagcgttttgataaattattggttttcaacga

SEQ ID NO: 14197 - DNA, 9220 bp, Homo sapiens; identical to SEQ ID NO: 1269

SEQ ID NO: 14198 - DNA, 1154 bp, Homo sapiens
aactccagggctagtgagctggaccggaagtaggtttctacccgaccgcattttacgtggtgctgcatttccggtagcggcggcgggaaatcggctgtgggagagaggctaggcctctgaggaggcgaatccggcgggtatcagagccatcagaaccgccaccatgacggtgggcaagagcagcaagatgctgcagcatattgattacaggatgaggtgcatcctgcaggacggccggatcttcattggcaccttcaaggcttttgacaagcacatgaatttgatcctctgtgactgtgatgagttcagaaagatcaagccaaagaactccaaacaagcagaaagggaagagaagcgagtcctcggtctggtgctgctgcgaggggagaatctggtctcaatgacagtagagggacctcctcccaaagatactggtattgctcgagttccacttgctggagctgccgggggcccagggatcggcagggctgctggcagaggaatcccagctggggttcccatgccccaggctcctgcaggacttgctgggccagtccgtggggttggcgggccatcccaacaggtgatgaccccacaaggaagaggtactgttgcagccgctgcagctgctgccacagccagtattgccggggctccaacccagtacccacctggccgtgggggtcctcccccacctatgggccgaggagcaccccctccaggcatgatgggcccacctcctggtatgagacctcctatgggtcccccaatggggatcccccctggaagagggactccaatgggcatgccccctccgggaatgcggcctcctccccctgggatgcgaggccttctttgacccttggccacagagtatggaagtagctccgcagaggcgtgggctcgattcctcagggccacgttaccacagacctgtttgtttcttatgctgttgttcgtggagtctcatgggattgtctggtttcccttacagggccccctcccccgggaatgcgcccaccaaggccctagactcatcttggccctcctcagctccctgcctgtttcccgtaaggctgtacatagtccttttatctccttgtggcctatgaaactggtttataataaactcttaagagaacattataattgca

SEQ ID NO: 14199 - DNA, 9220 bp, Homo sapiens; identical to SEQ ID NO: 1269

SEQ ID NO: 14200 - DNA, 1008 bp, Homo sapiens
aactccagggctagtgagctggaccggaagtaggtttctacccgaccgcattttacgtggtgctgcatttccggtagcggcggcgggaaatcggctgtgggagagaggctaggcctctgaggaggcgaatccggcgggtatcagagccatcagaaccgccaccatgacggtgggcaagagcagcaagatgctgcagcatattgattacaggatgaggtgcatcctgcaggacggccggatcttcattggcaccttcaaggcttttgacaagcacatgaatttgatcctctgtgactgtgatgagttcagaaagatcaagccaaagaactccaaacaagcagaaagggaagagaagcgagtcctcggtctggtgctgctgcgaggggagaatctggtctcaatgacagtagagggacctcctcccaaagatactggtattgctcgagttccacttgctggagctgccgggggcccagggatcggcagggctgctggcagaggaatcccagctggggttcccatgccccaggctcctgcaggacttgctgggccagtccgtggggttggcgggccatcccaacaggtgatgaccccacaaggaagaggtactgttgcagccgctgcagctgctgccacagccagtattgccggggctccaacccagtacccacctggccgtgggggtcctcccccacctatgggccgaggagcaccccctccaggcatgatgggcccacctcctggtatgagacctcctatgggtcccccaatggggatcccccctggaagagggactccaatgggcatgccccctccgggaatgcggcctcctccccctgggatgcgagggccccctcccccgggaatgcgcccaccaaggccctagactcatcttggccctcctcagctccctgcctgtttcccgtaaggctgtacatagtccttttatctccttgtggcctatgaaactggtttataataaactcttaagagaacattataattgca

SEQ ID NO: 14201 - DNA, 9073 bp, Homo sapiens
gaggcgaatccggcgggtatcagagccatcagaaccgccaccatggtaaggagggcacaggctggcggcgcgggagcttccgagtctgttgtggagtgggaaccgcgactgatcggggaggaagccgtgggttggagccacttagggcggtgaaggcctgggccgaggccgctcggtctgggcgggaaagaccaggaccttggcggttcggctaggcatggggtcgaggaaaaggttggaaccggtgtcggaggccgaggtcgctcggcaggggcgagggtagaaccgcggctctcgacaccgctgtagccataattcctgggacccagtaggcactaagttaacttttgccgaataaatatatgtcccgggcttcggagcaggcactggagccgcagggggacccggtaaaaggctcagacttgcggaagtttgtgagtctgagaaagagttggcggaagtgggtggaaggggctcgtggaccacgctagagtctcgctaggtctgctggatggagaggagggcggaggagggtgatggcgaatggaggaagagctccactcagttgctcatcacgtttccgtgtttgcctgtgcctgacttctcaggcgctggggctactctctgaaatatgtttgcttccttcacagaggtagctggggacacataatataattcagtgtggtcattcggtaaaagtaacggcagcggggcggggtaagaatgttttctcaaatagatggttcctgagcagattcctaaaagattagcaagaatgttcccggcgaaaatggggggaatattacagacccggagaactgaaggaacaaaggctgaagggtaacaagatttaaaaagttactggatttttctgcgtttgttgactgagaaaaagttgctggaggagaaaggaagaaagaagggaagacgggaagaattggcaggaggctagttactaaaggccttgcatgttaattttacctcagtggtggtgaggcatgtcattgaaggatttaatttaatttatttttatttttttgagacggagttttgcttttgttgcccaggctggagtgcggtggatcgatcagggttcactgcaaactccacctcccgggttcaagcgattctcctgcctcagcctcccaagtagctgggattgtaggtacccgccaccacacttggctaattttttgtatttttagtagagacggggtttcaccatgttggccagactggtctcgaactcctgacctcagttaatccacccaccttggcctcccaaagtgctgggattacagccgtgagccaccacaccctgcccactgaaggattttaaccagcaaaatgacataagcttagtggtgtttagaaagattgctctagctctggcatgtatattcgatgggactggaagcagggaaacctggtaggatattgtttggataactggttagaataggcgctggattcattttgtctaggttccaacacagcttcccagctgtgaaactgggcaagttacttaacctctcctagcctcagtgacctcatctgtaaaatagggataataatgggcccaattttggggattaaatgagatgtactgtgcttatcacagtgccagatacacagtgagcacccagtaaacattagttgagctggaccagtgaatgttgccctaaaggttcagatcccttgtggttagaagctggttaaaatggtcattgaatggaaactgaaccacctaacctgagggaggctcgcagtatctttgtgtggagtcaagttttgtttttgtttttttgagatggagtctttccctgtcacccaggctggagtgcagtggcatgatctcagttcactgcagcctccacctcccaggttcaagcgattctcccatctcagtctcccgagtagctgggattacaggcacctgccaccacgtgtggctaatttttgtaattttagtagagacggggcttcgccatgttagccaggctggtcttgaactcctgacctaaggtgttctgcccacctcggcctcccaaaatgccgggattgcaggagtgagccactgagcccggccatggagtcaaggttttgatctgcatatttgcaggttcagaactttgttgtctgagctcacagagatgaacagatgtccatagaaggcacttggtgggttaggacttgggtatagcagtcagactgatgggaggatgatatacagatcaaatgccaggtgatttgtttatagagagaaatacaactgcttagggtacctgacagttcacaaagtgatacctatatagtcacttctttattttagcacattggaacccaggttatgaaagcagaaatgtttgttgggttaaagaccattatatgtccaaactggttagcaccctaaccatcagaagtttccctctgccaaatatagtcttggaggcacactaacaaattcttgatatgtggatttcatttttcaccttgaagctgatctccttcctgataacaagcttcttgttgattagatttttagtttcagccctattctagctcttcctttactcagtgtttttaatgagatttgaatgttccatagcacttgagtcacatatctataatctgcacactggtagatggctctagtatgtatgcattggattattttggggacaccctatactctcatccctgcaactgacacgacaaggagaaaggcaattataatatgagaaagaccgatttcaagggaagagagaatagcagattactgggtagaggtcagggctaaaacagggtggcatgggagaattcctaggaaaaggctgtgggtgggagactgagctaagaatctgttgagaaagttggacacatggacaagaacgccatgggaagttttggggagggccagaggtgcttgggtccaaaagagcagagtctcatccctgtccatttctccttgcagacggtgggcaagagcagcaagatgctgcagcatattgattacaggatgaggtgcatcctgcaggacggccggatcttcattggcaccttcaaggcttttgacaagcacatgaatttgatcctctgtgactgtgatgagttcagaaagatcaagtgaggagtggactgtggggggcggagactggaggatgggaatggattgagtgggtgggccaagcaatagaggtggtgatgtagctagttggttcttctctgtttattctccagttttagagggcagacttaaatggggacattgaacgctaagaaatctttttgagtccagcaaaccttgctctctagtctagcaaagtacaagttgtgaagggctgctaggctttttgtttctctcactttgcgtgcccctgggtactggggtaaagggctctcatgttctccccacaggtgtgtgaggggggagagcttgagtttctggcctcattgcctatttgtaaagctgtagcctaaagggctctcccaatgcagcctggtctgaaactgctttaagaagcctctgaccctcttcagggtaagtgctcagctccccatgtgggtttggggccagtgatttttgttggcatttatacaaacaattggagatattgtctactttgctacaattccgtaagttattggctaactcccttgccttgagtctcacagatcttaagcttttggcccattaaaagatatgatttagcttcccatcatgttttacattcaaggctacttgaggcacaaaaagatgatgtgacttccgtggccagcagctcttttgtcatatgcagtgtccatattattctgtcactcactttgaattccctttgattctccttggggctgatttcttctgtgacccaaggtcaagaagtatagtttaaaaatgtggtagggatgccttggtgccaggtacgtattagagaggggccaacagatgagcgtggagctactccaaagttccctcctgattataaaaaatgtttattggaaaatatttttgaaaatacaaagaagtctatgaatagaaactaaaataccccgaagggtttttttctaattatgaaaggacaatacatggttattattttaaaaaataagaaaatgtgagccaaaaaagggaaaaactgtccatccacagacaaccagttaatatactgtaaaatatcaaaacaaaatcttttgagttctttttttaaatcaggctattttttcccctttatttttaggatctagctttagcttttttccccactttcctatcctgttgcagttatttttcctacttcacatttatattttgttcatctttttctggttgttgctttttgggggtttctgtttttatgcttttgaggaacagatatgaaatttcaatttctgtgtatgtgaaatttctcttaaccttttccttctatggcttctcctatttctgatgtaagatgaggggcagaattataggcctgtgaggttgaattgatattagaaggacactgcacgtaagtgaggtgggtgggagtcatttgattggaattgtttaggcagcctcctgatgttggcaagaccttaagctgaagggagggaatagggtcctaagaaagaagacttggctgagggaagggccttcacggttgctgtggaatagcatttgggcccgggctgggctttgttgaccttgtcctatctcttggtcagtgtgtcctcttggcatggtaggaaacaggtagatagccacctaagaggttatgtgttcagcctgtagagactatccaggagggctatcttgggaaagtttgtgtactgtttgttaggagatgcagtataagcaaatcttggaggccactaggcaggtgaactttacccacctctaacactttttttgttccttctaaacctctctttaggccaaagaactccaaacaagcagaaagggaagagaagcgagtcctcggtctggtgctgctgcgaggggagaatctggtctcaatgacagtagagggacctcctcccaaagatgtaagtcagagcaggaagccttgtggaggaggggaggccctactgtgagccaggctctgtgttagattctgtttcattgcagttctcacaggcatcctctggattttgccccctttttcagataataaatgaaatcttaaagaggttaccctgcaagaggccgggcgcggtggctcacatctgtaatcccagctctcagggaggcaagaggcgggaggatagcttgagcccaggagttcgagacctgcctgggcaatatagcgagaccccattctccagaaaaaggaagaaaaaaaaaaagacaaaaaaaaaaaaaagaggttaccctgcaagaaagaagtggaaaaggggaactagaatttgggtatctcagactttaaagctctacctgtttctcagttgatgtacatagtgagtcagtggaggaagcacctgaagccatctgggtcagttcttaatgtgacgacaaagcctaggtagaccttaaaaagttgtaactccgaaacaataggaaatgtgtgtattttgttttgtacagttacagttcatagttactgagaatctaccttgcgccaaccacttcagtattttatttgatcctttaggtctctttagagataaattctcatcttataaatagaataaaccagggcttagtaacttgcccaaggtgccacagccactaagtggtgaaactgacatttgatctcagacagtcttgattctgtaaacaccaagctacacatagaaatagagcaggctttagagacctagtcaaatttgttttccctttccctttttcatttgaagggttttttttttttttttttttagatttttagatggagtctcgctctgtcgccaggctggagtgcagtggcacgatcttggcttattgcaacctctgcctcccgggttcaagtgattctcctgcctcagcctcccgagtagcggggattacagatgtgagccaccacgccctgccaagacgttattttaatcaaaagagaataatccttttaactttttaaaaatccacatatattatctggatttttttgtacttaacacatagtgggcatatattatgttgttctgtgttttcacttaatgttaacatttttctagttgctcaacacttttaaagtcaagttaatgactgagattttctcaaatgagtacagagtagtttatcctaatcattttcttttttggagatttttacgtttttgccttttccagttaaaaatgtctgcaagggatgttagcatatcttggttcaaagtccatgtacatattcaaatctcttagtacctacttccagtagaattggctggtctaacataacccatcataaacctttgtgatcacaaccagttgtaccataaccatgtcatttgcagataaggcaactcagcccgggattgtgggattatttgtccattgtcacctagcggattagaatcagctgggaatggatctcatgtccctttaatgccttgcctgctgaaccctgagtggaaccctggccctttgctcttggtttaactttcacaggagtgcatataggtggttgagttgtggcatgtttctctagacttactcttaagttctaccctgcttcagggataactcatagtcttggatggaggaagaatggtgttggcacacatggagaggtagtatttataagctatttcgatagtatttataagctatttcgaggggctctcttggcaatgatattccaaagtatacttctgatcttcagatcactgggcatcagagcatatttgtttatttttcagactggtattgctcgagttccacttgctggagctgccgggggcccagggatcggcagggctgctggcagaggaatcccagctggggttcccatgccccaggctcctgcaggacttgctgggccagtccgtggggttggcgggccatcccaacaggtgaggagttggggaaagggtaccacctcctggtggctaaaataaaggataaaggggagggtccatagttttaaaagggtccagagtgaccaacctgtgattgtcagactatcagtgtttcactgtggtttatacatggccctagaagcaagtgaaaaggataagttgccattgtaaattatgttgatgctattaaagagatgtacgaattagccaactgtatttaaggaaaatatttccatgacagcatttgaaatcatgagtcatatttgaaaatgcagttgccttctctcacttggattggacatgcttacattcaggtctagaagatgggagttgggcattcaagcttgatctttcccgacatgtggttttggatgggaagtctggtgctgagagttgtagcattaagggatttggtgtctgttatttcccactgtccttccccaagttggggaggagagtgggaagctgcattgtactgtactcttctaactctttcttcttatgtcctcttaggtgatgaccccacaaggaagaggtactgttgcagccgctgcagctgctgccacagccagtattgccggggctccaacccagtacccacctggccgtgggggtcctcccccacctatgggccgaggagcaccccctccaggtgaggagcccataaggagaccagtgctaattgatagaagatgccttagctggattaatgatgagatataaccttgactgaagctgatgatgagtttgtataattaagcaggattactctgagatccagcgtggctgactgatgagactaggtggacaagagccattgggagccctgggtgttaggctcaaatgtcagttttctgggagctgctgagagggtggaatggtccatctatctcagaacttggtggaaagctttgtagtttttttgctaccttttcaagatagacacttgagctatattcttggggcttttctcttgcaggcatgatgggcccacctcctggtatgagacctcctatgggtcccccaatggggatcccccctggaagagggactccaatgggcatgccccctccgggaatgcggcctcctccccctgggatgcgaggtaagtgcctgcagtggtgactttggcttctttccctagagcctagtgggataggaaatggagggaagattgcatttagatcatatcccatgggctttcaagccttaaatctagggaaatccagaaaggaaagagaagagggaacatttcttaaattgggcttacctcccctcttagaaaagttagagcagccatgcacccagggtgtttctcaatatctaaggcagcggcctcaggacacaatgaaataatgcattctgaggatccctaacagaagttatgagattgtcttatgctctttggtttgacagtgcctagtaattaagagggggctctgggctttgctgtactattatggatttctctttaacttcagttggagaaattctgagatcagtccccacatggatgagaaaataggcccccagggagtttggactccaagcccagtgttctttccctataagataacccatgggcaaacttggtgacccctgtttctctagtctggattattcctctatgggtttttatagacataggaacccagtcagcctcagagtagtccctagttagcacatatgccatgtatacccctctcctcactcgattactgcagggcgtgggaggctggggcagggttggggattcaagttgcagatcaggcactgactaaacttcttactcttacttcaggccttctttgacccttggccacagagtatggaagtagctccgcagaggcgtgggctcgattcctcagggccacgttaccacagacctgtttgtttcttatgctgttgttcgtggagtctcatgggattgtctggtttcccttacagggccccctcccccgggaatgcgcccaccaaggccctagactcatcttggccctcctcagctccctgcctgtttcccgtaaggctgtacatagtccttttatctccttgtggcctatgaaactggtttataataa

SEQ ID NO: 14202 - DNA, 985 bp, Homo sapiens
gaggcgaatccggcgggtatcagagccatcagaaccgccaccatgacggtgggcaagagcagcaagatgctgcagcatattgattacaggatgaggtgcatcctgcaggacggccggatcttcattggcaccttcaaggcttttgacaagcacatgaatttgatcctctgtgactgtgatgagttcagaaagatcaagtgtgtgaggggggagagcttgagtttctggcctcattgcctatttgtaaagctgtagcctaaagggctctcccaatgcagcctggtctgaaactgctttaagaagcctctgaccctcttcagggccaaagaactccaaacaagcagaaagggaagagaagcgagtcctcggtctggtgctgctgcgaggggagaatctggtctcaatgacagtagagggacctcctcccaaagatactggtattgctcgagttccacttgctggagctgccgggggcccagggatcggcagggctgctggcagaggaatcccagctggggttcccatgccccaggctcctgcaggacttgctgggccagtccgtggggttggcgggccatcccaacaggtgatgaccccacaaggaagaggtactgttgcagccgctgcagctgctgccacagccagtattgccggggctccaacccagtacccacctggccgtgggggtcctcccccacctatgggccgaggagcaccccctccaggcatgatgggcccacctcctggtatgagacctcctatgggtcccccaatggggatcccccctggaagagggactccaatgggcatgccccctccgggaatgcggcctcctccccctgggatgcgagggccccctcccccgggaatgcgcccaccaaggccctagactcatcttggccctcctcagctccctgcctgtttcccgtaaggctgtacatagtccttttatctccttgtggcctatgaaactggtttataataa

SEQ ID NO: 14203 - DNA, 2910 bp, Homo sapiens
tttgactgagcaccgaggggcagttggcagcttcacctcagagctgcaggaaggaacggggcagtgaaaatcgaatcgggtgtgatcctaggccaagctcatggcccagcagggccagcaggggcagatggcaagtggagacagcaatctcaacttcaggatggtcgcagagatccagaacgtagagggtcagaacctgcaggagcaggtttgccctgagcccattttcaggttcttcagagaaaacaaggtggagattgcaagtgcaataacaaggccatttcctttccttatgggcctccgagaccgctccttcatctccgagcagatgtatgaacattttcaagaagcttttagaaacctggtcccagtgacaagagtgatgtattgtgtactcagtgaactggagaagacatttggctggtcacatctggaagcattgttcagcaggattaacctgatggcctatcctgatttaaacgagatttacagaagcttccagaatgtatgctatgaacactcacctctccaaatgaataatgtaaacgatttagaagatagacccagattactaccatatggtaaacaagagaacagcaatgcctgtcatgaaatggatgatatagcagtgcctcaggaagccttgagctcctcgccaaggtgtgagccaggtttctcttcagagtcttgtgagcagttagctctcccaaaggctggtggaggagatgctgaagatgcacccagcctactaccaggtgggggagttctagaaagcaacgggatgatagatgcggcaaggacatacagcacagcaccaggggagaaacagggagaggaggaaggcaggaacagtcccagaaaaagaaaccaagacaaggagaagtaccaagagagtccagagggaagagacaaagagacctttgatctaaaaactccccaagtcactaatgaaggagaaccagagaaggggctctgtctactaccaggtgaaggagaagagggcagtgatgactgttcagaaatgtgtgatggagaagagccccaggaagcctctagctccctagcaagatgtgggtcagagggcagtgatgactgttcggaaatgtgtgatggagaagagcgccaggaagcctctagctccctagcaagacgtgggtcagtgtctagtgaactagaaaatcacccaatgaatgaagaaggagaatcagaagagcttgcttctagcctgctatatgataatgtaccaggagcggagcaatcagcatatgaaaatgagaagtgttcctgtgtcatgtgtttctcagaagaggtgccaggaagcccagaagcaaggacggaaagtgatcaagcgtgtggcacaatggatactgtggatattgcaaacaactccactttgggaaaacccaagaggaaaagaagaaaaaagagggggcatggctggagcagaatgagaatgagaaggcaggaaaacagccaacaaaatgataatagcaaagccgacggccaggtggtctccagtgaaaagaaggcgaacgtgaatctgaaagacctttccaagattagggggagaaagagaggcaaacctggaacccgcttcactcagagtgacagagctgcacagaaaagagtccgatcaagagcttcaagaaagcacaaagatgaaactgtggattttaaggctcctttgcttccagtgacctgtggtggggtgaagggaattttacataagaagaaattgcagcaaggaatcttggtgaagtgtatacagactgaggatggaaaatggttcacccccacggaatttgaaatcaaaggaggccatgcaagatcaaagaactggaggctgagtgtgcgctgtggcgggtggcccctacgatggctgatggagaatggatttctgcctgatcctccaagaatacgttacaggaaaaaaaagagaatactgaagtctcaaaacaatagctcagttgacccttgtatgagaaacctggatgagtgtgaggtgtgccgggacggaggggagctgttctgttgcgacacttgttcaagagtcttccatgaggactgtcacatcccgcctgtggaagctgagaggaccccgtggaattgcatcttctgcaggatgaaggagtctccgggaagccaacagtgttgtcaggaatctgaggtcctggagaggcagatgtgtcctgaggaacagttgaaatgtgagttcctcctcttgaaagtctattgctgttctgagagctccttttttgccaagattccatactattattatattagagaggcgtgtcaaggcctgaaggagcccatgtggttggataaaatcaagaaaaggctgaatgagcacggttacccccaagtggaggggtttgtacaagacatgcgcctcatcttccagaaccacagggcctcttacaagtacaaggattttggccaaatgggatttagactggaggctgagtttgagaagaatttcaaggaagtgtttgctattcaggaaacaaatgggaacaattgactggattagtggatgctgaaagcattcagcaaatggcaccctaaaatatgccgctggtttgccactgacttcaaaatgaggtcacttgggcacagcacatgcagggaggggcttttctctgagcctccttcatctgcccaaagacaaatcctcaaaaggaaattcaatcatcatgaatcacaaccccaagtatctcatcagccagggaagagtaagtgggatcacagggaaggatgttggcagcgacaccatcccatacaggctcttacctcttctcctgagggctgctccagacaacatttattacccagaagaccttttgtctgaaaaccagccaagctttattcaggacacacttcttgccttcactttcccacttccgtggc

SEQ ID NO: 14204 - DNA, 13324 bp, Homo sapiens
gcagttggcagcttcacctcagagctgcaggaaggaacggggcagtgaaaatcgaatcgggtgtgatcctaggccaagctcatggcccagcagggccagcaggggcagatggcaagtggagacagcaatctcaacttcaggtgggtcatcgtctcctttcccgtctgtccttcatctctggtagggttccctttcatacttgttatttaatgtctacccagcttcactctacaggtatacaatagaattcagttacaaataaataacgaggcaatcagattttttaaattgcagggattggctgttggagaaactcaaggatgccgtgactcacatcatcttcctattctcttacatctgcaaatggctggactggagctgtttgaacatcatgcctgttctgaggctttgtgtaggattggatgattccccgtgacctctgaaccctctcttctcccccaggcctcctttatccccactccaaaagacaactctgtctaaaaaggatctttttagaagaattaaaatccaaacgcctgtctgttgtcacactttccaggctgtgtagttggggaccggttctgctctgagcccatctatgtggctcttagccctagaatcacttcaggatctctgaatacttggtaggaggaagtgaaagcagatgagacccaacaaaaaaggcaagcaggtagagagtgagtgctgcttctgctttttttattcttctgttctggtattttttacatatctggtcagagaagcctggaaatcatctttaaaaaatgtaagacaatgagaccagtctgaccaacgtggagaaaccctgtctttactaaaaatacaaaattagctgggtgtcatggtgtatgcctgtaattccagctactcaggaggctgaggcaggataatcgcttgaaccagggaggcagaggttttggcgagccaagatcacaccattacactttagcctgggcaacaagagtgaaattccatctcaaaaaaaaaaaaaaaaaaagacaagtacatcaatacggtcatttcttcttatctgtggattctgtatccatggatctaaccaaccatgaatgcaaaatattttctaaaaattaaaaacataaataacaacaataaaaagtaatataaaaatttaaaatacagtataactatttgtatagcatttacattgtattaggtattataagtctagagatgatttaaaatatacaggaggatgtgcataggttatatgtaaatactacaccttttatatcagggacttgagcatccatggattttggtatccatggagggtcctggaaccaattccccctggataccaagggatgactgtacattcttgataaaaatgaaaatgtgtggaatgtaaaaatgtatggaaacttgtctaattgggactctgtgctaaggctacttctggcgctggtacagccccaagaaagcaaaagctattgctattatcagcagtagtggtggcaccagactggttttcagtgcccagtgccaccactcccagacaggcatccctgtcatctctctttcacttgctctctagtgaagggaagatgagccagcggagctcaaagtccagccagcccatggtcaccaagcaggaagaagacggcactgagaggtgacaatgggctaatgctaacctcaaagaatgagttaggaagtgttgcctctgctcttatttttggaggaaattggggaggatgatgtcatttcttccttaaatatctggtaggattagctagtgataccatctgggcctagtactttcctttctggagggctattaattatcgattcaaatttctttaatagatgtaggcctattcagacaacctatctcttgtgcaagttttggttagtttgcctcttaaagaatttgttcatttcatctgtgaccaaatttgtaggtgtagagtccatagttttcctttattacctttccattgtccatggaattcgtagtgatgacccttctttcattctgatgatttccgtcttctctatttttttctttgttaggctggctagaggtttattaattaactctttgaaaagaaaatcagcttttggtttcattaagtttctcgaatgttttcctgtttcaatttttttaacttccactttaattttaattttttttcctgcttgcatcaggcttaaattgctccttttttctctagtttcctcagatgaaagcttagattattgacttagatctttcttcttttctattgtatgcatttaatactatacatttccttctaagtgctgcttttgttgcatcccattcattttaataagttgttttccttttcatttacttcaaaatatttttaaaattcttttaggacttcttatttgaccctagaactcttttggttaatctggaaatattttggaattttccagctatttttctgttactgatttctagtttatggtctgagaacaaacttttaggatttctattcttttaaatttgttaaggtatgttttatggcccaaaatgaagtacatcttggcaaatattctatgtgagcttaaaaagtacatgcattctgctattgttaaatggagtaccgtataagtgtcagttagaccaagctgattgctattgctcatcaggtcaactacacccttactgatttttctgcctgtgtgatatgtcaattaataaaaaagaagtgttgaagccttcaataatagtagtgaatttgtctatttctctttatagttctatcagtttttgcctcatacattttgccattagtttgttagttgcatacacattaaggattgtgtaccttcttggagaattgacccttttatcataatgtaatgtccctctttaatccctgacaattttccttgttctgaagcttctttgtctgaaattgatatagctactataccttttctttgattagtgttggcatggtatatcttgctccatccctttatgtttaacctatctgtatttttatatttacaatgactttcttatagacaacatatagtcgggtgttttgtgttttttatgtactctgttgatctcttgtcttttaattggtgttttagaccattggcattaaagtgattattaatatagttagattaatatctaccacatttgtaaatgtttcattgtacctatcgtttttatcttttcttccttttttcctgccttttctggtttaattgagcattttatgcttctattttctctcccttcttagcatatcaattatacttcctttaaaacatttttagtggttccctgaagtttgtaatatatatttacagcgaatcatgcccattttaaattacactatatcacttcatgagtagagaatacaccatgcaactgaatgtcccaaattctgccctcctgttctttttaacattgtgaaatgactgacaatgttaaaaagaacaggagggcttccagtcattccatttatttatgtcccataaccactcaatatgttgttgattctattaatttgaataaatggcttcattttaggttaacttggagtaggaaaaatgaaaacattttattatatctgcatttatttcttctctggtgctctttctttctctatgtaaatctgagtttctggcccacatcatttttccctttgcatgaagaaattctttttttttttttttttttttttttttttgagatggagtctcactctgttgcccaggctggagtacagtggtgcaatctcggctctctgcacactccgcctcctgggttcacgccattctcctgcctcagcctcctgagtagctgggactacaggcgcccaccaccacgcctggctaattttttgtatttttagtagagacgggatttcaccatgttagccaggatggtcaagaaattcttttaacattttcacatggagtaggctttctggcaaagaatttcctcagtttttgtttgtttgagaaaatctttatttctactttacttggaaggttaatttcacaggatatggaagcctacataggctttttttttctttcatcactttaaatatttctttccactttctttgcttgcatggtttttaatgagaaatctgatgtaattttatccttgttctttcacaggtaggggttttttgttttttttccctaccccctggcttttttcaatattttctctgtctttcgtattctgcagtttgaatataaaattgtaattgccaaactagactcttcttgtccattgcccagaaaagccacacattgagaatagtaggagttgcaggagagagagaatttaataatcgcagggccagccaagcgggagatgtttctgaaatccatctccccaagaattcagagactaggctttttaaaggatagttaggcagacagggggctggggaacagggaagtgctgattgcttaggttgggaatgaaatcacagggggttgaagctgtgttcttgtgctgagtcatttcctgggtaggggtcacaggacctggttaccaatcctgtggtattagctgttccattagaatgcaaggtctgaaaaatacctcaaaccccagtcttaggttttacaatactgaagttatctataggagcaattgcggtggttatggatcatgtgacctccagctacatgactcctgaaccataattctaatcttgtatccaatttgttagttttacaaaagtggttttggtcccagagcaaggagggggtaagttttgggaagggattgttataatctttgttttaaagttaaactataaactaaattcttctcattgttagcttggcatacacccaggaatgagcaaggacagcttgtgaggttagaagcaagatggagtcagttaatttagattcctctcactgtcatgatttttgcaaaggtggtttcaatatgtctaagtctagatcatttgatatttatgcagcttggtgtttgatgagtttcctgaatctgtggtttgttgtctgtcattacttttggaaaattcttggctatcactacttgaatatttcttctgctctattttctctttcttctccttctcgtattccaattacatatttgtcacactttctgaaattattccagcattcttggatattgtgttctgttttgttttttcctttttttttcctctttgcatttctatttgagaagtttcttttgacatatcttcaattcactgattctttccttggccatgtccaggctactgatgaactcatcaaaggtattcttcatttctgttacattgtttttcatttctagcatttcatttttcattatgtctttgagttgtcatctttctgctcacttaaccatctgttcatgcgtattgtgtgcttttttctttagagcccttaacatattaactaaccatagttattttaaatttctgtctaaaaacttgaaaatccatcatatctgagtctggttttgatgattactttgtctcttcacactgtgttacttcttgccttttggcatgtcttataattttttttttaagtcagacatgataagtcaggtaataggaactgaggcaaataagccttcaatgtgaggttttatattaatctgggtaggaaatgggccatatctaatgtttgttctagctgtaggtggcagaggtgtcaaattcctctagcgttcttgtttttctttcccctgctttctctgggtttctctgagaactcctttttaaatagtctgtttcttgtagttcttccagctgtaatctgctcttattatacaggaaccctgttgatggaatggtaacgtgtcagagggggaagtggtctataatcttatgattacatctcgatcttttaatggaactgcaccttgggctattacttttaaaagaatttctccctccacccttttttttcaatttttttgagatggagtcttgctttgttgcccaggctatagtgcagtggcgtggtctcggctcactgcaacttctgcctcctaggttcaagtgattctcctgcctctgcctcctgagtagcagagattacaggtgcctgccaccatgcccagctaattttcttttgtgtttttagtagagacggggtttcaccatgttggccaggctggtctcaaactcctggctttgtgatccacccgtctcagtctcccaaaatgctgggattacaggtgtgagccaccgtgcccagcctcacctccaccctttttagaagtgacaagatggccagaaggggctagattttggtagtcacccttcccctagaatggttaaagcattttccctggagagcaggcccttgtcatggagaatgctttggctttttaaaaacttttcttttccctcttcttgccagaaggataaagagatttttcttggggtttgtggaggtaaaatccataaaaggttgggggcctgccctgagatgatgacccccaggagtttctcatgctcatgctcctccacactcagcctccagcaattcatcaaacataccaggctatgacttcagtgcctgctgcctcagatagttgatctcggctaattctctggatttgcctgtatctccagattttggggcagtttgccttgtgactttggttatttgagagatagaagaaaagttgttaattcatagtttgttcagcagggttgttgttgttgttgtgaggatgggagcgatgacttccaatgtctttgcgtgttgaagctgaaaccagaggtctagtgaacttttacatttttgaagtttagacttttttcttaagacaaactttctttttgttttaaattttggttttattatagtattatcttatagccagagcatgtaacctgttcaatttctcttcattattatttattgaaattacttcagggccaaatacctggtatgatcttgtgtgtttaacacagtgttattaaaaatcaattttgccagtttttaaaacttacattttgtgtatctttgttcttttatttttatctacttgagaagctaaggactggaagtaagatgttttttaacagccttgaaagatttccccattagtaatctttaatcttactttttaaatgtgagtattgagaattttaccttctttctcatttgtatttgcttaatgaaacttatccatcttttgactgttaacatttttaatgttattttatctctgttatgtctcttgtagttagattctattttgaccatttataatttaagatggtagcttaatctgttttaaatatcttgttgcttatggattttttatttttatattttatgcctctttattttctataagaaaaagagcatgtttttctttctcattattttgtaaagtttgtagcctcattttgactctatttgttacacttgggtttctaattaattctttaatgtatatttctctaactgagaccatcaaatttataactatatcatttgaatttgtatttgaaataagttacttaactcaattttttacttgtcctcactcaatttaaaaaactttaccaagatatcgcaccactgcactccagcctgggtgacagagcgagattccgtctcaaaacaaaacaaaaaaaacattaaaatagaatctaaagtttaagattgaaattactataattttattatatgcagtatatatcctctctttttagaacagtgcttctcaagtatttgggttcaggatatttttatatttttaaaaattatcgagaaccccaaagaactggcttttgtttattgggttatatctgttgctatttacgatattagaaattaaaactttgaacacttaaaatatgtatttattcatttagaaataatagtagtgaatttattacccgtgaatatgtgatgtgtttttatgaaaaataataaaacttttcaaaatagaaataaattagccagaggattagcattgctttacatttttatacgtcttttaaatataagtagaaggcagctagaccctcctatctgcttctgcattcaatccgttgtgacatcacaggccatttagcctctgaaaaatttcattgtatattcatgagagaatgagaaagataaagggaaaataatatgttattatgtgaagagttttacttggtgacacctgaaagggtcttgcacaatcctagggggtccctaaccccactttgagaattactgttctaagataatttatacatttgagacatcagtattgtaactggttttaatgatgcttccagttcctctacaataaggctttactgatactgatttcttgattctgttaatgtagtacatcatcaaataattcgtcctacacagtgtcagtaaaaatggagtagggtgatctataggaacaaacaattcccaaatctcaacgggtcaccagccctctgcacagaggaccctcatcctggactctgtctctggctgaggagcagccaccccatctgaaatgacagtcactgtggtagaggaacagagagcatgcctaaccaggtgctgcctctgagctcttctgccagagtgatacccattgctccaagggaggtacaatcttaccttggcccagaagaaaagaacattgaaaaatgtgtgaccaacacagaaggtgcatgagcaaaatattctttgagtccttgtctatctaagtattgattctgccctcatacgtgaatcattgaataaggtatacatttttccattttaatttttttggacccattctcaagaactgaatgggtatacactttttttagtagtttcctcttacctctaggtttataggtttgcatcattgctttagacatttagggtttcaaattcacttatttttccctttagggcttttccccatatgttctgggaaattctccctcctttatcttataaaaattttcattcactttttaaaaatttcacaatcattttgaatttccaaggtcgttttattttctggttgtttcttttctgcatggaatttttggtacaatatattctctttctgtgtgataatatttgttgtttagaaattcttttttgttccctgaaacatctgtatttccgctagggtaattttttgccttttgcttatcttggttttactccttaatgttgtaggtttccacaaatgctgtggtctgttgtagtctgttcatgcttaccagcaagatgctgaaaagtaaacttgaaactccatttaatgagatgggcttgcaaacttgtgggcttcactgagcaaataccaaatccctgaaggtaaaggccttttctctgagtcatttatatttttcttaagaggaaacctccagtcttctgcctgattgtgggtgttctgtgtcgtagagcaaactgtttttaattttgcctttggaacaatctctcgattttcatctctgcatctccttctcaaccaccactgcatctctgggaggctgcaggacacgctggatccttttctgacctcaggaagcatcctccaccttcaatagcaatgagtacccctcagaccactttttctctttcatacttaggttaaaatttctcatctaattcctttctcttcatcattgtaactttaattcctttactgtcattttaggagatattctagtgaaagaggagaaaaacagttgtcattaatcaacgattttaaaccagaaggctttttcttttttaaaagaattcaatggataaatggtgcatgtctggagaatgggaaattttagtgatcctctattctatcctgatgcatgtttaaggaatggaaagtcccaatgaccatttcctggtgggataaaaaaaatcctggaagtcttcataccgtttagaaatacagataaatttgttaaggcctattagcaaggggaacaatttagcaagtaggaatcagaactacaaacttttgtgattaaaaattagtttcccaggcacagccttaatgtctgaaatccagaggtctccaagtttagacagattaatgtgtcctagttttgcatatccacacaaatctccatgttggaccagagaaagagtgattttcttgtgactgtttttttttttttttttttttttttgagatggagtcttgcctctgtcactcaggctggagtgcagtggcacgatctcagctcactgcaagctccgcctcctgggttcacgccattctcctgtctcagcctctcgagtagctgggactacaggcacctgccaccatgcccggctaattttttgtatttttagtagagacaggtttcaccatgttagccaggatggtctcgatctcctgaccttgtgatccgcctgtctcggcctcccaaagtgctgggattacaggcgtgagccaccgcgcccggccttcttgtgtattcttaatcaaaccttaccagatgagagtctttgaaccaattttatgatgcagaatgccaccctccttttgcagttacagatggaggagatacatctcctttacatctcctgagatttcctctctttgttgttaactaagaagacttgcagttcagtgttaggttctgtaatatctcagccagatttttatttctttctctgtaagttaaagttctccagagaaacagaaccaataggatgtgtatatacagagaaagagatttgttataaggaattggctcttgcaattatgaaggctggcaagtccaaaatctgtagtgtgggcctgctgtttggagacccaggagagctgatggtgcagctccagtctgaatgcagtctactagaggattctttctttcttggggacactagtcttttggttctattcaggctttcaattggttgggcaagccccacccacattatggaaggcaatctgccctactccaaattcaccaatgtaaatgttaatcttatccaaaaacaccctcaaagttggcatataaaattaattaccacagtatcatgtcaattcctataaagattttgacatcttttaattgcatattttccctagagagttcaggtgaaggtctctttataatagtttgattggaacagggtgagcctttttacttctatgtacaggtctttcttaagttcactgttttcatcttttccaccttgatttttcccaaaataaataaattccattcattctggtctccctacaagaatgcttattttatacatgttggctctccattggccatccttcatgtctaaaatcttctaaccaccacaaacctcttggaaactcagtgtctacttccacgttgtatctttgtttcttaggatggtcgcagagatccagaacgtagagggtcagaacctgcaggagcaggtttgccctgagcccattttcaggttcttcagagaaaacaaggtggagattgcaagtgcaataacaaggccatttcctttccttatgggcctccgagaccgctccttcatctccgagcagatgtatgaagtaagtaagaatttccaaatgatgataaaccaggtccatactcaattatgccaaacttcaagatgcaatgagcaggctaaagggcctcctgtgagtggggaccttcaccattctgtaggttaggaggtgacaggagaagcaggcatcacagaaaacctcccttcttctgtagtaaatgttgggggagggccacagtgagggaggtggggcaggagagagaatgggaatgctgtatgggtgcagatcatcctaggtacttgtaaacaatctactaatggtagccataattaaaataaataagtgacctaggcagcattttattccaaagcctacttatttgaaacacttgaaactgagatttttttgaaactcacagtgaagttgtgtcattttaggttacatttggaagtggatgcttgctactgtctctccaaatcattgtttgatctttggacatttctagagccctagaatgcaagttaatgttagcagtggatgcccttagggatactgaggacaaggcttcttcttgtctttgtgaattttctgtgccctttggccaggagtcatagtgggggctggttgattggtttcctggagctcgtcaggccaggccaatcctagtagtggttattgtccatgcaacagaacagccttgttaaggccactcctgaaataacctggccaggctctaaagccatacacaacattcaactttgaacccacacttattatttaaaattactctctccccttaagtgtacaacaatgtcagagagtcaggttcaaaaaattagagtgtatttttatggtggaggacatttaagaagtcatccaaatatacgcaaaattctaacatttcacaagagaacagatgttctatctacaacctaaaagtcttttgtaacccataaatctctagctacataattctccatttaatatttttaagcattttcaagaagcttttagaaacctggtcccagtgacaagagtgatgtattgtgtactcagtgaactggagaagacatttggctggtcacatctggaagcattgttcagcaggattaacctgatggcctatcctgatttaaacgagatttacagaagcttccagaatggtaactatagctctcaacagctttgggggattcaagcccatttcattcattgattcattcattcactcttcattcatatttgacaaatatttgactgagtgactattacatgccaagcccagggggaatataatgatgaaaaaacacacatgtcccatgtccttatggagtttacatacagtgggagtgacagacgttaaccaagtaatcctgcaaatggttgctcagccaggacttgattttgatgctgtaaaacatagggttgaagtctctatttttttgaaggaatacatgagtgatgtcttttcatgggaaaggaggaagccttctctgatatttgcagatatgttcaaagataaaacaattttctttgtattagaaaatttatcatccagtgcagtcctgtgtcaacttgtttctccaaacaaagactggagaagtcacgaagagagcctagcacatactggtacactgaggaggagctgcatgtgaaagctatgaagacagaaaagggggttggtgggggcctttccgaaccatgtggttgaattgcagactgtgggaggcagggtgtgagagctgactctggagaaagaagttgaagtggattctggaaggcttgacaccctgtgctaaggaatctggagtttaatttttggaaaataaagaaggaataaagggcatttaaacgggaaaagtaaaagaa

SEQ ID NO: 14205 - DNA, 814 bp, Homo sapiens
gcagttggcagcttcacctcagagctgcaggaaggaacggggcagtgaaaatcgaatcgggtgtgatcctaggccaagctcatggcccagcagggccagcaggggcagatggcaagtggagacagcaatctcaacttcaggatggtcgcagagatccagaacgtagagggtcagaacctgcaggagcaggtttgccctgagcccattttcaggttcttcagagaaaacaaggtggagattgcaagtgcaataacaaggccatttcctttccttatgggcctccgagaccgctccttcatctccgagcagatgtatgaacattttcaagaagcttttagaaacctggtcccagtgacaagagtgatgtattgtgtactcagtgaactggagaagacatttggctggtcacatctggaagcattgttcagcaggattaacctgatggcctatcctgatttaaacgagatttacagaagcttccagaatgaaaatttatcatccagtgcagtcctgtgtcaacttgtttctccaaacaaagactggagaagtcacgaagagagcctagcacatactggtacactgaggaggagctgcatgtgaaagctatgaagacagaaaagggggttggtgggggcctttccgaaccatgtggttgaattgcagactgtgggaggcagggtgtgagagctgactctggagaaagaagttgaagtggattctggaaggcttgacaccctgtgctaaggaatctggagtttaatttttggaaaataaagaaggaataaagggcatttaaacgggaaaagtaaaagaa

SEQ ID NO: 14206 - DNA, 3244 bp, Homo sapiens
cttttcctctttgactgagcaccgaggggcagttggcagcttcacctcagagctgcaggaaggaacggggcagtgaaaatcgaatcgggtgtgatcctaggccaagctcatggcccagcagggccagcaggggcagatggcaagtggagacagcaatctcaacttcaggatggtcgcagagatccagaacgtagagggtcagaacctgcaggagcaggtttgccctgagcccattttcaggttcttcagagaaaacaaggtggagattgcaagtgcaataacaaggccatttcctttccttatgggcctccgagaccgctccttcatctccgagcagatgtatgaacattttcaagaagcttttagaaacctggtcccagtgacaagagtgatgtattgtgtactcagtgaactggagaagacatttggctggtcacatctggaagcattgttcagcaggattaacctgatggcctatcctgatttaaacgagatttacagaagcttccagaatgtatgctatgaacactcacctctccaaatgaataatgtaaacgatttagaagatagacccagattactaccatatggtaaacaagagaacagcaatgcctgtcatgaaatggatgatatagcagtgcctcaggaagccttgagctcctcgccaaggtgtgagccaggtttctcttcagagtcttgtgagcagttagctctcccaaaggctggtggaggagatgctgaagatgcacccagcctactaccaggtgggggagtgtcctgtaaacttgctatacaaatagatgaaggagaatcagaagaaatgcccaagttactgccttatgatacagaagttctagaaagcaacgggatgatagatgcggcaaggacatacagcacagcaccaggggagaaacagggagaggaggaaggcaggaacagtcccagaaaaagaaaccaagacaaggagaagtaccaagagagtccagagggaagagacaaagagacctttgatctaaaaactccccaagtcactaatgaaggagaaccagagaaggggctctgtctactaccaggtgaaggagaagagggcagtgatgactgttcagaaatgtgtgatggagaagagccccaggaagcctctagctccctagcaagatgtgggtcagtttcttgtttatctgcagagacctttgatctaaagactccccaagtcactaatgaaggagaaccagagaaggagctcagtctactaccaggtgaaggagaagagggcagtgatgactgttcggaaatgtgtgatggagaagagcgccaggaagcctctagctccctagcaagacgtgggtcagtgtctagtgaactagaaaatcacccaatgaatgaagaaggagaatcagaagagcttgcttctagcctgctatatgataatgtaccaggagcggagcaatcagcatatgaaaatgagaagtgttcctgtgtcatgtgtttctcagaagaggtgccaggaagcccagaagcaaggacggaaagtgatcaagcgtgtggcacaatggatactgtggatattgcaaacaactccactttgggaaaacccaagaggaaaagaagaaaaaagagggggcatggctggagcagaatgagaatgagaaggcaggaaaacagccaacaaaatgataatagcaaagccgacggccaggtggtctccagtgaaaagaaggcgaacgtgaatctgaaagacctttccaagattagggggagaaagagaggcaaacctggaacccgcttcactcagagtgacagagctgcacagaaaagagtccgatcaagagcttcaagaaagcacaaagatgaaactgtggattttaaggctcctttgcttccagtgacctgtggtggggtgaagggaattttacataagaagaaattgcagcaaggaatcttggtgaagtgtatacagactgaggatggaaaatggttcacccccacggaatttgaaatcaaaggaggccatgcaagatcaaagaactggaggctgagtgtgcgctgtggcgggtggcccctacgatggctgatggagaatggatttctgcctgatcctccaagaatacgttacaggaaaaaaaagagaatactgaagtctcaaaacaatagctcagttgacccttgtatgagaaacctggatgagtgtgaggtgtgccgggacggaggggagctgttctgttgcgacacttgttcaagagtcttccatgaggactgtcacatcccgcctgtggaagctgagaggaccccgtggaattgcatcttctgcaggatgaaggagtctccgggaagccaacagtgttgtcaggaatctgaggtcctggagaggcagatgtgtcctgaggaacagttgaaatgtgagttcctcctcttgaaagtctattgctgttctgagagctccttttttgccaagattccatactattattatattagagaggcgtgtcaaggcctgaaggagcccatgtggttggataaaatcaagaaaaggctgaatgagcacggttacccccaagtggaggggtttgtacaagacatgcgcctcatcttccagaaccacagggcctcttacaagtacaaggattttggccaaatgggatttagactggaggctgagtttgagaagaatttcaaggaagtgtttgctattcaggaaacaaatgggaacaattgactggattagtggatgctgaaagcattcagcaaatggcaccctaaaatatgccgctggtttgccactgacttcaaaatgaggtcacttgggcacagcacatgcagggaggggcttttctctgagcctccttcatctgcccaaagacaaatcctcaaaaggaaattcaatcatcatgaatcacaaccccaagtatctcatcagccagggaagagtaagtgggatcacagggaaggatgttggcagcgacaccatcccatacaggctcttacctcttctcctgagggctgctccagacaacatttattacccagaagaccttttgtctgaaaaccagccaagctttattcaggacacacttcttgccttcactttcccacttccgtggccacctccatgcagaagccctaagcccacattctttcgatagctcacggtggtgcatgagtgtccatcatctgactcttctcggagtctcatattttgtgggactcctgtgcaaacatatgttattaaaatttttttcctcctgtt

SEQ ID NO: 14207 - DNA, 2895 bp, Homo sapiens
ctctttgactgagcaccgaggggcagttggcagcttcacctcagagctgcaggaaggaacggggcagtgaaaatcgaatcgggtgtgatcctaggccaagctcatggcccagcagggccagcaggggcagatggcaagtggagacagcaatctcaacttcaggatggtcgcagagatccagaacgtagagggtcagaacctgcaggagcaggtttgccctgagcccattttcaggttcttcagagaaaacaaggtggagattgcaagtgcaataacaaggccatttcctttccttatgggcctccgagaccgctccttcatctccgagcagatgtatgaacattttcaagaagcttttagaaacctggtcccagtgacaagagtgatgtattgtgtactcagtgaactggagaagacatttggctggtcacatctggaagcattgttcagcaggattaacctgatggcctatcctgatttaaacgagatttacagaagcttccagaatgtatgctatgaacactcacctctccaaatgaataatgtaaacgatttagaagatagacccagattactaccatatggtaaacaagagaacagcaatgcctgtcatgaaatggatgatatagcagtgcctcaggaagccttgagctcctcgccaaggtgtgagccaggtttctcttcagagtcttgtgagcagttagctctcccaaaggctggtggaggagatgctgaagatgcacccagcctactaccagtgtcctgtaaacttgctatacaaatagatgaaggagaatcagaagaaatgcccaagttactgccttatgatacagaagagacctttgatctaaaaactccccaagtcactaatgaaggagaaccagagaaggggctctgtctactaccaggtgaaggagaagagggcagtgatgactgttcggaaatgtgtgatggagaagagcgccaggaagcctctagctccctagcaagacgtgggtcagtgtctagtgaactagaaaatcacccaatgaatgaagaaggagaatcagaagagcttgcttctagcctgctatatgataatgtaccaggagcggagcaatcagcatatgaaaatgagaagtgttcctgtgtcatgtgtttctcagaagaggtgccaggaagcccagaagcaaggacggaaagtgatcaagcgtgtggcacaatggatactgtggatattgcaaacaactccactttgggaaaacccaagaggaaaagaagaaaaaagagggggcatggctggagcagaatgagaatgagaaggcaggaaaacagccaacaaaatgataatagcaaagccgacggccaggtggtctccagtgaaaagaaggcgaacgtgaatctgaaagacctttccaagattagggggagaaagagaggcaaacctggaacccgcttcactcagagtgacagagctgcacagaaaagagtccgatcaagagcttcaagaaagcacaaagatgaaactgtggattttaaggctcctttgcttccagtgacctgtggtggggtgaagggaattttacataagaagaaattgcagcaaggaatcttggtgaagtgtatacagactgaggatggaaaatggttcacccccacggaatttgaaatcaaaggaggccatgcaagatcaaagaactggaggctgagtgtgcgctgtggcgggtggcccctacgatggctgatggagaatggatttctgcctgatcctccaagaatacgttacaggaaaaaaaagagaatactgaagtctcaaaacaatagctcagttgacccttgtatgagaaacctggatgagtgtgaggtgtgccgggacggaggggagctgttctgttgcgacacttgttcaagagtcttccatgaggactgtcacatcccgcctgtggaagctgagaggaccccgtggaattgcatcttctgcaggatgaaggagtctccgggaagccaacagtgttgtcaggaatctgaggtcctggagaggcagatgtgtcctgaggaacagttgaaatgtgagttcctcctcttgaaagtctattgctgttctgagagctccttttttgccaagattccatactattattatattagagaggcgtgtcaaggcctgaaggagcccatgtggttggataaaatcaagaaaaggctgaatgagcacggttacccccaagtggaggggtttgtacaagacatgcgcctcatcttccagaaccacagggcctcttacaagtacaaggattttggccaaatgggatttagactggaggctgagtttgagaagaatttcaaggaagtgtttgctattcaggaaacaaatgggaacaattgactggattagtggatgctgaaagcattcagcaaatggcaccctaaaatatgccgctggtttgccactgacttcaaaatgaggtcacttgggcacagcacatgcagggaggggcttttctctgagcctccttcatctgcccaaagacaaatcctcaaaaggaaattcaatcatcatgaatcacaaccccaagtatctcatcagccagggaagagtaagtgggatcacagggaaggatgttggcagcgacaccatcccatacaggctcttacctcttctcctgagggctgctccagacaacatttattacccagaagaccttttgtctgaaaaccagccaagctttattcaggacacacttcttgccttcactttcccacttccgtggccacctccatgcagaagccctaagcccacattctttcgatagctcacggtggtgcatgagtgtccatcatctgactcttctcggagtctcatattttgtgggactcctgtgcaaacatatgttattaaaatttttttcctcctgt

SEQ ID NO: 14208 - DNA, 3169 bp, Homo sapiens
acttttcttttcctctttgactgagcaccgaggggcagttggcagcttcacctcagagctgcaggaaggaacggggcagtgaaaatcgaatcgggtgtgatcctaggccaagctcatggcccagcagggccagcaggggcagatggcaagtggagacagcaatctcaacttcaggatggtcgcagagatccagaacgtagagggtcagaacctgcaggagcaggtttgccctgagcccattttcaggttcttcagagaaaacaaggtggagattgcaagtgcaataacaaggccatttcctttccttatgggcctccgagaccgctccttcatctccgagcagatgtatgaacattttcaagaagcttttagaaacctggtcccagtgacaagagtgatgtattgtgtactcagtgaactggagaagacatttggctggtcacatctggaagcattgttcagcaggattaacctgatggcctatcctgatttaaacgagatttacagaagcttccagaatgtatgctatgaacactcacctctccaaatgaataatgtaaacgatttagaagatagacccagattactaccatatggtaaacaagagaacagcaatgcctgtcatgaaatggatgatatagcagtgcctcaggaagccttgagctcctcgccaaggtgtgagccaggtttctcttcagagtcttgtgagcagttagctctcccaaaggctggtggaggagatgctgaagatgcacccagcctactaccaggtgggggagtgtcctgtaaacttgctatacaaatagatgaaggagaatcagaagaaatgcccaagttactgccttatgatacagaagttctagaaagcaacgggatgatagatgcggcaaggacatacagcacagcaccaggggagaaacagggagaggaggaaggcaggaacagtcccagaaaaagaaaccaagacaaggagaagtaccaagagagtccagagggaagagacaaagagacctttgatctaaaaactccccaagtcactaatgaaggagaaccagagaaggggctctgtctactaccaggtgaaggagaagagggcagtgatgactgttcagaaatgtgtgatggagaagagccccaggaagcctctagctccctagcaagatgtgggtcagtttcttgtttatctgcagagacctttgatctaaagactccccaagtcactaatgaaggagaaccagagaaggagctcagtctactaccaggtgaaggagaagtgtctagtgaactagaaaatcacccaatgaatgaagaaggagaatcagaagagcttgcttctagcctgctatatgataatgtaccaggagcggagcaatcagcatatgaaaatgagaagtgttcctgtgtcatgtgtttctcagaagaggtgccaggaagcccagaagcaaggacggaaagtgatcaagcgtgtggcacaatggatactgtggatattgcaaacaactccactttgggaaaacccaagaggaaaagaagaaaaaagagggggcatggctggagcagaatgagaatgagaaggcaggaaaacagccaacaaaatgataatagcaaagccgacggccaggtggtctccagtgaaaagaaggcgaacgtgaatctgaaagacctttccaagattagggggagaaagagaggcaaacctggaacccgcttcactcagagtgacagagctgcacagaaaagagtccgatcaagagcttcaagaaagcacaaagatgaaactgtggattttaaggctcctttgcttccagtgacctgtggtggggtgaagggaattttacataagaagaaattgcagcaaggaatcttggtgaagtgtatacagactgaggatggaaaatggttcacccccacggaatttgaaatcaaaggaggccatgcaagatcaaagaactggaggctgagtgtgcgctgtggcgggtggcccctacgatggctgatggagaatggatttctgcctgatcctccaagaatacgttacaggaaaaaaaagagaatactgaagtctcaaaacaatagctcagttgacccttgtatgagaaacctggatgagtgtgaggtgtgccgggacggaggggagctgttctgttgcgacacttgttcaagagtcttccatgaggactgtcacatcccgcctgtggaagctgagaggaccccgtggaattgcatcttctgcaggatgaaggagtctccgggaagccaacagtgttgtcaggaatctgaggtcctggagaggcagatgtgtcctgaggaacagttgaaatgtgagttcctcctcttgaaagtctattgctgttctgagagctccttttttgccaagattccatactattattatattagagaggcgtgtcaaggcctgaaggagcccatgtggttggataaaatcaagaaaaggctgaatgagcacggttacccccaagtggaggggtttgtacaagacatgcgcctcatcttccagaaccacagggcctcttacaagtacaaggattttggccaaatgggatttagactggaggctgagtttgagaagaatttcaaggaagtgtttgctattcaggaaacaaatgggaacaattgactggattagtggatgctgaaagcattcagcaaatggcaccctaaaatatgccgctggtttgccactgacttcaaaatgaggtcacttgggcacagcacatgcagggaggggcttttctctgagcctccttcatctgcccaaagacaaatcctcaaaaggaaattcaatcatcatgaatcacaaccccaagtatctcatcagccagggaagagtaagtgggatcacagggaaggatgttggcagcgacaccatcccatacaggctcttacctcttctcctgagggctgctccagacaacatttattacccagaagaccttttgtctgaaaaccagccaagctttattcaggacacacttcttgccttcactttcccacttccgtggccacctccatgcagaagccctaagcccacattctttcgatagctcacggtggtgcatgagtgtccatcatctgactcttctcggagtctcatattttgtgggactcctgtgcaaacatatgttattaaaatttttttcctcctgtt

SEQ ID NO: 14209 - DNA, 10536 bp, Homo sapiens
gggttttttttctgcataactaaaggagggtttcggagatgagaacacttacagaaaatatgagagtgtggtatgtatattttcagcactactatatatatttttctcttacaattttgaaacatctttttatgtgttttgttttgtaaaaaataaagctgattaattaaatgtaaaataatatgactcttaaaaatatctctgttgggctgcgggcagggaggaatggggagttgtttaatgggtacagggttttagttttacaagataaaagagtcctggagatggatggtggtgatggttgcacaacattgtgaatgtattttaataccattgagctatgcacctaaaaatggttgagatgataaattttatgtcatgtgtattttacccaggtaaaaaattggaaaattggaaaaaagaaaattaaaagcacatcatctgtcacatttaaaataaaacgattcttttaaaaaacctgaaaaatttcatttaaatacaatatgaagaaaggcaaatctggaagggactggagtctactcctttcggtagcttggcagagagatgtcaaaaggtcagagttacctcaacagaactgaccatctgacactgactccagaggtttcccctctctaacaaagtcacttctctgaccagggagtgttcataattgtatagttgcatagacattccctgtctccctaatcctataacgtgtagagcattgtgagagtgggcatctcactactgggctgctggccacggggtgtgcagagtacgtatgtctgccctaaatatgggataataagaatttggagaattgtattggaaatttccctccaataacctttagtttgtatctacaccacgtggtgcccataatgtctatgaccccttttcataacacaataatgaattcataaactatcctttgtcagatcattattcaaattttgggttacagaaagtatggtttctttcatttttttttcattaaaaaaaaattaatagctaatttgtgccaggacattaccatctagcctagaagagacacattatgtaagtaattacaatagagtatttggaaccttccaaaagagccagtgctgggtgctgtagaaattatgggaccagcttggctaatttaggggtcagagtatgtattcctgagatagacataagtcaacacgactgatgaaaaggagataactaaacatttatggggagtagtgtaggttcagaatatagcatccaaagagaatagcacatgccaaggatcaaaggggagagaaatgaaatgggaagaaatgaaagttcagagtggttgactggagttttgagtggaaagagatatattaatagttggagggtaaggcatgagttagactggatagaactttaacaatcacattaaggacagtgaacattaccctaagggcaataggaggccatggacaagatttaagcatggaaataaactaattagattttaatgtagaaaagaagagggtgaaccaatagaccttgtcaatatgctaatagagttcagttagtcacggatgactaaggtttttgcttggcacctgggtagattaagttcctcatttcaagttaaactacaacaggctcccaagggcctgtgaaaccctacataatctgattcttgtttactttttcacttcctaccaccttctttcttcatcatcaccaacaacactggtctttcctctctgcctcaggttctttgcacttttgagtccctctgcctggaccatccaatccaaagtgactcccaccccaacctgcaagtcactattgtaatcctatccattattttctttcatcctgtcatcagtacttgaaattatcttgtttatgtgctttctagtttatattctttccttcccccagccaggatgtaacctccatgagctttcccctttgttttttgcttactttcttactttctctctttaaaaaaaaaatctgtcttcagctttcagaatgggtatatacagttagtgctcactgcatatttgttggaataaatgtctgaatggtacttagaagactaggtttttggtaaagaaggtgaagttaatttcaggcatattgagactgtagtgtcaatgggagacttgcaaacaaagacgcccagtgtgcagctggctatgtgtttcttgaagacaaacctgagttgaagacgtagagttgggagccatcagtataaaggtggtaattgaagttgtgagagtgattgacaaagctcagaagtgtgagttgaataatctgactagtttacaatgaaccaaggaggcccatagagaatacacataacatggtgagagggcattgactaataagtagaatgggggagaaagcagcttgtctctccttcctgcccaggaaggtcacttacttttcttagaatggaatcatttctgttaagtgtcttaaaaggacaccagccctgtgattttggacactgggatcatactaatgataaactaagtcagggaagaggagctttaagccactggcttaggctgccatctattgctctgtttccttttacagctagagttgtctacatatgttatcacctcccattcattatccttcccacacaactggctcctgcctccatcaccaaaatttttcttaaattttccagtgattctttgtgaccaaactcaaggccctcttctctgaatttatcttagtctctcagtatagtcaaccattccctcttggcttgctaacatgttctttcttggtgctcctctgtcttcactggtctcgttccctcagtctgtcttgctagattcctcttccactgggattacttagagcagggctaggtctgtggttctcttttcttctcccatagatcagaatacctttattttattgataactcatatatatacatatatctggtccagatattatatattatctggtccagattttatatatatatatatatatatatatatatatatatatatatatggaccacactttttcagtgagtgccaaattgccatattgtggggaatataacttcctgatttctcagtgttcctgtaaaaagccctagtcccggagacacagaaatgtatgcaatataaatataggaaatacttgctttcacttccccagaaacattttcctcttcccacaccatgagaattagagctatagctatttttctagttaattactctgatctagagggagaatagaacctctcttatctcctgagatggccaaatgggttcacccaggactagcttcctaggttaaatcctaaagtaccaggaaaactggagtggtctttccctaggtatttatatatcacaaggggtaaagcccagaacttggagacatctttaggttgtaaaagccagcaacacctagagtttctctggcctttggaaagatgcatttaaattccaaaggttaggatggagagctttggaacgaggatcttttccattttatctcaaagcagcaaagttttttcttttcctttcaggaggaaaggatgatggctatccctctcatgtatctaaacagaaaaatccatcattctacatcccttatacatgagttgtagtctattttgaatagaaagattccattagctctcttagcattgcctttgggtttgtgtatgggagacagacgctgcaatattgctctggctgataagctggttgtgaatatcagtaaagaattattttccctgaccagataccttgtgttcctgcagcactcatatatataaggagataccaatgcaagtggagtaacatcttagaccctttacagttcttgacaaaacacacatctatacacagctgcatagatggctagcagaaacctctaaaggaacaggtcaataattgaactctaagagttatcccccaatatatttgcatcttccctcagcaatgggcattaccacttacttgttcaagccagaaattgaagagtgggccttgatttttctctttctcatctgtagctaataatatgtcaaatcctgtcaacaatacctgcaaaactgatcttgaattggcactcttctctgcatctccactgtcagatctgaatccaagccaccaagaactctcatggcatctgccccaaaatggctgccctgcctccattctttcccagctccaactcattctttacaccgtagcaaaattgagcttacattgtgtcacttcactgactaaatctcttcaatggcttcccattgcatttagaataaaattcaaccctccacagcttgacctacaagccctgcatgagctgtttccagcctccagcttcctcttgtactctcatcttacctcctgggaggctttttttcttatgtctcctttttggagttgaccagatacatctttttcttttctttcctaaaaagaaaggataatgttttatagttacaaacattgatctcccaatcttgtatgtcaatgatattcagcttttacttttggtcttcaaaccacattgctagaagttcattggtgaccttaggtgatggtacttcagggagtaataggggaagaaggactctaaaatgacagaggaaaaggagaaacgaagaaatagagacagggagtttaggtagctcatttctagaagtttggttgtgaaatgaaggagagagatatggaagtagttgaagtgagatgagaatcaagaaaaagcattttttaatgagctgtgatacatgtaatgcagattcttgtgtgagacatactgctttaatgaatacttgagagagaagggatcatggatactataagatgaggcagaaggattgtcttagaagagaaggagggaactcggagaggagggagacagatgtagttagggtttgtaggactagcagcacaaataaggggattctcatctgatatctccttatggtgcaggagggaaagtcactgattgagcaaaaagcaggaggtgagggggtcagaggtttgaaaaatagggcttgaggtttgaaaggattattgcaggaagtagcattgtcacacagtaaggagagatgatttgtgctggaaccatgaagaccagtgagtgcactctgccctgctgtggaactctctccagcactgctggctttcagatgcagtgtacaggaagtaggtaagtagggtcttccaagacttgccagagagttctaggaaaaggcagagaggaaaggcaggtttaagataatggcaatagattactgaaatgatgaatcttggactgtgagttagtgtcaatgttaaaaagctgggaagcaaagaaaagcagatgatggcttggaaggaggaaaggccagtggactggtgatccaaatgaggttgaaggacaacttcagaggaaacaacaaataaataagcacagaaaaatatatttttgattctttttcttttgttaggattgggctgggaaagagtgatcagaggttgaatgatagctataaaaggagaaaagctcaaggacaggtatcaaaaaaggaattctgaaattaactgttgggaaatcgagccaggtttgaatgacgatagggtctatagcttgcctttgggtatgggaggccaagaattggtggaggaaaaagtcatggaaaatgagaagatgaaggatttgaggggccagagtattggataacagagttgtctgttatccgtgtgtaccctgaaggcatctaggatgatgctgggacttgaaatgacagaaaagcagcttttgaaaggattattggggaaattattggatgatattgatgatgagtgagtgaacattttaattgaatggttaagactcaaaggagaggatcagggaggaaggggctggatggggccagtaggcagcaaaggacagacatctaacctgtctctcaccatgaggtgtgagtgatggatggcagagaatgcctagccatgtcttaagaggaagtgggttcctctctggggaaccaactttcagttaaagagggaagtgcaattaacactctaagaagttgtgaatataggagattgattttttcagaacaggcaattccaatggcatatttcaatacccccaaatgccttctggtttcctgataattttcataaaggcctttttggaagatgcagcaaatggaaactgcagaaacgaactgtgtgtggcatcaggactgtggtcacatagtggtgctcttgacaagatacagtcagaaaaacagaaagcaactctgaattcacccttctgacctctacagaagaaaggcttttcttacctttcttgtctgaaggtgtgctggacacctcctggggctcttctgggtcatttggttctggagaattatctcttatctctgacaaaagaaatataagtcatttcagagctcagatccagtgaagagaaagtgctgagggaagtcaatgcaagaactagaaaagtagaaagtacatgcagcccagggccgggaatctgcttgccctaagaattccctggctctgtcttgatttttgccaacttgtggttattgttacctgtgcgaccatcacagggaactagggcacaactgccccacagcagaggctcagtctgatccttttagagagattatcttatggatggaagagaagtgagtgaagaaggtgcaatgaatggaaattgcaggaataaactgtgctgggtatcatgactatagtcacatggtttctgctcccagcagcccctgctcaaggaatgaagctgagagcggaaagtggtgatattgaaatctgatgtccatgatgaaggggaatgtctttgctgtatgaaaaatacatcttattgctttgacgtctatgtgtggatattctttaactgctctatctgtggttattttacttggagaaatagtggagaaggctaaatgccttatatatttctgtatataaggattgtttgaagaaagcaggagctagcctgtgcttgctagcacctgttaacagcaaagacatataaagctctgctagtttttgctgcacaaagaaagacagagaacttgaagccataacaaataaaggctcatctcacatgaagctgtcacctttttctttacacactgcattgagattggtctcaaatgctggcctgcttaggaataggtgactgaggcaggtggcaagcagtcattagatctttggaataatttattacctttcaagttatattcataatatcaactcttaaactccaagtgatatagaaatgaccagggttgaaagtgaaaattccccacagtcaggtgggggcttggaaggaggaccatccatgtctgctgcagcaattcactattagggccacacagtgtttttgttcatttgctttgcattttgacagagccgttttgagcactactttattgaagtggcctcagaagagtggctctgtcaaacagtccagcctgactcagttcccttgctttcccctggggttcctgccacaaccctttgtggcaggtgaatgtttccctttcaggcgctttgtggcatttggagtccaaacctacaggcactggtggggctctgtccatcatcatccgtggccctatccaagtctaccttttccagacttgcctcctttgccctcccccagggactctgtatccattcagaggtcgggtctcctgcctgttcaagctcccaagtgctgggtgaactggaagctgggccaagattgctgagaggcaggaggagagccccctctctagaagatccgaatggcttttcctcttagtaaacacagaaacaaaggcaagcttttaggttgaccaaaccaagattacctggcatagagcccaagggagagtggggcatctcttgagggtcttctttatctcttatttgggggatcaggttgtcactggccactgaatggaggaagaaaaagttttagatctcaggaacagcaagcagggaccagaatgaggagaaaagagaatgctctattccaacaagtaaaaatgacggggtaacagcaaccaaggcctgggaaaggatggcatagagtgggaaagtaagcaaccattcactctcaattagccacttgttcttccattgctgttagcttcctgattatgttaacctttttggatggtaggtattagaggagtggatgcaatattatttggatcgaagaggacccctcttctcagtactggagagctcagaatccatggtatcatttttgacaatgcccaatatcataccattcttacgtttaatgtaatcaaactccattatgatgatggtttggggaggacaagtgatacaatttgagaagctaaatattaggtctagcagacctttaaacattttatcatcttttctagtaattttgataacattgttcttagaatccaaaccatataaaaatgaagaatgttgaaactctaaggcccccataatcaggtgggggtgaggaatcagctaagggtcactagtgtgagtgttacgcaggttacttgtcaattcagaatggtgttttggttgttggtttgttttgcattgctgcgttggtgaattggccccttctgtttcttttcctttgtattgctcagttctttttcccagggttcccaccatagcctcttggttggcagacgcatgttctcccttcacagtcaccttgagctaagcggtatcagccccagtcagtgttaccttgcacagtgctagtgaggaggctgggcatctcttctgagtcttcttccgcattcattttggatgttaacttgtcattggtcactgaaggaggaaaggaaattattacagattgcagggactggatgtcagggagaagagtgaatgttaaaagtgcctggggcagatagagcatcaaggcacaagggcagagggttggaatgtcccgggagtgggaagcaggtgttctggactctaggtcttacccaccccccggcagtgctcataatccctcttgaaaagggttgtgtttgggtagatgggtgcaagagaagaactaggacaataaaagtcaagatgctgggattggcggcaacatggcacaggcaccttaggctgaggatatacaggtgttggatgggatctgtttctcacctgaagtgcttcttccttcctggatgagtgcagggagaggcaggacagggtcagatgggctgggcgactcactcaggatctcatcgctttgctgggaggatgttccaggctcactgactcttggcgcacagggtgaacagcttggttgagggggttgtggtgggggcagcgccagtggggtatggagggagcttccttctgctaggccagttggggcttcaagtaggattggtgtgtctctgctctgccattcataggaagcaccaactgggattggtgaagggacacacatcagtaccctggagactcagaattacttggggaaggggatttcttaatacatgccttccaataggatgggggcatggagctattcattgtcccccaggtgcagagaactgattcattgtcatcattatccatttgtggccccttaatattttatttatctggtttgggcattgagtgctacaataagtgcatctaagccctgatctaataccaaaatggtttcacacataaaagttgagtttgggtttgtacccaggggtttaacttttctttaatcttggtgtcatataatttagtcaataatgaacatgctatagttttaaaagaggtctctgttttaataaataaacagatcatacttccccgaagcaaataagagaaaataaaaattccttagcagggtgtattaggacatttatattctggtttctgctcatttctgcagagtcagcttctgtgccttctattgtaccctgtgatctggtcacacccagctttctctcccatccacaataccccagacccttggctttctgcatgctattcccttgcatggctagtgctgggtttctcttaagattcttctccatcatttatttcagaagtaaatggtctcaaccagtgaatggaaaaaggaaagtaacttcaaattttggaaagggattcagaacaaaatcatcaggttgaagatcccggaagatgactgaagctcagccaggtcaggggcacatcagtgtgtgggtccccatggttctcagatgttcttaccatagcctttaaggccatgcctctcctagtattgcccagatgctgccaggacagtgggccctctgtagctgcccctacctggaggtggacttgcccctttcactgtccatgtagctcaagaaatcatctctcccttcagggggaagccttttgatggtgaagtgtcagagagcaaaggaggaactgtcaacaatggtgattccactaatgaaaatatccaatgtgagctggtggtcctttgcttgttgttctgaggtaagtgaacatgtgatttggccacagtgttttacttccaacctaaaatgactttactgcctctctctttccctggctgatttct

SEQ ID NO: 14210 - DNA, 387 bp, Homo sapiens
gggttttttttctgcataactaaaggagggtttcggagatgagaacacttacagaaaatatgagagtgtgaagtaaatggtctcaaccagtgaatggaaaaaggaaagtaacttcaaattttggaaagggattcagaacaaaatcatcaggttgaagatcccggaagatgactgaagctcagccagggggaagccttttgatggtgaagtgtcagagagcaaaggaggaactgtcaacaatggtgattccactaatgaaaatatccaatgtgagctggtggtcctttgcttgttgttctgaggtaagtgaacatgtgatttggccacagtgttttacttccaacctaaaatgactttactgcctctctctttccctggctgatttct

SEQ ID NO: 14211 - DNA, 580 bp, Homo sapiens
gtgtgtggtacaagagatttccaaaagtttctaggtgccttcagtgggcaaagtgcaaggtattaaaaaaactgagagggaaggaccctgccaagaaggcggctaccatgagggagagatggaaggtgaggctgagacccagaggaggtgcaatgccagagggtgcagagaagtaaatggtctcaaccagtgaatggaaaaaggaaagtaacttcaaattttggaaagggattcagaacaaaatcatcaggttgaagatcccggaagatgactgaagctcagccagggggaagccttttgatggtgaagtgtcagagagcaaaggaggaactgtcaacaatggtgattccactaatgaaaatatccaatgtgagctggtggtcctttgcttgttgttctgagcaccgaggggcagttggcagcttcacctcagagctgcaggaaggaacggggcagtgaaaatcgaatcgggtgtgatcctaggccaagctcatggcccagcagggccagcaggggcagatggcaagtggagacagcaatctcaacttcaggtttccacaaatgctgtggtctgttgtag

SEQ ID NO: 14212 - DNA, 11823 bp, Homo sapiens
aggaaggaacggggcagtgaaaatcgaatcgggtgtgatcctaggccaagctcatggcccagcagggccagcaggggcagatggcaagtggagacagcaatctcaacttcaggtgggtcatcgtctcctttcccgtctgtccttcatctctggtagggttccctttcatacttgttatttaatgtctacccagcttcactctacaggtatacaatagaattcagttacaaataaataacgaggcaatcagattttttaaattgcagggattggctgttggagaaactcaaggatgccgtgactcacatcatcttcctattctcttacatctgcaaatggctggactggagctgtttgaacatcatgcctgttctgaggctttgtgtaggattggatgattccccgtgacctctgaaccctctcttctcccccaggcctcctttatccccactccaaaagacaactctgtctaaaaaggatctttttagaagaattaaaatccaaacgcctgtctgttgtcacactttccaggctgtgtagttggggaccggttctgctctgagcccatctatgtggctcttagccctagaatcacttcaggatctctgaatacttggtaggaggaagtgaaagcagatgagacccaacaaaaaaggcaagcaggtagagagtgagtgctgcttctgctttttttattcttctgttctggtattttttacatatctggtcagagaagcctggaaatcatctttaaaaaatgtaagacaatgagaccagtctgaccaacgtggagaaaccctgtctttactaaaaatacaaaattagctgggtgtcatggtgtatgcctgtaattccagctactcaggaggctgaggcaggataatcgcttgaaccagggaggcagaggttttggcgagccaagatcacaccattacactttagcctgggcaacaagagtgaaattccatctcaaaaaaaaaaaaaaaaaaagacaagtacatcaatacggtcatttcttcttatctgtggattctgtatccatggatctaaccaaccatgaatgcaaaatattttctaaaaattaaaaacataaataacaacaataaaaagtaatataaaaatttaaaatacagtataactatttgtatagcatttacattgtattaggtattataagtctagagatgatttaaaatatacaggaggatgtgcataggttatatgtaaatactacaccttttatatcagggacttgagcatccatggattttggtatccatggagggtcctggaaccaattccccctggataccaagggatgactgtacattcttgataaaaatgaaaatgtgtggaatgtaaaaatgtatggaaacttgtctaattgggactctgtgctaaggctacttctggcgctggtacagccccaagaaagcaaaagctattgctattatcagcagtagtggtggcaccagactggttttcagtgcccagtgccaccactcccagacaggcatccctgtcatctctctttcacttgctctctagtgaagggaagatgagccagcggagctcaaagtccagccagcccatggtcaccaagcaggaagaagacggcactgagaggtgacaatgggctaatgctaacctcaaagaatgagttaggaagtgttgcctctgctcttatttttggaggaaattggggaggatgatgtcatttcttccttaaatatctggtaggattagctagtgataccatctgggcctagtactttcctttctggagggctattaattatcgattcaaatttctttaatagatgtaggcctattcagacaacctatctcttgtgcaagttttggttagtttgcctcttaaagaatttgttcatttcatctgtgaccaaatttgtaggtgtagagtccatagttttcctttattacctttccattgtccatggaattcgtagtgatgacccttctttcattctgatgatttccgtcttctctatttttttctttgttaggctggctagaggtttattaattaactctttgaaaagaaaatcagcttttggtttcattaagtttctcgaatgttttcctgtttcaatttttttaacttccactttaattttaattttttttcctgcttgcatcaggcttaaattgctccttttttctctagtttcctcagatgaaagcttagattattgacttagatctttcttcttttctattgtatgcatttaatactatacatttccttctaagtgctgcttttgttgcatcccattcattttaataagttgttttccttttcatttacttcaaaatatttttaaaattcttttaggacttcttatttgaccctagaactcttttggttaatctggaaatattttggaattttccagctatttttctgttactgatttctagtttatggtctgagaacaaacttttaggatttctattcttttaaatttgttaaggtatgttttatggcccaaaatgaagtacatcttggcaaatattctatgtgagcttaaaaagtacatgcattctgctattgttaaatggagtaccgtataagtgtcagttagaccaagctgattgctattgctcatcaggtcaactacacccttactgatttttctgcctgtgtgatatgtcaattaataaaaaagaagtgttgaagccttcaataatagtagtgaatttgtctatttctctttatagttctatcagtttttgcctcatacattttgccattagtttgttagttgcatacacattaaggattgtgtaccttcttggagaattgacccttttatcataatgtaatgtccctctttaatccctgacaattttccttgttctgaagcttctttgtctgaaattgatatagctactataccttttctttgattagtgttggcatggtatatcttgctccatccctttatgtttaacctatctgtatttttatatttacaatgactttcttatagacaacatatagtcgggtgttttgtgttttttatgtactctgttgatctcttgtcttttaattggtgttttagaccattggcattaaagtgattattaatatagttagattaatatctaccacatttgtaaatgtttcattgtacctatcgtttttatcttttcttccttttttcctgccttttctggtttaattgagcattttatgcttctattttctctcccttcttagcatatcaattatacttcctttaaaacatttttagtggttccctgaagtttgtaatatatatttacagcgaatcatgcccattttaaattacactatatcacttcatgagtagagaatacaccatgcaactgaatgtcccaaattctgccctcctgttctttttaacattgtgaaatgactgacaatgttaaaaagaacaggagggcttccagtcattccatttatttatgtcccataaccactcaatatgttgttgattctattaatttgaataaatggcttcattttaggttaacttggagtaggaaaaatgaaaacattttattatatctgcatttatttcttctctggtgctctttctttctctatgtaaatctgagtttctggcccacatcatttttccctttgcatgaagaaattctttttttttttttttttttttttttttttgagatggagtctcactctgttgcccaggctggagtacagtggtgcaatctcggctctctgcacactccgcctcctgggttcacgccattctcctgcctcagcctcctgagtagctgggactacaggcgcccaccaccacgcctggctaattttttgtatttttagtagagacgggatttcaccatgttagccaggatggtcaagaaattcttttaacattttcacatggagtaggctttctggcaaagaatttcctcagtttttgtttgtttgagaaaatctttatttctactttacttggaaggttaatttcacaggatatggaagcctacataggctttttttttctttcatcactttaaatatttctttccactttctttgcttgcatggtttttaatgagaaatctgatgtaattttatccttgttctttcacaggtaggggttttttgttttttttccctaccccctggcttttttcaatattttctctgtctttcgtattctgcagtttgaatataaaattgtaattgccaaactagactcttcttgtccattgcccagaaaagccacacattgagaatagtaggagttgcaggagagagagaatttaataatcgcagggccagccaagcgggagatgtttctgaaatccatctccccaagaattcagagactaggctttttaaaggatagttaggcagacagggggctggggaacagggaagtgctgattgcttaggttgggaatgaaatcacagggggttgaagctgtgttcttgtgctgagtcatttcctgggtaggggtcacaggacctggttaccaatcctgtggtattagctgttccattagaatgcaaggtctgaaaaatacctcaaaccccagtcttaggttttacaatactgaagttatctataggagcaattgcggtggttatggatcatgtgacctccagctacatgactcctgaaccataattctaatcttgtatccaatttgttagttttacaaaagtggttttggtcccagagcaaggagggggtaagttttgggaagggattgttataatctttgttttaaagttaaactataaactaaattcttctcattgttagcttggcatacacccaggaatgagcaaggacagcttgtgaggttagaagcaagatggagtcagttaatttagattcctctcactgtcatgatttttgcaaaggtggtttcaatatgtctaagtctagatcatttgatatttatgcagcttggtgtttgatgagtttcctgaatctgtggtttgttgtctgtcattacttttggaaaattcttggctatcactacttgaatatttcttctgctctattttctctttcttctccttctcgtattccaattacatatttgtcacactttctgaaattattccagcattcttggatattgtgttctgttttgttttttcctttttttttcctctttgcatttctatttgagaagtttcttttgacatatcttcaattcactgattctttccttggccatgtccaggctactgatgaactcatcaaaggtattcttcatttctgttacattgtttttcatttctagcatttcatttttcattatgtctttgagttgtcatctttctgctcacttaaccatctgttcatgcgtattgtgtgcttttttctttagagcccttaacatattaactaaccatagttattttaaatttctgtctaaaaacttgaaaatccatcatatctgagtctggttttgatgattactttgtctcttcacactgtgttacttcttgccttttggcatgtcttataattttttttttaagtcagacatgataagtcaggtaataggaactgaggcaaataagccttcaatgtgaggttttatattaatctgggtaggaaatgggccatatctaatgtttgttctagctgtaggtggcagaggtgtcaaattcctctagcgttcttgtttttctttcccctgctttctctgggtttctctgagaactcctttttaaatagtctgtttcttgtagttcttccagctgtaatctgctcttattatacaggaaccctgttgatggaatggtaacgtgtcagagggggaagtggtctataatcttatgattacatctcgatcttttaatggaactgcaccttgggctattacttttaaaagaatttctccctccacccttttttttcaatttttttgagatggagtcttgctttgttgcccaggctatagtgcagtggcgtggtctcggctcactgcaacttctgcctcctaggttcaagtgattctcctgcctctgcctcctgagtagcagagattacaggtgcctgccaccatgcccagctaattttcttttgtgtttttagtagagacggggtttcaccatgttggccaggctggtctcaaactcctggctttgtgatccacccgtctcagtctcccaaaatgctgggattacaggtgtgagccaccgtgcccagcctcacctccaccctttttagaagtgacaagatggccagaaggggctagattttggtagtcacccttcccctagaatggttaaagcattttccctggagagcaggcccttgtcatggagaatgctttggctttttaaaaacttttcttttccctcttcttgccagaaggataaagagatttttcttggggtttgtggaggtaaaatccataaaaggttgggggcctgccctgagatgatgacccccaggagtttctcatgctcatgctcctccacactcagcctccagcaattcatcaaacataccaggctatgacttcagtgcctgctgcctcagatagttgatctcggctaattctctggatttgcctgtatctccagattttggggcagtttgccttgtgactttggttatttgagagatagaagaaaagttgttaattcatagtttgttcagcagggttgttgttgttgttgtgaggatgggagcgatgacttccaatgtctttgcgtgttgaagctgaaaccagaggtctagtgaacttttacatttttgaagtttagacttttttcttaagacaaactttctttttgttttaaattttggttttattatagtattatcttatagccagagcatgtaacctgttcaatttctcttcattattatttattgaaattacttcagggccaaatacctggtatgatcttgtgtgtttaacacagtgttattaaaaatcaattttgccagtttttaaaacttacattttgtgtatctttgttcttttatttttatctacttgagaagctaaggactggaagtaagatgttttttaacagccttgaaagatttccccattagtaatctttaatcttactttttaaatgtgagtattgagaattttaccttctttctcatttgtatttgcttaatgaaacttatccatcttttgactgttaacatttttaatgttattttatctctgttatgtctcttgtagttagattctattttgaccatttataatttaagatggtagcttaatctgttttaaatatcttgttgcttatggattttttatttttatattttatgcctctttattttctataagaaaaagagcatgtttttctttctcattattttgtaaagtttgtagcctcattttgactctatttgttacacttgggtttctaattaattctttaatgtatatttctctaactgagaccatcaaatttataactatatcatttgaatttgtatttgaaataagttacttaactcaattttttacttgtcctcactcaatttaaaaaactttaccaagatatcgcaccactgcactccagcctgggtgacagagcgagattccgtctcaaaacaaaacaaaaaaaacattaaaatagaatctaaagtttaagattgaaattactataattttattatatgcagtatatatcctctctttttagaacagtgcttctcaagtatttgggttcaggatatttttatatttttaaaaattatcgagaaccccaaagaactggcttttgtttattgggttatatctgttgctatttacgatattagaaattaaaactttgaacacttaaaatatgtatttattcatttagaaataatagtagtgaatttattacccgtgaatatgtgatgtgtttttatgaaaaataataaaacttttcaaaatagaaataaattagccagaggattagcattgctttacatttttatacgtcttttaaatataagtagaaggcagctagaccctcctatctgcttctgcattcaatccgttgtgacatcacaggccatttagcctctgaaaaatttcattgtatattcatgagagaatgagaaagataaagggaaaataatatgttattatgtgaagagttttacttggtgacacctgaaagggtcttgcacaatcctagggggtccctaaccccactttgagaattactgttctaagataatttatacatttgagacatcagtattgtaactggttttaatgatgcttccagttcctctacaataaggctttactgatactgatttcttgattctgttaatgtagtacatcatcaaataattcgtcctacacagtgtcagtaaaaatggagtagggtgatctataggaacaaacaattcccaaatctcaacgggtcaccagccctctgcacagaggaccctcatcctggactctgtctctggctgaggagcagccaccccatctgaaatgacagtcactgtggtagaggaacagagagcatgcctaaccaggtgctgcctctgagctcttctgccagagtgatacccattgctccaagggaggtacaatcttaccttggcccagaagaaaagaacattgaaaaatgtgtgaccaacacagaaggtgcatgagcaaaatattctttgagtccttgtctatctaagtattgattctgccctcatacgtgaatcattgaataaggtatacatttttccattttaatttttttggacccattctcaagaactgaatgggtatacactttttttagtagtttcctcttacctctaggtttataggtttgcatcattgctttagacatttagggtttcaaattcacttatttttccctttagggcttttccccatatgttctgggaaattctccctcctttatcttataaaaattttcattcactttttaaaaatttcacaatcattttgaatttccaaggtcgttttattttctggttgtttcttttctgcatggaatttttggtacaatatattctctttctgtgtgataatatttgttgtttagaaattcttttttgttccctgaaacatctgtatttccgctagggtaattttttgccttttgcttatcttggttttactccttaatgttgtaggtttccacaaatgctgtggtctgttgtagtctgttcatgcttaccagcaagatgctgaaaagtaaacttgaaactccatttaatgagatgggcttgcaaacttgtgggcttcactgagcaaataccaaatccctgaaggtaaaggccttttctctgagtcatttatatttttcttaagaggaaacctccagtcttctgcctgattgtgggtgttctgtgtcgtagagcaaactgtttttaattttgcctttggaacaatctctcgattttcatctctgcatctccttctcaaccaccactgcatctctgggaggctgcaggacacgctggatccttttctgacctcaggaagcatcctccaccttcaatagcaatgagtacccctcagaccactttttctctttcatacttaggttaaaatttctcatctaattcctttctcttcatcattgtaactttaattcctttactgtcattttaggagatattctagtgaaagaggagaaaaacagttgtcattaatcaacgattttaaaccagaaggctttttcttttttaaaagaattcaatggataaatggtgcatgtctggagaatgggaaattttagtgatcctctattctatcctgatgcatgtttaaggaatggaaagtcccaatgaccatttcctggtgggataaaaaaaatcctggaagtcttcataccgtttagaaatacagataaatttgttaaggcctattagcaaggggaacaatttagcaagtaggaatcagaactacaaacttttgtgattaaaaattagtttcccaggcacagccttaatgtctgaaatccagaggtctccaagtttagacagattaatgtgtcctagttttgcatatccacacaaatctccatgttggaccagagaaagagtgattttcttgtgactgtttttttttttttttttttttttttgagatggagtcttgcctctgtcactcaggctggagtgcagtggcacgatctcagctcactgcaagctccgcctcctgggttcacgccattctcctgtctcagcctctcgagtagctgggactacaggcacctgccaccatgcccggctaattttttgtatttttagtagagacaggtttcaccatgttagccaggatggtctcgatctcctgaccttgtgatccgcctgtctcggcctcccaaagtgctgggattacaggcgtgagccaccgcgcccggccttcttgtgtattcttaatcaaaccttaccagatgagagtctttgaaccaattttatgatgcagaatgccaccctccttttgcagttacagatggaggagatacatctcctttacatctcctgagatttcctctctttgttgttaactaagaagacttgcagttcagtgttaggttctgtaatatctcagccagatttttatttctttctctgtaagttaaagttctccagagaaacagaaccaataggatgtgtatatacagagaaagagatttgttataaggaattggctcttgcaattatgaaggctggcaagtccaaaatctgtagtgtgggcctgctgtttggagacccaggagagctgatggtgcagctccagtctgaatgcagtctactagaggattctttctttcttggggacactagtcttttggttctattcaggctttcaattggttgggcaagccccacccacattatggaaggcaatctgccctactccaaattcaccaatgtaaatgttaatcttatccaaaaacaccctcaaagttggcatataaaattaattaccacagtatcatgtcaattcctataaagattttgacatcttttaattgcatattttccctagagagttcaggtgaaggtctctttataatagtttgattggaacagggtgagcctttttacttctatgtacaggtctttcttaagttcactgttttcatcttttccaccttgatttttcccaaaataaataaattccattcattctggtctccctacaagaatgcttattttatacatgttggctctccattggccatccttcatgtctaaaatcttctaaccaccacaaacctcttggaaactcagtgtctacttccacgttgtatctttgtttcttaggatggtcgcagagatccagaacgtagagggtcagaacctgcaggagcaggtttgccctgagcccattttcaggttcttcagagaaaacaaggtggagattgcaagtgcaataacaaggccatttcctttccttatgggcctccgagaccgctccttcatctccgagcagatgtatgaagtaagtaagaatttccaaatgatgataaaccaggtccatactcaattatgccaaacttcaagatgcaatgagcaggctaaagggcctcctgtgagtggggaccttcaccattctgtaggttaggaggtgacaggagaagcaggcatcacagaaaacctcccttcttctgtagtaaatgttgggggagggccacagtgagggaggtggggcaggagagagaatgggaatgctgtatgggtgcagatcatcctaggtacttgtaaacaatctactaatggtagccataattaaaataaataagtgacctaggcagcattttattccaaagcctacttatttgaaacacttgaaact

SEQ ID NO: 14213 - DNA, 644 bp, Homo sapiens
aggaaggaacggggcagtgaaaatcgaatcgggtgtgatcctaggccaagctcatggcccagcagggccagcaggggcagatggcaagtggagacagcaatctcaacttcaggatggtcgcagagatccagaacgtagagggtcagaacctgcaggagcaggtttgccctgagcccattttcaggttcttcagagaaaacaaggtggagattgcaagtgcaataacaaggccatttcctttccttatgggcctccgagaccgctccttcatctccgagcagatgtatgaagtaagtaagaatttccaaatgatgataaaccaggtccatactcaattatgccaaacttcaagatgcaatgagcaggctaaagggcctcctgtgagtggggaccttcaccattctgtaggttaggaggtgacaggagaagcaggcatcacagaaaacctcccttcttctgtagtaaatgttgggggagggccacagtgagggaggtggggcaggagagagaatgggaatgctgtatgggtgcagatcatcctaggtacttgtaaacaatctactaatggtagccataattaaaataaataagtgacctaggcagcattttattccaaagcctacttatttgaaacacttgaaact

SEQ ID NO: 14214 - DNA, 18200 bp, Homo sapiens
ggtgccaggaagcccagaagcaaggacggaaagtgatcaagcgtgtggcacaatgggtaaggctgtctgagggccgtgggatgggggtggctcagtgggccccacagacccccagtagggtggaggtaggtgctccagtctgtccagaattctattctccgcatttgcttgacctgagcctttggggagctgcagggaggcaagagatcgttataaagtactatttaagaggatggactctgttgattagacatagatgatgtcatagaagtatactctttgcaatggcacttatcttgtgtattgcattagtatattaagttacacccaatcttccatgaagcccaggataccccagtgaacttctgctggtagataatagtgtcactttgctacaacttagaaaggccacactcaaaagacaactaatcccggtacttaattgtcaggaggaaagactgcaggtctactcttcttagcccaacacgtatttttgatagaagacccagggcccatcctagactcctagttctcagttcggtgggtttttggttcccctagaagaaagagaggaatgattatccaagcatctgtataaactcaagccttctgtagtatacattgtcctaaaatctataacttttatttattaatttctgtttcctcaccaccacttgttattttccagatactgtggatattgcaaacaactccactttgggaaaacccaagaggaaaagaagtaagaataaataagaatttatttgcttttggtattacaaatacgtttttaatgccagagttttaattttgtcattgttactatttctgttattatttgtaatactgtggtagacagaaggatgacctccctaagatgtctacctcctaatccctggacctgtaatctgctatcttacatgacaaaagggactttacagatacaattaagctagagaccttgaaatggggagatgatcctgggttatggggtgggcacaatctaatcttgtaggccttaaagagtggaaaacttttcctggctgtggagaaaggaagatgtgactatggaagaatcatcagaaatatgtcatgttgcaggctttgaagatggaagaagggaccaaggaatatgggtgacctctaggagctgaaaagacaaggaaatagcttgtcctttccagctcccagaaaggaattactttagccagtgagacccatgtcacacttctcactgacataactggaagaaaatacatttgtgttgttttaaaccactaaattggtggtaatttgttatggcagcaattaagagtaatacagattttggtacttagaagtagggtgtggctattaacatattcctgaaagtgttggcatgcctttgggattgggcaatggacagaggctggaagaattttagattatgatcggaaaagcctatattgccttgagtagtccttagtagaaacatggatgctaaagactgtgctagtgaggactgagaaggaagtgaagaacatgggagagaaagcctatattgcgttagagaaaacctggatcatcatgagcagactgttagtaaaaatatggaggttaactgtgttactggtgagcactcagaaggacataagaaagatgtggaaagggcctccttattatatagtggtctgtcctgtactcatgtgaaaagcagaactttctggatctatagctaaggagatttccaaacacagtgatcatggtgtgttgtggtgtcttttgctaattatagtaaaatgcaagagggaagaggtatattgaaggaagagctgctaaacgaaaaagaatcaagtcttgatgatttagaaaattcccagcctatccaggtcaaaaaacatgataaaatgaggagattcactgtcagggacgtgtgcttggtagaaacaacaaagactttttgccagttccctgggaagtagtgaaaggtcagattatacattcacaaaaaaagttatttgaagagacgtagcatgtgactcataagtccctcagccatctcagcagaagtcaaaaatagatgtgcgttgctacaaaaagaataaaatacctaggaatacagctaattagggaggtgaaagatctctacaaggagaactaaaaaccactgttcaaagaaatgacagatgacacaaacaaatggaaaaacattccatgttcatggataggaagaatcaatatcattttaaaatggtcatactgcccaaagcaatttataaattcaatgctattgccattaagctaccattgacattcctcacataactagaaaatacgattttagaattcacatggaaccaaaaaagagcctgaatagcaaaggcaatcctaagcaaaaagaacaaagctggagatatcatgctacccaatttcaagccatactacagggctacattaactgatatggtttggctgtgtccccactcaaatctcatcttgaattgtatctcccacaattcccaagtattgtgggagggacccagtggcaggtaattgaatcataggggccggtttttcctgtgctattctcataatagtgaatatgtcttcatgagatctaatagttttataagggggagtttccctgcacaagctctctctctttgcctgccatcatccatgtaagacgtgacttgctcctccttgtcttccaccatgattgtgaggcttccccagccacatggaactgtaagtccattaaactctttttcctgtataaattacccagtcttgggtgtgtctttatcaacagtatgaaaacagactaatacagtaaccaaatcaagatggtactggtacaagaacagacacatagcccagtggaacagaaaagagaacccagaaataagaccaaacacctacaactaactgatctttgacaaacctgacaaaaacaagcaatgggaaaaggattccttattcagtaaatggtactgggataatcagctagccatatacagaaaattgaaactggaccccttccttacaccatatacaaaaattatctcaagacagattaaagaattaaatgtaaaacccaaaactataaaaaccctggaagatgacctaggcaataccattcaggacataggcatgggcaaagagttcatgacaaagatgccaaaagcaattgcaataaaagcaaaaattgaaaaatgggatctaattaaactaaagagtttctgcacagcaaaagaagctatcatcagagtaaacagacaacttacagaatgggagaaaatttttgcaaactatgcatctgacaaagatctaacatccagcatctgtaaggtacttaaacaaatttacaagaaaaacaaacagccccattaaaaagtgggcaaaggatatcaacagataacttttcaagagaagacatacatgcagccagcaatcatatgaaacaaagctcaacatcactgatgattagagaaatgcaaatcaaaaccaaaatgagataccatctcacaccagtcagaatgactattattaaaaggtctaaaaacaacagatactgacgaggttgtggagaaaaaggaatgcttatacacactgttgctgggagtgtaaactagttcaactattgtggaagacagtgtggcaattcctcaaagacctaaagacagaaataccatttgacccagcaatcctattactgagtatatacccaaaggaatataaatcattctattataaagacatatgcacatgtatgcttatctcagcactgttcacagtagcaaagacatggaatcaacctaaatgtccagcaatgatagactggataaagaaaatgtggttcatgtacaccatggagtactgtgcagccataaaaaaagaataagatcatgtgctttgcagggacatggatggagctggagagtattatccttagcaaactaatgcaggaacagaaaactgaacaccacatgttctcacttataagtggtaacgaaatgatgagaacacatgaacacctagaggagaacaacacacactgaagcctatcagaaggttcagaaggtgaagggttggaggagggagaggatcaggaaaaataactaataagtatgaggcttaatacctggatgatgaaataatctgtataacaaacacccatgacacatgtttagctttgtaacaaacctgcacatatatccttgaacttaaagtataaaaaaaaaaaaaaatagatgtgtgaattcctaggaaagatctgtagggaagcttcatgtctaatggaggaaatcagaaatccccatgatatatgcaggagatccataagactcttgagggttttgtaccaagagaaacaaagatttccatgtcctatctcctagaacctataatctgttactttacatggcagaagggactttgaagatgtaattaagttaaggatcttgagataagatcacatgggccactaaagtcagagaacatatccttctgtcgagagagggatgtgtgactatggaagaatggtcagagagaatagagctggatgtggagatggatgcaggggtccatcaactaaagaatgtgggcagccttccgaagctggaaaaggctcctctgtggcctccagaaaggagcaaagccctgcagacaccttgattgattttagccctgttaggtgcatgtcagatttccaaccctcagaattatgagaccacaaatctgtgatttttttgtcactaaatttatggtaatttattacagcagcaataccttttgtaagacaaaaaaaaaatttcaccctatacggttatattcaatcttctaaactaacaatttatattttttcaaattacttacacctttatgctttttttttctgattttaaaatacttgttccctgtaaactttgctgtacatatttctatatttttttctatgctttgttagcacatttagaattatgtgatatatctaaatgaatacatttaaactgttacatttctttttaaatcaatataacatgcactggatattataaacatttaatatcttgccaacttaactgtaaaaaaaagttttatttcattcctgttttaacttacattgctttcatttttggtgcagttgagcattcttcatttgttattggccatttttgtttcttctcctacgagtgcctggaacttatattttgccagtgtgttgtctttttttccccatgctttaggacaacaggaatacttatatatgatatatactaagggttgactacgtgtgttgtcatatttgatgttattcttttacgtttctttgtggtataggcacatctcgtttgattgcacttcactttattgtactttgaggatattgtgagttttacaaattaaatgtttgtgacaaccctgtgtcaaaaaaagtctgttggtgccctttttccaacagcatgtgctcactttgtgtctctgtcacattttggtaattctcgcaatatttcaaattttattattattcttcttcctgttatggtagtatgaacagtggtaacaatgatctttgatgttactattctaactgtctatggcaccacacactgtgttcgtataagatggcaaacctaataaatgttgtgtgtgtttcaactgcttcactgaccagctgttcccctgtctctctccctctctttgactttcctctttcctgagacaaaaaaatatggaaattaagtcaattaataatcctacaatggcctctaagggctcaagttaaaggaagcgtcacatgtgtctcactttaaataaaaagctagaaatggtgaggcttagttaggaagccatgtcaaaagctgagaggctgaaaactaggcctgttgcagcaaacaatcagccaagttatgaagtgctactccagtgaacatacgaataataagaaagtagaacagtcttatcgctgatatggagaaagtatgagtggtctggatagaagatccaaccagccacaacattcccttaagccaagccttaatccagagtgaggcctaaactctcctcaattctatgaaggctgaaagatgtgagaagctgcataagaaaagtttgtggctagctgatgttggttcctgaggttgaaggaaagaagctgtctcataacattaaagtgcaaggcgaagctgcaaatgctgatgtaaaagctgcagaaggttgtccagaagatctagccaagatcctagatgaagatggctacactaaacaacagttttacagtgtagactaaacggccttttattggaagaagatgccatctagaactgtcatagctagagaggagaagtcaatgcctggtttcaaagctccacagaacaggctgagtctcttgttagaagctaaggcagcaggtgactttcccttgaagccaatactcattcaccattctgaaaatcctagggcccttaagaattattctaagtctactctgcctatgctgtataagtaaaataaagcccagatcatagaacatctgtttacaacatggtttactgagtattttaaacccactgttgagacatactcctcagaaaaaaagattcctttcaaaatattactgttcattgacagtgcacctagtcatccaggagctctgatggagatgtacaaggtgattagcattatttccatgcctgctaacacaacgtccattctgcagcccatggatcaaaaagtaatttcaacttgcaagtcttaatatttaagaaacacatgttgtaatgctatagctgtctctatacataatgattcttctgatgaatcttggcaaagtcaattggaaaccttctggaaaggattcaccattttacatgccataataacattcatgatatatgagaggaggtcaaaatatcaacattaacaggaatttagaagaagttgattacaatcctcgtggatgactttgaagtgttcaacacatcagtgaagaagtaattgcaagtgtggcagaaatagccaagagaaccagaattagaagtggagcctgaagatgtgattgaattgctgcaatctcatgataaaccttgagtggacaaggagttgcttcttaagaatgagcaaagaaagcagtttcttgagatggaatttatacctggtgaaaatgctgtgaacattgttgaaatgacaacaaaggatttagaatatattagttgataaagcagcagcaagatttgagaggatctaccgtgataaaatgctactcaatagcattgcatgctacagagaaatctttcaggaagagccaatcaatttagcaaacttcattactgtcttattttaagaaatttccacagacacctcagccttcatcagtcaccaccctagtcagtcagtagccaccaacatccaggcaggactttccaccagcaaagagattatgacttactgaaggctcaagtgatcatgagcattacatttagcaataaagtatgtttaagatatgttcattttattttagacacaatgctattgcacacttaatataccacagtatagtgtaaacataactttcatatgcactgggaaaccaaaacatttgtgtgatttaccttattgcaatattcactttattgcagtggtctgaaaccaagtatttctaagatatgcctgtatctttatcccaaagaagcttgaaatttttatctgatcaaatctgtcagccttttcatttatggtttccaggttttatgtaaaatttgcaaatatattgtccacctcataatttagaaacatgtttacttacttctagaatatttggaatactttttaatgtttaaatctataacacacatggaattcatttattggtatatgatgtgagatggtaattaagagatataacactggtagtttttttcttcatgattcaaaatactattttatgtatgttttccagtatatacagaactgtgtcttatcacatttctttatccattcatctgttgatagagacttaggttgtttctatgtcttaactactgtgaattatgctgcaatgaacatgtggatgcagatacctctttaagatattggtctcatttcctataaattcataccccaaagtgagatttctggattgtatgtatttctgtttttaactttttgaggaacctccatactgttttccataatggctgtaccaatttacattcccacttagagcatacaagagttccttttccccacaacctcaccaacacttgttatctcctgcctttttgctaatagctatcctaataggtgtgaggtgatgtttcattatggttttgagttacaattctctcatgattagtaatgttgattgctttttttataatccattggccattatatgtcttctttgggaaaacatttattaagatcctttgcccatttttaaatcagattatgacatgcttttgttttgttttgtttttttgctattgagttatgtgagttccttatatatatttaggtagtaacccttatcaaatacatggtttgcaaatgttttctcctattccgtaggttgccttttcatttttacaattatttcatttgctgtacaaaagctttttagagtgatgtaggtccacttgtttatttttgcttttgttcctgtgcttctggtgtcatatctaaagaataattgcccagactaacctcaaggagcttttcctctgttttcttctaggaattttatggttttatatttgacatttaagcctttaatctattttgagttaatttttgtatatggtgtaagccaagcgtctaatttcattcttttgcttgtggatattcagttttcttaggaccatttattgaagagactgtcttttctccattatttattcttggcacccttgtcaagattaaatgccccttcttgacatctgtattcagcatagtgatgtaagtcctagtcagagcaagtaagaaagaaagaaaaggcatccaaattggaaagaagttaaattgtctctgtttgcaggtgacatgatcttctatgtagaaaaccctatagactccatcaaaaaactgttggaactaacaaatgaattagtaaggttgcagaattcaaagatcagttgtgtttctatgcactaacaatgaactatccaaaaaataaattaagaaaacaatcccatttacaatagcaacaaaaagaataaaataggaaccaagttaacaagaggtgaaatatttgcacactgaaaactatgacattgatgaaagaaattgaaaaatatacaaataaatggaaagatatctcatgttcatgaactggaagaatagtgttaaaatgtccatattacccaaagtgatctgaagagtcaatgaaatctctatcaaaatttaaatgacatttttcacagaaataggtaaaaggaatcctaaaatttgtattgaatcataaaagactccaaatagtcaaagtaattttgaaaaaaaaggaaacaaactggaggcatcatactgtctgattttaaactatgttacaaagcaagagtaatcaaaaccatatggtactgtcataaaaacagacataaaccaatgcaattgaatagggaacccagaaataaacactcatgcatgtatgttcaagtaatctttgataaggacaacaattacagaattttctttatgtagatgttccacgcatccacttttcttatctgctttattgagctgtaatttgcataaaacaaattcatcaccttaaggtataacctaatttgttttaacaaatgtgtgcagttatataaatacctccacaatcatgacatgtatcattttcatcaccccaaagtccacttgcattcttctctccattctctggttctcgacaacagctgatctgttttttgctagtttgttttttaaaagatggggcctcactgtgtgttccaggatgaccttaaactcctgggctcaagtaatcctcctgcctcagactcccaaataagtgggaatacaggcatataccacccctaaaccaaggtgtttttttttttaatttgcaacctaatgtgtggtcaatatttgtaaatgttttctgccccttgagaataatgtacatttgaactatttgttaggctctggcttcactccatatatatcttttttatcaagcacaactttcttgtttaaatttgtgtccatagtaatttaaattttatttgctccatcagatttgcatacaaatgtgttaaattcttgcacatggttgtatatttgccaattcctctttatcttgttgctttactttaaatattttgaggctatttatgatttgtaactttttaatggatgtttttcttttatcattatacagcattctgctttatccctgttaatgcttttgccgtaaaatctcttttgccaagtactaacattgttacacaaacttttatgattttttaaaaatattttccactcactttatgtgatgcccttttgttcagttttcttttatgtctcttgtaactgcacttaacttttgtagttttgtctgatattcctagcttcttaataggtaaatttcaatttgtttacatttattgagtttccagatgtatacggacctatatcttctgtggtattgttgaccattctctatttgtatctttcgtgtctccttcctgctttttaatggattggtataaaactatatattctcccctttctccctgctggtttggaaattaaagataaaatttctgtaagcttttaaattatgccccaatcccaaaagatgacaaggatcttatcatggtttcactacaaactgaacaccccatctctaccattttggctattgtttaatattttatttttaactataaattttgaaactattatcatttttacagttgatatttacttaatttaaaaaaatattttgtatactcaccattgttctttttctttggtttcactttttgtctagctgaagtaaattctttgttttttctagtgagtgatctctaagtggtaaactctgtaagtgttgggtgtacaactttttctttactttgatagaactttttagctacattaaaaattccaggtcgataatttatttcttctcagtatagtaaggtgattactatattatttcctggaatctatggtgtggctaataacaattattctcttattgtaactaactgtaacttcttggtaaatattctgtcctttctctctaaaagcttttattccccaaaatttaatcacgaaaattttaagcatacagaagacttgggagaattgtacactaaacatcaatatactttcacatagattcacaattaacattgtatcattcctgctttatcacttttctattcatctatgcatttctctatccactcactaaccggtggtcaagtttgaaacatttcaaggctgcagacgttagcactattccccctcaactacgtcagaatgtatatcattaagtagagttcaatgtatgtttagagttcttttgttaagataaaatttacaatgaaatgcacaagtattaagtgtaccatttgatgagttcttataactgcatttttctgcaccatcaaaattcttatcaagatacagaacatgatcatcaccctggaaaggttccttacgccctttctggtgtatctccacccactatccatcagggcaatcactactcttctttttaactatgataatttggcttttaaaaaactttatataaataaggttttatagcatattctctttagagtgggatttatttcacacagcatgtttttgagattcatccatattgttggatgtctcagtagtttgttctttttcattgctaagtagtgtacattatctggatataccaaattttgtttataattctcctattgatggacacctcgagttttttaagtttttgctattatgaaaactctgctgagtacattcttgtaggagtcttcctgttttttcgtatctcctgcataaatacctagaaacaaaattgccgggatatagagtagatgcatcagttctttcccccaggacccatgaaaaggatggtgcagagcaagcccaggtggatgctgcactcataggtgtgtgcagcagcagaagaatgcttcactgaggaaacctatgggattataaggggaccaatagcaaacctgcccaaaccttacctctgagggagacattatctttttagctggaatttaagcaattctcctctggggatattaagcaaatctcctctggggatcttaagcaaatctcttctggaggcatctcctctggaaaatttctaaggagggagatgttctctactttatactggtcagggatacatttgccctataatctggaggctacatgatctctagcttccaaggccgctttggtattcaaatatccttgaagtgatactctgaggcacgtagaaatgccatggagaatggcctcccagcaaattcaccccacatttttgcttctggcaaatttccccatgaagacaccaccccatcagccactctgattattcggacccatgggtccacatccattcaatttttttcctgcaacatttaacaaatcttgacccagtgcagcggctcactcatgttatcccagtactttgggaggccaatacaggaggatcacttgaggtcaggagttcaaaaaccagcctggacaacatagtgagaccccgtatctacacacacacacgtacccacacacatttcataaactgtaaacgatctaggtcccttatgagcacctctaaggtacaagtccttatgtgagggaggcaagttagtgcctggctttcatacaagaagcacaatcccaagggcacacgtggtgctcccagaagggaagtgtatacaattgttgggcttccctgagtgggatgtacattagtaagggagaaggtgaacagtgtctcttacgtggctcctggctggctgtaagccttggggttcccagttctgtttatccttgatttgtttgtgtgtggctggggagagggtgggcatatgggggactgcttgaggacagtctgtccaatctgtcctatttgtccatgtcaccaaccaggtggcagtcccccctaacaaatgactgagaatagtggtggagactatgtctagagggttctgtgtgggacctcagaagctgggcccagcccctgccatctcatggctggtgcagagaggctgactcagcattctcagaggcgggagcgctggagtagtgtgttttccttctggacaaagcatccttgggttcttctgaaagacagatatcaccaatgctcctgttttctcccatacctctttagatgtctggatttttgctcttgcttcactgctgcaaaatctgctataccattccagtggctgtaccttcatcttttgccctaattatctccttttctcacttagactttccatctacaaaattagatagaagtagaggaaaagcattttataaaatgtgcctggagttaaatctgaatccctaggcactttgaaggccatagccaccaggctggtaggggaaagaatgaggcatcatccctaggaatgaccagggtcacaacagaatcctgaattttcaagataggtctacagaacactcgcaatccccaccacttttgtcctggtcactatccaggaaggagatgatccctttctggagattgctcccttcaatgagcctactgccctcccatagtgtgcggacaggaggagatgagggacagtcagaaaatcagtgcactgtggagtcacttttctgataaagggcacgtcagactgcaaatggcccagatggccagtttgaggacactgatgagtttctggggtcaccatagcgttcctggagtcagctgctctgcagcctgaaggagggctgacagtgtggaggcagtgctgagattatttaaggaaactatatagaaattctataatgattatgtaattacataatgaaaactctccatatcagagttcagaatatctcccaatttccaacacagaatattatccataacaccatcaacctcaaggaggatgtcctctcattgcacatttgaatttacacaacaaacacttgaaaaagcaacatgaaacagcagttatcattcactttaaggtgccagcaagagttaattttccattaaaaattttgttcaaaggaacgtcatctcctgtagtctctcccaagcccatggcccaaggctcatgcagaggtaaaatataactctgtactcaacctccacgctgctacactgatcataaagtattttgccccattcctgcggaccaaagtatgaaaaaaaatctttaatactattggcatataaaactcagagaattatatttatacctctgcataattaactttattctctttggtttgaaggaaaaaagagggggcatggctggagcagaatgagaatgagaaggcaggaaaacagccaacaaaatggtaagcaggcaaagtgaagtagttacagcttttgagtttattagggcactgtccattgtattctggaaggcctgcagttccccagagccagagttctatacctcctgtatccattaggatgtagactaacaggctgtgacaaagaggcctgagaatgcaatggcttcaacaaaatggtttctaatgcatgtaatagtccagaggcccacagttaatagggaggtgttatcatcctcagtatgactttctttcctagctcaaagtatttttattaatttggaaagacattcctaagagggctaaatgaagaaatcagggtgtatgtgtatgtgtgcacaatagtaaacatacatatatgtataaccatattttatgtgaaattcatacttgtgaagtatatttttatgtatcctgatatacacatatgtaattatttatctgtacatataaaaagacataaatatagaaaaatagatggcagttcattcataaaaatatatgcagtggttacatttggtcagtgtaatagaggtgatgtttatatatttttatctgtggtttttaaatgtatgtgtatatattaaaatattataaatcttcaacatttttaatgaaaaagtgttattcaaaaagtaacatatgcaaaaagaaaagactaggagaatatttttgcacaaatcatcatctggagatagccatcctcatctgtggctatctccaatggtgatgtttcatatcattttattttctgaatttcctgtaaatatatttattctttataatcaggcccctgaaattttcaaaatttattttagccatggtctgaggacttccattcttctagacgatgaaggctaagtctcattttctaaatgattgtcaattttgaatcagtggatctaaatagtaagattttagagtcctattgaaagttattaatttttaccaatcttgccagttgatgtggcttcctggttggtggatgtgacagctttgtttggaaagaaaaaaaagtggctgcgtgcattttaagaatggctgttttcaaattgaaaatttgtttggactcaatcattataacattttcatttaagtctgaatcattataacattctcatttaagtctgtgtgtatgtagacaaattctaagagacttcaatgtgcaattaaatcctgtgtgtaacttaaaagtcgacactcccaaaagcaaaaaatgctctggacacctgctcgaggggatccagaatgagacccaggactccctcacttgcgtttgttcctgcctgacagctgttgttctgcccagttctattaatacattttcccctgcctatccccagataatagcaaagccgacggccaggtggtctccagtgaaaagaaggcgaacgtgaatctgaaagacctttccaagattaggggtaagataaagtttgtccgctttccctttgccctacaggtcaatacaaattttactgaggtattgacgagcctagatccaccttaattgtttactcatcaagcttagtcaattggagagcagtgaaatctaaaagagcaaactcattataagcaggggttgtaagttgattgtattcatatcatagatcttatctgcccagtttctaaaatagttttcctctgtgttttatctcattttcctggaaattcctttgcctcaaatcattgttttattaaaatggctggacctggtaaattgtaagccgaatacaggtttattctctcactgccctttcaagtcctcctcctagatgagttctttcctgtcttgagcaagctctgtcgctttcttgttcccttttaaaaacagtaagagtctcatttcagtagttgggacctttctgacctagtattaaactacaatgtcttccccagtttaaagcaccttcgcttcttcagcctaggcaagccttagtctggaacacatatagttgggggtgacatggtcagtgtcttctcttattctgtcttggccctacccccactccatagctgttggcttggtcccatccaggattggggaggtgagagagatgggtgagatcagagtgtggaagtgtcttgcctgacaggtgcagccgtgaaatgacattgcaagtggttgatgcacaatcactagctctttcttccatgagatgctttcatcaagtccactgcaagggaaggggaggggtcaggcatcacagcttgacttattttgaaagaaatagagctttacttctacaacctggatgtgagtgaagggctgaacctggcataatcagttccaccaactctttctaaggttacatatgtggcctggtgcattgtcctaggatgcgggtgctcaactcaacctacttgcttgggactttctcaattttcccaatgaaactctcatttccaagccataggtccactttgggtctgattggtcctttttactttggtggcctaatatgctcatgatatgcttagaacttatagtacttaggaatgcataggctggaaaatatttcctcatgggcctacatgaccctgatcagcacccccagatggtggtcattggatggtggacatccagcacaagaaggaaggaacattttgctttcctgccttggaaaataaaacacatttggacaatagtaaacattgagatgcccattcacagccaattaacatgcacttgggagaatatcatcggctgcagtgtctgccatgtcaatccttaattactatttggaatgaaggctgcggaaatctcaattctacccattcctcatggttaaccttcttctgattagtttcttagatcctaatatttattttgtccaaagccatgtggacaaagccctggtcacatttactattactttcagcacgagggtacaaatatcttcccccaatgtgacatgtgcagcatacatctcacctatgggacacctaatagggtttcccttaagtcacagaactgtcatttatttgtgtctctgctgagagaaactgaaacgccttcacttaattttgtagttttgtctcaattttctctgaatattttagtttctgtaatgacggtaatcatcattttgatcttgcaaagattaaataaattaatggatatgtaagtgtttaatgtgtattatatgtcatatatatttcaaatatatatgtttggaatgaaatatgaaatgaaccttcaaaatatggaatgaagcatttatacttttgcttgagatatacgtgaaatactgatttcaattagtttttttcctaacataagaataggaaaatgaaatataaagtgaacctaacattagctatctaattcttcataccttaaaggctagggtttaaatctttttatttatacattaaacaggcttttggaaagttacatttaaatggaatttttgaaaagctgtaatatgtgtaatacagctgctcataaatgactgtgattatattattctactttctcagggagaaagagaggcaaacctggaacccgcttcactcagagtgacagagctgcacagaaaagagtccgatcaagaggtaaaaaagaaaacaggaatgaactttcaataactaaacatctaatttcctgtgcggtacactgtactttcagtaataaacccatttccttaattgttttatgaagctgtactaactagtgagaaatgtat

SEQ ID NO: 14215 - DNA, 463 bp, Homo sapiens
ggtgccaggaagcccagaagcaaggacggaaagtgatcaagcgtgtggcacaatggatactgtggatattgcaaacaactccactttgggaaaacccaagaggaaaagaagaaaaaagagggggcatggctggagcagaatgagaatgagaaggcaggaaaacagccaacaaaatgataatagcaaagccgacggccaggtggtctccagtgaaaagaaggcgaacgtgaatctgaaagacctttccaagattagggggagaaagagaggcaaacctggaacccgcttcactcagagtgacagagctgcacagaaaagagtccgatcaagaggtaaaaaagaaaacaggaatgaactttcaataactaaacatctaatttcctgtgcggtacactgtactttcagtaataaacccatttccttaattgttttatgaagctgtactaactagtgagaaatgtat

SEQ ID NO: 14216 - DNA, 1383 bp, Homo sapiens
gagcaggttcatcgggtactgggacccagcagtgtgatccagagagcagtgggagacgctggcagcaggaggttaatgtcctctgtgctctcagggacacctcctctgatatgctgagggcagtgttggggacctttgcctacataccggcattgtcctttccttgaagttttgcagctgggtgggttggagacaagaaacaccagttgtttatattttgtgcttattcatacaagacaggaagcacgatctcattgggctgttggaggcccgaggtccctggggctgaaaacccagtttctgaaactcaggcctgacagacagggttccctgtgctcccagcagctcagacagagaaaggagagtccacactcacggtgacaccaccttcctcagacttcctgcctgctgctaccactgatgcgagggaaaggccaatggctggagaccccatgtgtgaatcttgcatactttgggaggtgttcccctccctcccatgactgagcccatcagccattcctgaaggaagacagtggtagccacaggaacggtggccatttccaagctccctgccctctgctcacccatgtccaatctctcaggaccccgtggaattgcatcttctgcaggatgaaggagtctccgggaagccaacagtgttgtcaggaatctgaggtcctggagaggcagatgtgtcctgaggaacagttggtaaatcagatgcaaaccccaagccttctcctttcccctcacacgtgagaaccatgaacaagcgcaagggcaggggaatgtactgaaaggagcctgctcttccgcgccacacttcaatggcactgatagaacaccacaccttgtttgcacaaaaaataactcagccatgacatgtctgtttccaagagccacacatgttagagaaacttgaggaagaagggtgtgagttctgtgctgtgtctcatgcatgtgggctcattctctccaagctgcttttcatttacggcctctttcttttgcagaaatgtgagttcctcctcttgaaagtctattgctgttctgagagctccttttttgccaagattccatactattattatgtaagtaacaacagcaacccatgattacaggctgccatgacattacctgaccctgaaatgggccctcgtgagatttgtgatcttaatcccacggggcaagagcacacgctgtcgttagttgccttcaccttgttgtatttctgctggattttatgggaatccacagaaggtagacactgaactatgctggtagcttttccattggtatatttgtcaccagattagagaggcgtgtcaaggcctgaaggagcccatgtggttggataaaatcaagaaaaggctgaatgagcac

SEQ ID NO: 14217 - DNA, 550 bp, Homo sapiens
gagcaggttcatcgggtactgggacccagcagtgtgatccagagagcagtgggagacgctggcagcaggaggaccccgtggaattgcatcttctgcaggatgaaggagtctccgggaagccaacagtgttgtcaggaatctgaggtcctggagaggcagatgtgtcctgaggaacagttgaaatgtgagttcctcctcttgaaagtctattgctgttctgagagctccttttttgccaagattccatactattattatgtaagtaacaacagcaacccatgattacaggctgccatgacattacctgaccctgaaatgggccctcgtgagatttgtgatcttaatcccacggggcaagagcacacgctgtcgttagttgccttcaccttgttgtatttctgctggattttatgggaatccacagaaggtagacactgaactatgctggtagcttttccattggtatatttgtcaccagattagagaggcgtgtcaaggcctgaaggagcccatgtggttggataaaatcaagaaaaggctgaatgagcac

SEQ ID NO: 14218 - DNA, 16100 bp, Homo sapiens
cctccaagaatacgttacaggaaaaaaaaggtgattattacatagctttatacagcttcttgtcacataactgatttagcatgcacaaaatcttattttatggggtctgaaattgggtaggaataattaagctttcaccttcttcactactcaccttaaaatactttttgcatgtattccttcagagtcgctaatttgaacactaaatgtatataaagctaggtcctgtttggattcaaccatttcatatgaagatgataaggagccatcagaatatacgtcctgggagtgttttagcaatagatgcagatgtcttaagagtgtccaagttggaaagtcaagcatggtcatgggatacataaaaatatttcatagtaaggtgagaggatcaccttcaactcaaaattcagatttttttcattgaagttactattttctaactttagtgaaataggatggagcagatatttgctcacatccatttgagacatgcatgaaaccatatatcatttaatgaaatcggcaacaaaaagaatatttcttttctgatccttcacattctctttcaccttccaaaaaaatgtacacacagacacacagaatgtcttctcaaggtgaaattatttcctgttaccacaatggtgccactgaggaggaagatctccagaggcaaatgtattttataggaggggctgaccaggaaaatcttttatgttgatgccacctctttggctctaccagagggactgtgcagacctgctttttatctgtgaaagtgatttttccctctcttgaagaatgcaacaaacaaataggttaagtgcagtgtatattcaggacaaggtgatggtttttccaagactgggtatgaatgagaacctgaggagggggaagagaaaaatgtcatccttatgcacttcaggtagaaatacgcattcaagacattcacagacttctaaaacagctcacacatagctagccactaagcttcatattccactgggaacctgagatgcaggcctttacattatctgatatactggctgatttgaattttcagccactgagacatttcatccactgggtttcccgaagggaaactatgatgtcacctattcagtgactacactaaagaccagcatctctacctttcaccgggtgccaagagtaactgagtctggatgacccaaatgagctggcaatttccgactaaccgactctccctctattctggggtgcaaaacttagcagcgacaaggtgcagttgcctctatatgttgtgtctcctcatgggggagaacagaaggtcccttaagtggcagatccaggatccattatgaactccatgggtcctctgtgcctctcagagcttctcttacttgcagagccatttggctttaggaaatttcagtgtcactatgagtgccacatgatagcatctctgctcatgacaagggccacatagaccttttggtggcacctgagatattgtaaagcaatctgatatactcacccagaataattgttgtatgctaatgtttgcttaagagcctccagtgatttctaagtgaatcaacattcatttattcacccactcaacatataattatcaagcacacactaaatgccaatggacattacagaagattgacctcaaaaattatttcaggccaaacatggtcacttgagcctataatgccagcattttgagaggctgagatgggagaatcattggagcccaggaatttgagaccaacctgagcaacatagtgagataccatctctaccaaaaaaaaaaaaaaattacccagacattgtggtgtacacctgtagtcccacctactcaggagactgaggtgggaagatcacttgagcctgaaaggtcaaagctgtactgggctgtgatttcatcatagcactccagcctaggtgactgagtgagactctgtctcaaaaaataaaaaaagttttaaatttattgtcaacatggatgaattacaaatggggtggggtgggagattctagaccagttggagaggcattcagtgacaaggtcatctctcaggtgcttgtcctttgaatcacacttgtttatggcctctgtgccctgggctacagacaaaagctgaggctgcttgtatcccagaagggaaggatgccaagtcatgccatggatatccaaaagcaatctaaataaatgtagtgggttacctcttaaaagtcagtcaacctggcatcttcttgtgatttggatagaagggagagggagagagtttcaggaaaaagagctgcagcacagaggaccttggaggcattttatcaccagggctgtgtccctaggggagctgcagaaagcagtgctcttcttgtctgggacacttgcatggcctctaggactctgagtcctgtggtcccaggaggctgtgggagataagtcctcagcctgattattattgaggctcctctgggtgggatgacacaaaggccaagtttaggaaatatgcctgagggccccttgaagtaagaggacaagtagagcttctctgacttggcctgtgcaaactaggtccagactccctgcagggaatgggacttgcattgggattaacggtagtacttgcacactttttattctttcagtagatatataggtccaaaaaatcagatatgaggtaaagggaagactgtttacaaaaataaaactttagacaaaataaaatttatagcatttatttgagcaaagagcaattcatgaattgggcagcactcagaacaaggagaggttcagagaactctgctgtagcagcccagacagtgaggccaacacaggagtaagacagagaaactatatttaatgggttatcatagaaagatgataattagaggttagatggcagattctagttggtaaaatctctagtttcattttactgtttacatcaggtttcagtttgcttacttagaaacttaaaccactggagccaccccagcctactggccttctctcttcccaattattttttaacaactggttcctgaatcccttcaaagaatactatttaaatttaaataagtgatagatggaaacaatgcattcaatatcataaatcaatctttctgttttttcaacagagaatactgaagtctcaaaacaatagctcagttgacccttgtgtaagtacaaattctgaactacgacccccagaatattccactcctttctccaggcatatgttctgtgtcatgactgctgttgcctgaatcatgttcagtctcagctggagtatgtggctgtgtgaattcagttgcatcacccaagccaggtagatgtgcctgggccttggatgtctcattatgaaagcaccctttccatctgtttcagtagaaaccttccaatgtccttatttcccctggaaagtgagtatgggaggctgagctccagaccactgaggtctcttgagacagagcctgaagtggtaatgggtagggctggcctggtgattagggggaaggaacaaatgtgagaggataacagcattttcaagtaagtggtgtggatgaaagggaaagtcctaaaaatgcactccaaggtgcaggtagagttgaagatggtcataagcatcagccagaaggaacagaccaggccaagctattatgttccaggtgttgatcctgtcattagccctgtaaaggagtacatacaaggcaaggggtcctttacagagctcatttggatggtttcagggaagccattagggtgctgagctggttaggactgaaaccatcacgacctagcaaatcctgaggcattttaactcaactgcttatctggtgctcagtactatgcaaactttctgatgccacaggccccatccattctctgcttgctatatgactgcctgctttggattctgccaaaatcatggatgagtcccttctctaaatgaaatcgtgatttgattcttttcattgcagtgagatgtctgttttaggccgggtcaccttcttgcacaactctgggggacagcactcacatagaatatcatgcaatagcactgacacatgatacttaacagaggagggatgctcaaatagttttatacacaccttacctccaaagcagtcctccaatcagatttaggtcttttccacactgattttgatgtctggccaactgagggacttttcaataattaaaacagccctggaagtcagtgtttgtgtggctgattttggatggactaggcatggaggtttaggtttcacagctcacagccagatatgtgtggggagaagagggaaacagttccagcaaaggtatggtcacccctgttaataatttttccaaggccagtaacaacattgacttataatatccccatgcgtccataaccagactttgcttaggttgaatctcatattgtcctgcagcctggaatcacttgaagagctttaaaaaaatattgtttcctggatcccacttctggggaaattataatttaatcattctggactatgtatgactggaacattaggatttgtttaagatccccagatgtactaattctgatacatagaattgcctattctgtcacctaaagaagaataccagtgcctgtgcctcaaccctgacccagtgattcagaatctctggtgttgggttcaggacattagcattttatatactctcctgagaggagtctaatgtacagccaggccaacaaccaaagaaccagagaaatcaaatctcttcttgaaaagatgggtttggagaacaaaatggcagataggaggcaggactaacttgctcctcctactcagatggacagaacagcgtgttgagactcacactgtgaacttttgctccaagaaccactgcaggaatataccagcaaaactgaaggaagtcacacaccctttaaaagaagtggcttgccaccgcaaactctgggagatagccaaaaaaccgtgagtcctcaaagtgtgagagggaaaaagtccacctctgaacacatatcctcactggggaacctggaaatccagatcacaggagaaggatttcacctaacctagagctgaaatgaatttagaaagctgggtgaaatataaaagtagaataagcagcaggaagaggtgccttccccaaggatccctataagcatttcagtccccagggaagccatttctgactttatctcacagtccttggggagggcagccagtacaatttgcagagagccatggggagaaggaggcttccagctgaactttgtaataattttaaccaagcacaaattttcctggtcagaatctgggggtgtgaacctgaagtacagatataagtgcagaagccatggcaggcagggaggggtgagatctgaaagccctgcttgctttctcaatgggggtgcttcttcctggggcaagatcttagctccaggcaaaggatgcctggatataaatttggctctgttggctgttgggcaccacagcgggagtgagactggccttgctggctgcctgggtgctgggtgaagcctgtcactgccggcttcccttacttatctggtgaactgtatgaagcagcagaggcaggcataatcccctctggaacataaatccattggcctgcaagccacccctcatcccccacagtggccacagcaagccctgtctgagaatctgagctcagacacacctaaccctgcccccagctgatggtctttctctacctgcccctgtagctgaagacaaaagacaggggctcatgggagctctatgacctcacccatcacctgagaaaaccgaatacttatccagtgaacttaggtcaagcttgtatccccctcatattacttgcagctgatggtctcttgaaagtgccacctcctcgccgaaggtcagccaactcaagtcattacagacactcatacgagaaccaccttgctccaggaaggagaaaacaacaactaattatactgcctgtaacatcctggctaaccaaagatcctgagtctgtccctgtaacaacctcactgctagcataaccaacatttgagaaaaccagtgtactaaacaaaactacaatcaaggactctcacagaatccacttcactcccctgctacctccactggagcacgtgctggtacccatgactgggagaactgaagacagatcacatcacaggaccctttgcagatactccccagtaccagcccagaacccagtagctcttctgggtggctagacccagaagagcaataacaatcacagcagtttggctctcgggaagcccatccctaggggaagggggagaacaccacattaagggatcaccctgtggaacaagagaatctgaacagcagctcttgagtttcagatctttcctctaacgtagtctacccaagtgagaaggaaccagaaaaacaattctgataatgacaaaacaaagttctataacacccccaaaagatcacgttagctcaccagcaatggatccaaaccaagaagaaatctctgaattgccagaaaaagaattcagaaggtcaattattcagctactcaaggagacaccagataaaggtgtaaaccaacttaaaggaattaaaataataatacaggatatggatgaaaaagtctccagagaaatagatatcataaataaaaatcaatcacaacttctggaagtgaaagacatacttagagaaatacaaaatacactggcaagtttcaacaatagactagaacaagtagaagaatgaactacagaactcgaagacaaggctctggaattaacccaatccaacaagaaaaaagaactttttaaaaatgaacaaagcctccacgaagtttaggattatgataaatgaccaaacctaagaataatttgtgttcctcagcaagaaatctaaaagtttggaaaacatattcgcgggaataatcaaagaaaatgttgctggcctttctagagatttagacatccaaatacaagaagctcaaagaacatctggaaaattcatcacaaaaagataatcactcaggcagagtcatcaggttatctaaagttaagatgaaggaaagaatctatgaagcaaaaacatcagctaaactacaaaggaaaacttatctaatgattaacagcagacttctcagcagaaaccctacaagctagaaggctttgggatcctatctttagcctccttaaacaaaataattatcagccaagaattttgtatccaagaaactaagcttcataaatgaaggaaagataaagtctttttcagacaaacaaatgctgagagaattcaccactaccaagccagtgctacaagaactgctaaaaggagttctaaatcttaaaacaatatatcaaaatataccaaaatagaaccccctaaagcataaatatcacaggcctattaaaaaataacacaatgaaaaaaataaggtattcaggcaacagctagcatgatgaatagaatagtacctcacatctcaatactaatgttgaatgtaaatgacctaaattcttcacttaaaagatacagaatggcagaatggataggaatttaccaggcacctgctgtcttcaagagactcacctaacacataaggactcacataaacttaaggtaaaggggtagaaaaagatatgccatgcaaatggacaccaaaagcgagcaggagtaggtattcttacatcatacaaaacagactttaaagcaacaacagttaaaaaagacaaagagcgaccttatataatgataaaaggactagtccaacaggaaactagcacaatcctaaatatgcacctaactgtggagttcccaaatttacaaaacaattactcactttgggaggccgaggtgggtggatcacaaggtcaggagatcaagaccatcctggctaatgcagtgaaaccccatctctactaaaaatacaaaaaaaaaaaaaaattagctgggcgtggtggcaggcacctgtactcccagctactcaggaagctgaggcaggagaatggcatgaacccaggaggcagagcttgcactgagccaagattgcaccactgtactccagcctgggcaacagagtgagactccatctcagaaacaaaaacaaaaacaatttctactagacctaagaaatgagatagatggcaacagaatgatactgggggacttcagtactctgctgacagcactagacaggtcatcaagacagaaagtcaaccaagaaacaatggacttaaactgtacactagaacaaatggacttaacagatattacagaacattctacccaacaactgcagaacatacattcttttcatcagtacctggaacattctccaagatagaccatatcataggccacataacaagtctcaacaaatttaagaaaattgaaattatagcaagtactctctcagaccacagtggaataaaattggaaatcagctccaaaaggaaccctcaaaaccaggcacgtacatggaaattaaataatcttctcctgaatgatcattgggtccacaatgaaatcaagatggaaatgaaaaaatcctttgaactgaacgacaataatgacacaagctatcaaaacctctgggatacaggaaaagcaatgctaagaggaaaattcatagcattgaatgcctacatcaaaaagtctgaaagagcacaaatagacaatctaagttcacacctgaaggaactagagaaagaagaacaaaccaaacccaaacccagcagaagaaaagaaataacaaagatcagagaagaactaaatgaaattgaaacaaaaaaaatacaaaagatatatgaaacaaaaagctggttatttgaaaagataaacaaaattgatacactattagcaagattaaccaagaaaagactagagaagatccaaataagcccaattagaaacaaaatgggagatattacaaccaacaccacagaaatacagaagatcacttaagtctactatgaacacctttatgcacacaaactagaaaacctagaggggatggataaattcctggaaatatacaaccctcctagattaaagcaggcagaaatagaaattctgaagagaccagtaacaagcagtgagattgaaatggtaattaaaaaattgccaatactagaaaggccaagaccagatggattgattcacagctgaattctatcagacattcaaagaagaattggtatcaatcctactgaaaccattccaaaacatagagaaagagggcatcctccctaaatcattctatgaagccagtatcaccctaataccaaaaccaggaaagggcatagctcatgtcaacaaatgtgatataccacataatcagaattaaaaacaaaaattgtatgatcatctcaataaagacagcaaaagcatttgacaaaatccagcaccttttataattaaaaccctccacaaaattggcatagaggggacataccttaaggtaataaaagccatctatgacaaacccatagccaacataatactgaaatggcaaaagttgaaagcattccctctgagacctggaacaagacaaggatgcccactttcaccacttctattctacatgatactagaagtcctaggcagagcaatcagacaagagaaggaaataaagggcatccaaatcagtaaagaggaagtcaaactgttgctggtcgccaatatgatcgtatacctagaaaaccctaaggactcatccaaaaacctcctagatatgataaatgaattcagtaaagcttcaggatacaaaatcaatatatacaaatcaatagcactgttatatactaacagagacaaagctgagaatcaaatcaagaactcaaccccttttacactagctgcaaaaaaataaaatacttaggaatgtacctaaccacagagatgaaatacctctacaaggaaaactacaaaacactgctgaaagaaatcacagatgacacaaacaaatggaaacatgtcctatgctcgtggatgggtagaatcaatattgtgaaaatgatcatatggccaatagcaatctggaaagtcaatgcaattcccatcaaaataccatgatcatttttcacagaactagaaaaaacaattctaaaattcatacagaaccaaaaaagagctcatgtagccaaagcaagactaagcacaaagaaaaaacttggaggcatcacattacctgacttcaaactatactacaaggctatagtcacccaaacaacatagtccaggtatgagaatataccagtacacatagaccaatggaacagaagaaaggacccagaaataaagccaaatatttgcagccagctaacctttgacaaagcaaacaaaagcataaagggggaaaggacaccccattcaaccaatagcactggcataattggcaagccacatttagaagaatgaaattgaatcctcatctctcaccttatacaaaaatcaactaaagatggatcaaagacttaaatctaagacctgaaaccatataaattctagaaaataacattggaaaaactcttctaggcattggcttaggcaaagagttcaggaccaaaaacgcaaaagcaaatgcaagaaaaacaaagataaatagatgggatttaattaaactaaaaggcttctatacagcaaaagaaataacagaataaacagacaacccacagagtaggagaaaatatttgcaaactatgcatccgacggaggactaatatccagaatctacaaggaactcaaagcaatcagcaagaaaaaatcaaataatcccatcaaaaagtgggctaaggacatgaatagacaattctcaaaagaagatatacaaatggccaacgaacatgaaaaaatgctcagcatcactaattatcagggaaatgcaaatcaaaaccgcaatgcgataccaccttactcctgcaagaatggccataacttaaagatcaaaaaataataggtgttggcatggatgtggtgaaaatggaacacttttacacttctggtgggaatgtaaactagtacagccactacagaaaacagtacagaggttccttaaagaagtataagtagatctaccatttcatccagcaatcccactactgacggcagcggcaggcagtctgaagtggctgctgccatgaagctggctgcagtgaggtgcaggcgctggccgtgggtcttagggggcagacacagaggcaggagatccccagagccagttgccctgggagccttcctctgggagccgctgcaatggggctaggcccagctgcccgtagggcgtggtcaggcagggaggggtgagcagagagaggtcccaagatggagctgggccagtggtggttcggcacttgcacacgtagcgtgggggtcgggcccgaacgcggagcagtggccacacttcaggggccggggtgggaagtgggagtggcgcccacttccaggacccagccagcaatgcggcccctgcacccaccctgcccacagcgccaggttcccgcccctcacaggaggctgaacaaagggccgccagaggccgtgtccctaggatctgccccgagttagagtgactgctgtgcctggtgctttcagcagctgagactggggaggcaatccggtcctggaggtttcccccaggcagggtcacaagccaggagagggggtgccccaagccatccctgagccttggggccacaggaggaacttgagccaacatcacccctgcaccagatgctggcctgggcctggcaagggctggagccaccaacccaggctgcaaggaggcagacagggcagcaggaacggccagaggagcagcagtggcagcagtgggtccctgtgccctgtgtccctgaggcagggaccctcaccctcacacagccggcaggacctgctctcaggcccagagcctctatcacagcctggacctctttccccactgcatcctgggaacctgcaagcacctggccaaaggtgcagccgagactcacagaactggcccctgagtgtcaggttcctttgtgtgaggttggctggggcactgtgccacctgcacctcatccacaactgctgcaggagacacagagagggggcatggctgaggccgccccactctgcagagccaaggacaagcaggagccctgcctctcccaaattggcagggcaggagctcgccatgcgcaactgcaggtgcccaggttgcagctgtaggcctgggcctcccagtgctcttgggggcccaggaggctaccctccacctgccagaacagaagcttctgctgcctggccattccctgctcccagcacctgctgcaatcttggagcagggttggggctgagcccaggtgcagttgcagccctgttgggtgtgcacatgcttggggcagagctgacacaccaggcccctgctgcctgcacccctctggattttgggtgctgacgatcataggagagaggccaagaatgggctggggccagctcagcactggcctgcaggtgcccctttgggcaaggggcctgggcaccatgggtggtggggaaaggcagacaggctcctgggtgggaaggggcaggtccctggtgaggcaccaccttcaggcaagagagggcctgaaggctgggaactgggctgccaatcctatggaccagagtgggaacttgtaatgcctttcaaaggcctgctcatggtaacccatggaccaatcagcatacacttcctcccctctgaagcccataaaagctctggactcagtcagacttggagagaacatcctggacaaccagcagcagagaagagcttcacactccagggactacctgccagcagagagaagccacccaccctaggacctcctcctctttgctgagggctgaacactcgtcaggacacattggctgcagaaaggagctacccacagtgggtctctgagctgttctactgctcggtaaagctcctcttcgtcttgctcaccctccatttgtcagcgtccctcattcttcctggttgcaggacaaaagaacttgggatctgctgaatggtgaggctaaaagagctgtaacacaaacagggctgaaacatgccccttgatcaccgcattgtgggtgaagagaaggagagaagagctgcagccctttggggagcccagacctggaagctccctgagccagggctgtgactcccttttggaggctctgaggttcctggcatcttcaagcttctaggtgccagcacatcccctgttgccagccatggaagctgtttgcagtgtgcctggtccagacacagccttgcagagagccagtgctcatgccagcacctggagttgcctgcccttatgcaatagcaggcatgtctgactgtatgcagtggctggaccccatgcttgctcacacgcctctcccactccatgcctgacctgccccatggcaggcccttggtaggtatgcgatccaggccagtagcctgagccaagtgcagcctgccaggccaagtgggtggaaggagcccagtgggcctgagcaaaactcaggcaaaggcacaactgcttacagaggtttctggcaagaaaaagcaataccccaaggattccgtaacactactgggtgtctacctagtggaaaaaaagttatatgaaaaagacacttggacatgcatgtatatatatatatatatatatatatatatatatatacacacacacacacacacacacacacagagacacacacacacacacaccatggaatactactcaggtataaaaaggaatgaaataatgacattcacagcaacctggatggagttggagaccattattctaagtgaagtaactcaggaatggaaaaccaaacaacgtgtgttctcacttataagttggagctaagctatgaggatgcaaaggcataagaatgatacaatgggccttggggactgagagggaagggtggaggagggtgagggataaaagactacacattgggtacagcgtacactgctcttgtgatgagtgcaccaaaatctcaaaagccaccactaaaaaaattatccatgtaaccaaaaaccacctgttcccccaaaactattgaaataataattttttaaaaagattaaggattcgacatacttaaacatttggtacttcattccctccctagggttttggagatggtggaacacacagcatctgacactggacagatgagattgacagcagtgtattagtcacatttactcggtagcccggtgggggtgggcaggcatcccacgccacgcagggccacatgggggctgcgctcaggaacagaggaaacagccagtggctgtggagggcgggctgtcccctgcttccagagggagagtgtgattggcttgtttgaataattccatggctggcagggaaatgaaatcagctattcaaaaatacgcagaaggtgcaagcggtcctcttgatcagaagtgttggtaggaaaccttacctgcagcagcagagccggcggaggacttgtagatagaccattctaggccctcccagtgttaccagatgtccaggctgcacataatattgaactctaattttagtccttacagcacttttcacttgaacggcaaagggctcagtcacagactggttctttgttgtaaatacacatgtatttgtctacaatacagcatgtatgtattggtctctatatttgctctataaattctgttggtttttaatgaccgggatttgctccacaacacgtggatgcaaataccatcatattttaatttccccaaatgaaattaaatctggctaaaggtgtcacatattgagacttgtaagaaatggagaattcgttgatttaccattccttttatagaacaaagcaccagctcttttatgggcccaggaaatgaggtgagggcctctgtcttcaacactgtatggtgctgttaccattgtccttggtcatcagagatggcaccttcgcaccttacaatccaagttagctaagtcaagggggatgtatgccaggctcccagagctgaagagctctgtgcttcctggggcccacctggtcatctccacccacggtccttccccctcagaggtcggcgtagagccctccaggcacaaaacgtacagtctaggaatccctaactaggccctctcttcaactcatggggaacttatggccaagaatatgggatgtggtgatatctcagaagcttattccatcatatgtaattagctaggtctccttttcactagttgatttgtggtataggcaaattgatttaacacttcatttcaaaacctggttttatctgcagaataaggaaattattcagattcctataaaatcatcatcttgctttgttgctagtctttcttcattacaatctctggtttcataaggaagacttttcaattctgacccataccccttcctcctgaacttcactgcagaccaggatttgttctgaaatctccatgccatgtttttccttcatatcccagggagaagcatttgcctgtccatgcaggttcacacaaaggcagtgtgttctagttgcccagagggttggccttcctgaatcttgcggttcccagtgacgtggacactgttttatcttctagatgagaaacctggatgagtgtgaggtgtgccgggacggaggggagctgttctgttgcgacacttgttcaagagtcttccatgaggactgtcacatcccgcctgtggaagctgagaggtaagtgacatgcaggcgtctctctttttgtcctttaagggatcttccacctgccatgcgcactctccagcagagtgccggcttgtgtctagatggggaaagagcaggttcatcgggtactgggacccagcagtgtgatccagagagcagtgggagacgctggcagcaggaggttaatgtcctctgtgctctcagggacacctcctctgatatgctgagggcagtgttggggacctttgcctacataccggcattgtcctttccttgaagttttgcagctgggtgggttggagacaagaaacaccagttgtttatattttgtgcttattcatacaagacaggaagcacg

SEQ ID NO: 14219 - DNA, 537 bp, Homo sapiens
cctccaagaatacgttacaggaaaaaaaagagaatactgaagtctcaaaacaatagctcagttgacccttgtatgagaaacctggatgagtgtgaggtgtgccgggacggaggggagctgttctgttgcgacacttgttcaagagtcttccatgaggactgtcacatcccgcctgtggaagctgagaggtaagtgacatgcaggcgtctctctttttgtcctttaagggatcttccacctgccatgcgcactctccagcagagtgccggcttgtgtctagatggggaaagagcaggttcatcgggtactgggacccagcagtgtgatccagagagcagtgggagacgctggcagcaggaggttaatgtcctctgtgctctcagggacacctcctctgatatgctgagggcagtgttggggacctttgcctacataccggcattgtcctttccttgaagttttgcagctgggtgggttggagacaagaaacaccagttgtttatattttgtgcttattcatacaagacaggaagcacg

SEQ ID NO: 14220 - DNA, 8514 bp, Homo sapiens
gcggtggttatggatcatgtgacctccagctacatgactcctgaaccataattctaatcttgtatccaatttgttagttttacaaaagtggttttggtcccagagcaaggagggggtaagttttgggaagggattgttataatctttgttttaaagttaaactataaactaaattcttctcattgttagcttggcatacacccaggaatgagcaaggacagcttgtgaggttagaagcaagatggagtcagttaatttagattcctctcactgtcatgatttttgcaaaggtggtttcaatatgtctaagtctagatcatttgatatttatgcagcttggtgtttgatgagtttcctgaatctgtggtttgttgtctgtcattacttttggaaaattcttggctatcactacttgaatatttcttctgctctattttctctttcttctccttctcgtattccaattacatatttgtcacactttctgaaattattccagcattcttggatattgtgttctgttttgttttttcctttttttttcctctttgcatttctatttgagaagtttcttttgacatatcttcaattcactgattctttccttggccatgtccaggctactgatgaactcatcaaaggtattcttcatttctgttacattgtttttcatttctagcatttcatttttcattatgtctttgagttgtcatctttctgctcacttaaccatctgttcatgcgtattgtgtgcttttttctttagagcccttaacatattaactaaccatagttattttaaatttctgtctaaaaacttgaaaatccatcatatctgagtctggttttgatgattactttgtctcttcacactgtgttacttcttgccttttggcatgtcttataattttttttttaagtcagacatgataagtcaggtaataggaactgaggcaaataagccttcaatgtgaggttttatattaatctgggtaggaaatgggccatatctaatgtttgttctagctgtaggtggcagaggtgtcaaattcctctagcgttcttgtttttctttcccctgctttctctgggtttctctgagaactcctttttaaatagtctgtttcttgtagttcttccagctgtaatctgctcttattatacaggaaccctgttgatggaatggtaacgtgtcagagggggaagtggtctataatcttatgattacatctcgatcttttaatggaactgcaccttgggctattacttttaaaagaatttctccctccacccttttttttcaatttttttgagatggagtcttgctttgttgcccaggctatagtgcagtggcgtggtctcggctcactgcaacttctgcctcctaggttcaagtgattctcctgcctctgcctcctgagtagcagagattacaggtgcctgccaccatgcccagctaattttcttttgtgtttttagtagagacggggtttcaccatgttggccaggctggtctcaaactcctggctttgtgatccacccgtctcagtctcccaaaatgctgggattacaggtgtgagccaccgtgcccagcctcacctccaccctttttagaagtgacaagatggccagaaggggctagattttggtagtcacccttcccctagaatggttaaagcattttccctggagagcaggcccttgtcatggagaatgctttggctttttaaaaacttttcttttccctcttcttgccagaaggataaagagatttttcttggggtttgtggaggtaaaatccataaaaggttgggggcctgccctgagatgatgacccccaggagtttctcatgctcatgctcctccacactcagcctccagcaattcatcaaacataccaggctatgacttcagtgcctgctgcctcagatagttgatctcggctaattctctggatttgcctgtatctccagattttggggcagtttgccttgtgactttggttatttgagagatagaagaaaagttgttaattcatagtttgttcagcagggttgttgttgttgttgtgaggatgggagcgatgacttccaatgtctttgcgtgttgaagctgaaaccagaggtctagtgaacttttacatttttgaagtttagacttttttcttaagacaaactttctttttgttttaaattttggttttattatagtattatcttatagccagagcatgtaacctgttcaatttctcttcattattatttattgaaattacttcagggccaaatacctggtatgatcttgtgtgtttaacacagtgttattaaaaatcaattttgccagtttttaaaacttacattttgtgtatctttgttcttttatttttatctacttgagaagctaaggactggaagtaagatgttttttaacagccttgaaagatttccccattagtaatctttaatcttactttttaaatgtgagtattgagaattttaccttctttctcatttgtatttgcttaatgaaacttatccatcttttgactgttaacatttttaatgttattttatctctgttatgtctcttgtagttagattctattttgaccatttataatttaagatggtagcttaatctgttttaaatatcttgttgcttatggattttttatttttatattttatgcctctttattttctataagaaaaagagcatgtttttctttctcattattttgtaaagtttgtagcctcattttgactctatttgttacacttgggtttctaattaattctttaatgtatatttctctaactgagaccatcaaatttataactatatcatttgaatttgtatttgaaataagttacttaactcaattttttacttgtcctcactcaatttaaaaaactttaccaagatatcgcaccactgcactccagcctgggtgacagagcgagattccgtctcaaaacaaaacaaaaaaaacattaaaatagaatctaaagtttaagattgaaattactataattttattatatgcagtatatatcctctctttttagaacagtgcttctcaagtatttgggttcaggatatttttatatttttaaaaattatcgagaaccccaaagaactggcttttgtttattgggttatatctgttgctatttacgatattagaaattaaaactttgaacacttaaaatatgtatttattcatttagaaataatagtagtgaatttattacccgtgaatatgtgatgtgtttttatgaaaaataataaaacttttcaaaatagaaataaattagccagaggattagcattgctttacatttttatacgtcttttaaatataagtagaaggcagctagaccctcctatctgcttctgcattcaatccgttgtgacatcacaggccatttagcctctgaaaaatttcattgtatattcatgagagaatgagaaagataaagggaaaataatatgttattatgtgaagagttttacttggtgacacctgaaagggtcttgcacaatcctagggggtccctaaccccactttgagaattactgttctaagataatttatacatttgagacatcagtattgtaactggttttaatgatgcttccagttcctctacaataaggctttactgatactgatttcttgattctgttaatgtagtacatcatcaaataattcgtcctacacagtgtcagtaaaaatggagtagggtgatctataggaacaaacaattcccaaatctcaacgggtcaccagccctctgcacagaggaccctcatcctggactctgtctctggctgaggagcagccaccccatctgaaatgacagtcactgtggtagaggaacagagagcatgcctaaccaggtgctgcctctgagctcttctgccagagtgatacccattgctccaagggaggtacaatcttaccttggcccagaagaaaagaacattgaaaaatgtgtgaccaacacagaaggtgcatgagcaaaatattctttgagtccttgtctatctaagtattgattctgccctcatacgtgaatcattgaataaggtatacatttttccattttaatttttttggacccattctcaagaactgaatgggtatacactttttttagtagtttcctcttacctctaggtttataggtttgcatcattgctttagacatttagggtttcaaattcacttatttttccctttagggcttttccccatatgttctgggaaattctccctcctttatcttataaaaattttcattcactttttaaaaatttcacaatcattttgaatttccaaggtcgttttattttctggttgtttcttttctgcatggaatttttggtacaatatattctctttctgtgtgataatatttgttgtttagaaattcttttttgttccctgaaacatctgtatttccgctagggtaattttttgccttttgcttatcttggttttactccttaatgttgtaggtttccacaaatgctgtggtctgttgtagtctgttcatgcttaccagcaagatgctgaaaagtaaacttgaaactccatttaatgagatgggcttgcaaacttgtgggcttcactgagcaaataccaaatccctgaaggtaaaggccttttctctgagtcatttatatttttcttaagaggaaacctccagtcttctgcctgattgtgggtgttctgtgtcgtagagcaaactgtttttaattttgcctttggaacaatctctcgattttcatctctgcatctccttctcaaccaccactgcatctctgggaggctgcaggacacgctggatccttttctgacctcaggaagcatcctccaccttcaatagcaatgagtacccctcagaccactttttctctttcatacttaggttaaaatttctcatctaattcctttctcttcatcattgtaactttaattcctttactgtcattttaggagatattctagtgaaagaggagaaaaacagttgtcattaatcaacgattttaaaccagaaggctttttcttttttaaaagaattcaatggataaatggtgcatgtctggagaatgggaaattttagtgatcctctattctatcctgatgcatgtttaaggaatggaaagtcccaatgaccatttcctggtgggataaaaaaaatcctggaagtcttcataccgtttagaaatacagataaatttgttaaggcctattagcaaggggaacaatttagcaagtaggaatcagaactacaaacttttgtgattaaaaattagtttcccaggcacagccttaatgtctgaaatccagaggtctccaagtttagacagattaatgtgtcctagttttgcatatccacacaaatctccatgttggaccagagaaagagtgattttcttgtgactgtttttttttttttttttttttttttgagatggagtcttgcctctgtcactcaggctggagtgcagtggcacgatctcagctcactgcaagctccgcctcctgggttcacgccattctcctgtctcagcctctcgagtagctgggactacaggcacctgccaccatgcccggctaattttttgtatttttagtagagacaggtttcaccatgttagccaggatggtctcgatctcctgaccttgtgatccgcctgtctcggcctcccaaagtgctgggattacaggcgtgagccaccgcgcccggccttcttgtgtattcttaatcaaaccttaccagatgagagtctttgaaccaattttatgatgcagaatgccaccctccttttgcagttacagatggaggagatacatctcctttacatctcctgagatttcctctctttgttgttaactaagaagacttgcagttcagtgttaggttctgtaatatctcagccagatttttatttctttctctgtaagttaaagttctccagagaaacagaaccaataggatgtgtatatacagagaaagagatttgttataaggaattggctcttgcaattatgaaggctggcaagtccaaaatctgtagtgtgggcctgctgtttggagacccaggagagctgatggtgcagctccagtctgaatgcagtctactagaggattctttctttcttggggacactagtcttttggttctattcaggctttcaattggttgggcaagccccacccacattatggaaggcaatctgccctactccaaattcaccaatgtaaatgttaatcttatccaaaaacaccctcaaagttggcatataaaattaattaccacagtatcatgtcaattcctataaagattttgacatcttttaattgcatattttccctagagagttcaggtgaaggtctctttataatagtttgattggaacagggtgagcctttttacttctatgtacaggtctttcttaagttcactgttttcatcttttccaccttgatttttcccaaaataaataaattccattcattctggtctccctacaagaatgcttattttatacatgttggctctccattggccatccttcatgtctaaaatcttctaaccaccacaaacctcttggaaactcagtgtctacttccacgttgtatctttgtttcttaggatggtcgcagagatccagaacgtagagggtcagaacctgcaggagcaggtttgccctgagcccattttcaggttcttcagagaaaacaaggtggagattgcaagtgcaataacaaggccatttcctttccttatgggcctccgagaccgctccttcatctccgagcagatgtatgaagtaagtaagaatttccaaatgatgataaaccaggtccatactcaattatgccaaacttcaagatgcaatgagcaggctaaagggcctcctgtgagtggggaccttcaccattctgtaggttaggaggtgacaggagaagcaggcatcacagaaaacctcccttcttctgtagtaaatgttgggggagggccacagtgagggaggtggggcaggagagagaatgggaatgctgtatgggtgcagatcatcctaggtacttgtaaacaatctactaatggtagccataattaaaataaataagtgacctaggcagcattttattccaaagcctacttatttgaaacacttgaaactgagatttttttgaaactcacagtgaagttgtgtcattttaggttacatttggaagtggatgcttgctactgtctctccaaatcattgtttgatctttggacatttctagagccctagaatgcaagttaatgttagcagtggatgcccttagggatactgaggacaaggcttcttcttgtctttgtgaattttctgtgccctttggccaggagtcatagtgggggctggttgattggtttcctggagctcgtcaggccaggccaatcctagtagtggttattgtccatgcaacagaacagccttgttaaggccactcctgaaataacctggccaggctctaaagccatacacaacattcaactttgaacccacacttattatttaaaattactctctccccttaagtgtacaacaatgtcagagagtcaggttcaaaaaattagagtgtatttttatggtggaggacatttaagaagtcatccaaatatacgcaaaattctaacatttcacaagagaacagatgttctatctacaacctaaaagtcttttgtaacccataaatctctagctacataattctccatttaatatttttaagcattttcaagaagcttttagaaacctggtcccagtgacaagagtgatgtattgtgtactcagtgaactggagaagacatttggctggtcacatctggaagcattgttcagcaggattaacctgatggcctatcctgatttaaacgagatttacagaagcttccagaatggtaactatagctctcaacagctttgggggattcaagcccatttcattcattgattcattcattcactcttcattcatatttgacaaatatttgactgagtgactattacatgccaagcccagggggaatataatgatgaaaaaacacacatgtcccatgtccttatggagtttacatacagtgggagtgacagacgttaaccaagtaatcctgcaaatggttgctcagccaggacttgattttgatgctgtaaaacatagggttgaagtctctatttttttgaaggaatacatgagtgatgtcttttcatgggaaaggaggaagccttctctgatatttgcagatatgttcaaagataaaacaattttctttgtattagaaaatttatcatccagtgcagtcctgtgtcaacttgtttctccaaacaaagactggagaagtcacgaagagagcctagcacatactggtacactgaggaggagctgcatgtgaaagctatgaagacagaaaagggggttggtgggggcctttccgaaccatgtggtt

SEQ ID NO: 14221 - DNA, 629 bp, Homo sapiens
gcggtggttatggatcatgtgacctccagctacatgactcctgaaccataattctaatcttgtatccaatttgttagttttacaaaagtggttttggtcccagagcaaggagggggatggtcgcagagatccagaacgtagagggtcagaacctgcaggagcaggtttgccctgagcccattttcaggttcttcagagaaaacaaggtggagattgcaagtgcaataacaaggccatttcctttccttatgggcctccgagaccgctccttcatctccgagcagatgtatgaacattttcaagaagcttttagaaacctggtcccagtgacaagagtgatgtattgtgtactcagtgaactggagaagacatttggctggtcacatctggaagcattgttcagcaggattaacctgatggcctatcctgatttaaacgagatttacagaagcttccagaatgaaaatttatcatccagtgcagtcctgtgtcaacttgtttctccaaacaaagactggagaagtcacgaagagagcctagcacatactggtacactgaggaggagctgcatgtgaaagctatgaagacagaaaagggggttggtgggggcctttccgaaccatgtggtt

SEQ ID NO: 14222 - DNA, 12771 bp, Homo sapiens
actgagcaccgaggggcagttggcagcttcacctcagagctgcaggaaggaacggggcagtgaaaatcgaatcgggtgtgatcctaggccaagctcatggcccagcagggccagcaggggcagatggcaagtggagacagcaatctcaacttcaggtgggtcatcgtctcctttcccgtctgtccttcatctctggtagggttccctttcatacttgttatttaatgtctacccagcttcactctacaggtatacaatagaattcagttacaaataaataacgaggcaatcagattttttaaattgcagggattggctgttggagaaactcaaggatgccgtgactcacatcatcttcctattctcttacatctgcaaatggctggactggagctgtttgaacatcatgcctgttctgaggctttgtgtaggattggatgattccccgtgacctctgaaccctctcttctcccccaggcctcctttatccccactccaaaagacaactctgtctaaaaaggatctttttagaagaattaaaatccaaacgcctgtctgttgtcacactttccaggctgtgtagttggggaccggttctgctctgagcccatctatgtggctcttagccctagaatcacttcaggatctctgaatacttggtaggaggaagtgaaagcagatgagacccaacaaaaaaggcaagcaggtagagagtgagtgctgcttctgctttttttattcttctgttctggtattttttacatatctggtcagagaagcctggaaatcatctttaaaaaatgtaagacaatgagaccagtctgaccaacgtggagaaaccctgtctttactaaaaatacaaaattagctgggtgtcatggtgtatgcctgtaattccagctactcaggaggctgaggcaggataatcgcttgaaccagggaggcagaggttttggcgagccaagatcacaccattacactttagcctgggcaacaagagtgaaattccatctcaaaaaaaaaaaaaaaaaaagacaagtacatcaatacggtcatttcttcttatctgtggattctgtatccatggatctaaccaaccatgaatgcaaaatattttctaaaaattaaaaacataaataacaacaataaaaagtaatataaaaatttaaaatacagtataactatttgtatagcatttacattgtattaggtattataagtctagagatgatttaaaatatacaggaggatgtgcataggttatatgtaaatactacaccttttatatcagggacttgagcatccatggattttggtatccatggagggtcctggaaccaattccccctggataccaagggatgactgtacattcttgataaaaatgaaaatgtgtggaatgtaaaaatgtatggaaacttgtctaattgggactctgtgctaaggctacttctggcgctggtacagccccaagaaagcaaaagctattgctattatcagcagtagtggtggcaccagactggttttcagtgcccagtgccaccactcccagacaggcatccctgtcatctctctttcacttgctctctagtgaagggaagatgagccagcggagctcaaagtccagccagcccatggtcaccaagcaggaagaagacggcactgagaggtgacaatgggctaatgctaacctcaaagaatgagttaggaagtgttgcctctgctcttatttttggaggaaattggggaggatgatgtcatttcttccttaaatatctggtaggattagctagtgataccatctgggcctagtactttcctttctggagggctattaattatcgattcaaatttctttaatagatgtaggcctattcagacaacctatctcttgtgcaagttttggttagtttgcctcttaaagaatttgttcatttcatctgtgaccaaatttgtaggtgtagagtccatagttttcctttattacctttccattgtccatggaattcgtagtgatgacccttctttcattctgatgatttccgtcttctctatttttttctttgttaggctggctagaggtttattaattaactctttgaaaagaaaatcagcttttggtttcattaagtttctcgaatgttttcctgtttcaatttttttaacttccactttaattttaattttttttcctgcttgcatcaggcttaaattgctccttttttctctagtttcctcagatgaaagcttagattattgacttagatctttcttcttttctattgtatgcatttaatactatacatttccttctaagtgctgcttttgttgcatcccattcattttaataagttgttttccttttcatttacttcaaaatatttttaaaattcttttaggacttcttatttgaccctagaactcttttggttaatctggaaatattttggaattttccagctatttttctgttactgatttctagtttatggtctgagaacaaacttttaggatttctattcttttaaatttgttaaggtatgttttatggcccaaaatgaagtacatcttggcaaatattctatgtgagcttaaaaagtacatgcattctgctattgttaaatggagtaccgtataagtgtcagttagaccaagctgattgctattgctcatcaggtcaactacacccttactgatttttctgcctgtgtgatatgtcaattaataaaaaagaagtgttgaagccttcaataatagtagtgaatttgtctatttctctttatagttctatcagtttttgcctcatacattttgccattagtttgttagttgcatacacattaaggattgtgtaccttcttggagaattgacccttttatcataatgtaatgtccctctttaatccctgacaattttccttgttctgaagcttctttgtctgaaattgatatagctactataccttttctttgattagtgttggcatggtatatcttgctccatccctttatgtttaacctatctgtatttttatatttacaatgactttcttatagacaacatatagtcgggtgttttgtgttttttatgtactctgttgatctcttgtcttttaattggtgttttagaccattggcattaaagtgattattaatatagttagattaatatctaccacatttgtaaatgtttcattgtacctatcgtttttatcttttcttccttttttcctgccttttctggtttaattgagcattttatgcttctattttctctcccttcttagcatatcaattatacttcctttaaaacatttttagtggttccctgaagtttgtaatatatatttacagcgaatcatgcccattttaaattacactatatcacttcatgagtagagaatacaccatgcaactgaatgtcccaaattctgccctcctgttctttttaacattgtgaaatgactgacaatgttaaaaagaacaggagggcttccagtcattccatttatttatgtcccataaccactcaatatgttgttgattctattaatttgaataaatggcttcattttaggttaacttggagtaggaaaaatgaaaacattttattatatctgcatttatttcttctctggtgctctttctttctctatgtaaatctgagtttctggcccacatcatttttccctttgcatgaagaaattctttttttttttttttttttttttttttttgagatggagtctcactctgttgcccaggctggagtacagtggtgcaatctcggctctctgcacactccgcctcctgggttcacgccattctcctgcctcagcctcctgagtagctgggactacaggcgcccaccaccacgcctggctaattttttgtatttttagtagagacgggatttcaccatgttagccaggatggtcaagaaattcttttaacattttcacatggagtaggctttctggcaaagaatttcctcagtttttgtttgtttgagaaaatctttatttctactttacttggaaggttaatttcacaggatatggaagcctacataggctttttttttctttcatcactttaaatatttctttccactttctttgcttgcatggtttttaatgagaaatctgatgtaattttatccttgttctttcacaggtaggggttttttgttttttttccctaccccctggcttttttcaatattttctctgtctttcgtattctgcagtttgaatataaaattgtaattgccaaactagactcttcttgtccattgcccagaaaagccacacattgagaatagtaggagttgcaggagagagagaatttaataatcgcagggccagccaagcgggagatgtttctgaaatccatctccccaagaattcagagactaggctttttaaaggatagttaggcagacagggggctggggaacagggaagtgctgattgcttaggttgggaatgaaatcacagggggttgaagctgtgttcttgtgctgagtcatttcctgggtaggggtcacaggacctggttaccaatcctgtggtattagctgttccattagaatgcaaggtctgaaaaatacctcaaaccccagtcttaggttttacaatactgaagttatctataggagcaattgcggtggttatggatcatgtgacctccagctacatgactcctgaaccataattctaatcttgtatccaatttgttagttttacaaaagtggttttggtcccagagcaaggagggggtaagttttgggaagggattgttataatctttgttttaaagttaaactataaactaaattcttctcattgttagcttggcatacacccaggaatgagcaaggacagcttgtgaggttagaagcaagatggagtcagttaatttagattcctctcactgtcatgatttttgcaaaggtggtttcaatatgtctaagtctagatcatttgatatttatgcagcttggtgtttgatgagtttcctgaatctgtggtttgttgtctgtcattacttttggaaaattcttggctatcactacttgaatatttcttctgctctattttctctttcttctccttctcgtattccaattacatatttgtcacactttctgaaattattccagcattcttggatattgtgttctgttttgttttttcctttttttttcctctttgcatttctatttgagaagtttcttttgacatatcttcaattcactgattctttccttggccatgtccaggctactgatgaactcatcaaaggtattcttcatttctgttacattgtttttcatttctagcatttcatttttcattatgtctttgagttgtcatctttctgctcacttaaccatctgttcatgcgtattgtgtgcttttttctttagagcccttaacatattaactaaccatagttattttaaatttctgtctaaaaacttgaaaatccatcatatctgagtctggttttgatgattactttgtctcttcacactgtgttacttcttgccttttggcatgtcttataattttttttttaagtcagacatgataagtcaggtaataggaactgaggcaaataagccttcaatgtgaggttttatattaatctgggtaggaaatgggccatatctaatgtttgttctagctgtaggtggcagaggtgtcaaattcctctagcgttcttgtttttctttcccctgctttctctgggtttctctgagaactcctttttaaatagtctgtttcttgtagttcttccagctgtaatctgctcttattatacaggaaccctgttgatggaatggtaacgtgtcagagggggaagtggtctataatcttatgattacatctcgatcttttaatggaactgcaccttgggctattacttttaaaagaatttctccctccacccttttttttcaatttttttgagatggagtcttgctttgttgcccaggctatagtgcagtggcgtggtctcggctcactgcaacttctgcctcctaggttcaagtgattctcctgcctctgcctcctgagtagcagagattacaggtgcctgccaccatgcccagctaattttcttttgtgtttttagtagagacggggtttcaccatgttggccaggctggtctcaaactcctggctttgtgatccacccgtctcagtctcccaaaatgctgggattacaggtgtgagccaccgtgcccagcctcacctccaccctttttagaagtgacaagatggccagaaggggctagattttggtagtcacccttcccctagaatggttaaagcattttccctggagagcaggcccttgtcatggagaatgctttggctttttaaaaacttttcttttccctcttcttgccagaaggataaagagatttttcttggggtttgtggaggtaaaatccataaaaggttgggggcctgccctgagatgatgacccccaggagtttctcatgctcatgctcctccacactcagcctccagcaattcatcaaacataccaggctatgacttcagtgcctgctgcctcagatagttgatctcggctaattctctggatttgcctgtatctccagattttggggcagtttgccttgtgactttggttatttgagagatagaagaaaagttgttaattcatagtttgttcagcagggttgttgttgttgttgtgaggatgggagcgatgacttccaatgtctttgcgtgttgaagctgaaaccagaggtctagtgaacttttacatttttgaagtttagacttttttcttaagacaaactttctttttgttttaaattttggttttattatagtattatcttatagccagagcatgtaacctgttcaatttctcttcattattatttattgaaattacttcagggccaaatacctggtatgatcttgtgtgtttaacacagtgttattaaaaatcaattttgccagtttttaaaacttacattttgtgtatctttgttcttttatttttatctacttgagaagctaaggactggaagtaagatgttttttaacagccttgaaagatttccccattagtaatctttaatcttactttttaaatgtgagtattgagaattttaccttctttctcatttgtatttgcttaatgaaacttatccatcttttgactgttaacatttttaatgttattttatctctgttatgtctcttgtagttagattctattttgaccatttataatttaagatggtagcttaatctgttttaaatatcttgttgcttatggattttttatttttatattttatgcctctttattttctataagaaaaagagcatgtttttctttctcattattttgtaaagtttgtagcctcattttgactctatttgttacacttgggtttctaattaattctttaatgtatatttctctaactgagaccatcaaatttataactatatcatttgaatttgtatttgaaataagttacttaactcaattttttacttgtcctcactcaatttaaaaaactttaccaagatatcgcaccactgcactccagcctgggtgacagagcgagattccgtctcaaaacaaaacaaaaaaaacattaaaatagaatctaaagtttaagattgaaattactataattttattatatgcagtatatatcctctctttttagaacagtgcttctcaagtatttgggttcaggatatttttatatttttaaaaattatcgagaaccccaaagaactggcttttgtttattgggttatatctgttgctatttacgatattagaaattaaaactttgaacacttaaaatatgtatttattcatttagaaataatagtagtgaatttattacccgtgaatatgtgatgtgtttttatgaaaaataataaaacttttcaaaatagaaataaattagccagaggattagcattgctttacatttttatacgtcttttaaatataagtagaaggcagctagaccctcctatctgcttctgcattcaatccgttgtgacatcacaggccatttagcctctgaaaaatttcattgtatattcatgagagaatgagaaagataaagggaaaataatatgttattatgtgaagagttttacttggtgacacctgaaagggtcttgcacaatcctagggggtccctaaccccactttgagaattactgttctaagataatttatacatttgagacatcagtattgtaactggttttaatgatgcttccagttcctctacaataaggctttactgatactgatttcttgattctgttaatgtagtacatcatcaaataattcgtcctacacagtgtcagtaaaaatggagtagggtgatctataggaacaaacaattcccaaatctcaacgggtcaccagccctctgcacagaggaccctcatcctggactctgtctctggctgaggagcagccaccccatctgaaatgacagtcactgtggtagaggaacagagagcatgcctaaccaggtgctgcctctgagctcttctgccagagtgatacccattgctccaagggaggtacaatcttaccttggcccagaagaaaagaacattgaaaaatgtgtgaccaacacagaaggtgcatgagcaaaatattctttgagtccttgtctatctaagtattgattctgccctcatacgtgaatcattgaataaggtatacatttttccattttaatttttttggacccattctcaagaactgaatgggtatacactttttttagtagtttcctcttacctctaggtttataggtttgcatcattgctttagacatttagggtttcaaattcacttatttttccctttagggcttttccccatatgttctgggaaattctccctcctttatcttataaaaattttcattcactttttaaaaatttcacaatcattttgaatttccaaggtcgttttattttctggttgtttcttttctgcatggaatttttggtacaatatattctctttctgtgtgataatatttgttgtttagaaattcttttttgttccctgaaacatctgtatttccgctagggtaattttttgccttttgcttatcttggttttactccttaatgttgtaggtttccacaaatgctgtggtctgttgtagtctgttcatgcttaccagcaagatgctgaaaagtaaacttgaaactccatttaatgagatgggcttgcaaacttgtgggcttcactgagcaaataccaaatccctgaaggtaaaggccttttctctgagtcatttatatttttcttaagaggaaacctccagtcttctgcctgattgtgggtgttctgtgtcgtagagcaaactgtttttaattttgcctttggaacaatctctcgattttcatctctgcatctccttctcaaccaccactgcatctctgggaggctgcaggacacgctggatccttttctgacctcaggaagcatcctccaccttcaatagcaatgagtacccctcagaccactttttctctttcatacttaggttaaaatttctcatctaattcctttctcttcatcattgtaactttaattcctttactgtcattttaggagatattctagtgaaagaggagaaaaacagttgtcattaatcaacgattttaaaccagaaggctttttcttttttaaaagaattcaatggataaatggtgcatgtctggagaatgggaaattttagtgatcctctattctatcctgatgcatgtttaaggaatggaaagtcccaatgaccatttcctggtgggataaaaaaaatcctggaagtcttcataccgtttagaaatacagataaatttgttaaggcctattagcaaggggaacaatttagcaagtaggaatcagaactacaaacttttgtgattaaaaattagtttcccaggcacagccttaatgtctgaaatccagaggtctccaagtttagacagattaatgtgtcctagttttgcatatccacacaaatctccatgttggaccagagaaagagtgattttcttgtgactgtttttttttttttttttttttttttgagatggagtcttgcctctgtcactcaggctggagtgcagtggcacgatctcagctcactgcaagctccgcctcctgggttcacgccattctcctgtctcagcctctcgagtagctgggactacaggcacctgccaccatgcccggctaattttttgtatttttagtagagacaggtttcaccatgttagccaggatggtctcgatctcctgaccttgtgatccgcctgtctcggcctcccaaagtgctgggattacaggcgtgagccaccgcgcccggccttcttgtgtattcttaatcaaaccttaccagatgagagtctttgaaccaattttatgatgcagaatgccaccctccttttgcagttacagatggaggagatacatctcctttacatctcctgagatttcctctctttgttgttaactaagaagacttgcagttcagtgttaggttctgtaatatctcagccagatttttatttctttctctgtaagttaaagttctccagagaaacagaaccaataggatgtgtatatacagagaaagagatttgttataaggaattggctcttgcaattatgaaggctggcaagtccaaaatctgtagtgtgggcctgctgtttggagacccaggagagctgatggtgcagctccagtctgaatgcagtctactagaggattctttctttcttggggacactagtcttttggttctattcaggctttcaattggttgggcaagccccacccacattatggaaggcaatctgccctactccaaattcaccaatgtaaatgttaatcttatccaaaaacaccctcaaagttggcatataaaattaattaccacagtatcatgtcaattcctataaagattttgacatcttttaattgcatattttccctagagagttcaggtgaaggtctctttataatagtttgattggaacagggtgagcctttttacttctatgtacaggtctttcttaagttcactgttttcatcttttccaccttgatttttcccaaaataaataaattccattcattctggtctccctacaagaatgcttattttatacatgttggctctccattggccatccttcatgtctaaaatcttctaaccaccacaaacctcttggaaactcagtgtctacttccacgttgtatctttgtttcttaggatggtcgcagagatccagaacgtagagggtcagaacctgcaggagcaggtttgccctgagcccattttcaggttcttcagagaaaacaaggtggagattgcaagtgcaataacaaggccatttcctttccttatgggcctccgagaccgctccttcatctccgagcagatgtatgaagtaagtaagaatttccaaatgatgataaaccaggtccatactcaattatgccaaacttcaagatgcaatgagcaggctaaagggcctcctgtgagtggggaccttcaccattctgtaggttaggaggtgacaggagaagcaggcatcacagaaaacctcccttcttctgtagtaaatgttgggggagggccacagtgagggaggtggggcaggagagagaatgggaatgctgtatgggtgcagatcatcctaggtacttgtaaacaatctactaatggtagccataattaaaataaataagtgacctaggcagcattttattccaaagcctacttatttgaaacacttgaaactgagatttttttgaaactcacagtgaagttgtgtcattttaggttacatttggaagtggatgcttgctactgtctctccaaatcattgtttgatctttggacatttctagagccctagaatgcaagttaatgttagcagtggatgcccttagggatactgaggacaaggcttcttcttgtctttgtgaattttctgtgccctttggccaggagtcatagtgggggctggttgattggtttcctggagctcgtcaggccaggccaatcctagtagtggttattgtccatgcaacagaacagccttgttaaggccactcctgaaataacctggccaggctctaaagccatacacaacattcaactttgaacccacacttattatttaaaattactctctccccttaagtgtacaacaatgtcagagagtcaggttcaaaaaattagagtgtatttttatggtggaggacatttaagaagtcatccaaatatacgcaaaattctaacatttcacaagagaacagatgttctatctacaacctaaaagtcttttgtaacccataaatctctagctacataattctccatttaatatttttaagcattttcaagaagcttttagaaacctggtcccagtgacaagagtgatgtattgtgtactcagtgaactggagaagacatttggctggtcacatctggaagcattgttcagcaggattaacctgatggcctatcctgatttaaacgagatttacagaagcttccagaatggtaactatagctctcaacagctttgggggattcaagcccatttcattcattgattcattcattcactcttcattcatatttgacaaatatttgactgagtgactattacatgccaagcccagggggaatataatgatg

SEQ ID NO: 14223 - DNA, 640 bp, Homo sapiens
actgagcaccgaggggcagttggcagcttcacctcagagctgcaggaaggaacggggcagtgaaaatcgaatcgggtgtgatcctaggccaagctcatggcccagcagggccagcaggggcagatggcaagtggagacagcaatctcaacttcaggatggtcgcagagatccagaacgtagagggtcagaacctgcaggagcaggtttgccctgagcccattttcaggttcttcagagaaaacaaggtggagattgcaagtgcaataacaaggccatttcctttccttatgggcctccgagaccgctccttcatctccgagcagatgtatgaacattttcaagaagcttttagaaacctggtcccagtgacaagagtgatgtattgtgtactcagtgaactggagaagacatttggctggtcacatctggaagcattgttcagcaggattaacctgatggcctatcctgatttaaacgagatttacagaagcttccagaatggtaactatagctctcaacagctttgggggattcaagcccatttcattcattgattcattcattcactcttcattcatatttgacaaatatttgactgagtgactattacatgccaagcccagggggaatataatgatg

SEQ ID NO: 14224 - DNA, 8657 bp, Homo sapiens
attgcggtggttatggatcatgtgacctccagctacatgactcctgaaccataattctaatcttgtatccaatttgttagttttacaaaagtggttttggtcccagagcaaggagggggtaagttttgggaagggattgttataatctttgttttaaagttaaactataaactaaattcttctcattgttagcttggcatacacccaggaatgagcaaggacagcttgtgaggttagaagcaagatggagtcagttaatttagattcctctcactgtcatgatttttgcaaaggtggtttcaatatgtctaagtctagatcatttgatatttatgcagcttggtgtttgatgagtttcctgaatctgtggtttgttgtctgtcattacttttggaaaattcttggctatcactacttgaatatttcttctgctctattttctctttcttctccttctcgtattccaattacatatttgtcacactttctgaaattattccagcattcttggatattgtgttctgttttgttttttcctttttttttcctctttgcatttctatttgagaagtttcttttgacatatcttcaattcactgattctttccttggccatgtccaggctactgatgaactcatcaaaggtattcttcatttctgttacattgtttttcatttctagcatttcatttttcattatgtctttgagttgtcatctttctgctcacttaaccatctgttcatgcgtattgtgtgcttttttctttagagcccttaacatattaactaaccatagttattttaaatttctgtctaaaaacttgaaaatccatcatatctgagtctggttttgatgattactttgtctcttcacactgtgttacttcttgccttttggcatgtcttataattttttttttaagtcagacatgataagtcaggtaataggaactgaggcaaataagccttcaatgtgaggttttatattaatctgggtaggaaatgggccatatctaatgtttgttctagctgtaggtggcagaggtgtcaaattcctctagcgttcttgtttttctttcccctgctttctctgggtttctctgagaactcctttttaaatagtctgtttcttgtagttcttccagctgtaatctgctcttattatacaggaaccctgttgatggaatggtaacgtgtcagagggggaagtggtctataatcttatgattacatctcgatcttttaatggaactgcaccttgggctattacttttaaaagaatttctccctccacccttttttttcaatttttttgagatggagtcttgctttgttgcccaggctatagtgcagtggcgtggtctcggctcactgcaacttctgcctcctaggttcaagtgattctcctgcctctgcctcctgagtagcagagattacaggtgcctgccaccatgcccagctaattttcttttgtgtttttagtagagacggggtttcaccatgttggccaggctggtctcaaactcctggctttgtgatccacccgtctcagtctcccaaaatgctgggattacaggtgtgagccaccgtgcccagcctcacctccaccctttttagaagtgacaagatggccagaaggggctagattttggtagtcacccttcccctagaatggttaaagcattttccctggagagcaggcccttgtcatggagaatgctttggctttttaaaaacttttcttttccctcttcttgccagaaggataaagagatttttcttggggtttgtggaggtaaaatccataaaaggttgggggcctgccctgagatgatgacccccaggagtttctcatgctcatgctcctccacactcagcctccagcaattcatcaaacataccaggctatgacttcagtgcctgctgcctcagatagttgatctcggctaattctctggatttgcctgtatctccagattttggggcagtttgccttgtgactttggttatttgagagatagaagaaaagttgttaattcatagtttgttcagcagggttgttgttgttgttgtgaggatgggagcgatgacttccaatgtctttgcgtgttgaagctgaaaccagaggtctagtgaacttttacatttttgaagtttagacttttttcttaagacaaactttctttttgttttaaattttggttttattatagtattatcttatagccagagcatgtaacctgttcaatttctcttcattattatttattgaaattacttcagggccaaatacctggtatgatcttgtgtgtttaacacagtgttattaaaaatcaattttgccagtttttaaaacttacattttgtgtatctttgttcttttatttttatctacttgagaagctaaggactggaagtaagatgttttttaacagccttgaaagatttccccattagtaatctttaatcttactttttaaatgtgagtattgagaattttaccttctttctcatttgtatttgcttaatgaaacttatccatcttttgactgttaacatttttaatgttattttatctctgttatgtctcttgtagttagattctattttgaccatttataatttaagatggtagcttaatctgttttaaatatcttgttgcttatggattttttatttttatattttatgcctctttattttctataagaaaaagagcatgtttttctttctcattattttgtaaagtttgtagcctcattttgactctatttgttacacttgggtttctaattaattctttaatgtatatttctctaactgagaccatcaaatttataactatatcatttgaatttgtatttgaaataagttacttaactcaattttttacttgtcctcactcaatttaaaaaactttaccaagatatcgcaccactgcactccagcctgggtgacagagcgagattccgtctcaaaacaaaacaaaaaaaacattaaaatagaatctaaagtttaagattgaaattactataattttattatatgcagtatatatcctctctttttagaacagtgcttctcaagtatttgggttcaggatatttttatatttttaaaaattatcgagaaccccaaagaactggcttttgtttattgggttatatctgttgctatttacgatattagaaattaaaactttgaacacttaaaatatgtatttattcatttagaaataatagtagtgaatttattacccgtgaatatgtgatgtgtttttatgaaaaataataaaacttttcaaaatagaaataaattagccagaggattagcattgctttacatttttatacgtcttttaaatataagtagaaggcagctagaccctcctatctgcttctgcattcaatccgttgtgacatcacaggccatttagcctctgaaaaatttcattgtatattcatgagagaatgagaaagataaagggaaaataatatgttattatgtgaagagttttacttggtgacacctgaaagggtcttgcacaatcctagggggtccctaaccccactttgagaattactgttctaagataatttatacatttgagacatcagtattgtaactggttttaatgatgcttccagttcctctacaataaggctttactgatactgatttcttgattctgttaatgtagtacatcatcaaataattcgtcctacacagtgtcagtaaaaatggagtagggtgatctataggaacaaacaattcccaaatctcaacgggtcaccagccctctgcacagaggaccctcatcctggactctgtctctggctgaggagcagccaccccatctgaaatgacagtcactgtggtagaggaacagagagcatgcctaaccaggtgctgcctctgagctcttctgccagagtgatacccattgctccaagggaggtacaatcttaccttggcccagaagaaaagaacattgaaaaatgtgtgaccaacacagaaggtgcatgagcaaaatattctttgagtccttgtctatctaagtattgattctgccctcatacgtgaatcattgaataaggtatacatttttccattttaatttttttggacccattctcaagaactgaatgggtatacactttttttagtagtttcctcttacctctaggtttataggtttgcatcattgctttagacatttagggtttcaaattcacttatttttccctttagggcttttccccatatgttctgggaaattctccctcctttatcttataaaaattttcattcactttttaaaaatttcacaatcattttgaatttccaaggtcgttttattttctggttgtttcttttctgcatggaatttttggtacaatatattctctttctgtgtgataatatttgttgtttagaaattcttttttgttccctgaaacatctgtatttccgctagggtaattttttgccttttgcttatcttggttttactccttaatgttgtaggtttccacaaatgctgtggtctgttgtagtctgttcatgcttaccagcaagatgctgaaaagtaaacttgaaactccatttaatgagatgggcttgcaaacttgtgggcttcactgagcaaataccaaatccctgaaggtaaaggccttttctctgagtcatttatatttttcttaagaggaaacctccagtcttctgcctgattgtgggtgttctgtgtcgtagagcaaactgtttttaattttgcctttggaacaatctctcgattttcatctctgcatctccttctcaaccaccactgcatctctgggaggctgcaggacacgctggatccttttctgacctcaggaagcatcctccaccttcaatagcaatgagtacccctcagaccactttttctctttcatacttaggttaaaatttctcatctaattcctttctcttcatcattgtaactttaattcctttactgtcattttaggagatattctagtgaaagaggagaaaaacagttgtcattaatcaacgattttaaaccagaaggctttttcttttttaaaagaattcaatggataaatggtgcatgtctggagaatgggaaattttagtgatcctctattctatcctgatgcatgtttaaggaatggaaagtcccaatgaccatttcctggtgggataaaaaaaatcctggaagtcttcataccgtttagaaatacagataaatttgttaaggcctattagcaaggggaacaatttagcaagtaggaatcagaactacaaacttttgtgattaaaaattagtttcccaggcacagccttaatgtctgaaatccagaggtctccaagtttagacagattaatgtgtcctagttttgcatatccacacaaatctccatgttggaccagagaaagagtgattttcttgtgactgtttttttttttttttttttttttttgagatggagtcttgcctctgtcactcaggctggagtgcagtggcacgatctcagctcactgcaagctccgcctcctgggttcacgccattctcctgtctcagcctctcgagtagctgggactacaggcacctgccaccatgcccggctaattttttgtatttttagtagagacaggtttcaccatgttagccaggatggtctcgatctcctgaccttgtgatccgcctgtctcggcctcccaaagtgctgggattacaggcgtgagccaccgcgcccggccttcttgtgtattcttaatcaaaccttaccagatgagagtctttgaaccaattttatgatgcagaatgccaccctccttttgcagttacagatggaggagatacatctcctttacatctcctgagatttcctctctttgttgttaactaagaagacttgcagttcagtgttaggttctgtaatatctcagccagatttttatttctttctctgtaagttaaagttctccagagaaacagaaccaataggatgtgtatatacagagaaagagatttgttataaggaattggctcttgcaattatgaaggctggcaagtccaaaatctgtagtgtgggcctgctgtttggagacccaggagagctgatggtgcagctccagtctgaatgcagtctactagaggattctttctttcttggggacactagtcttttggttctattcaggctttcaattggttgggcaagccccacccacattatggaaggcaatctgccctactccaaattcaccaatgtaaatgttaatcttatccaaaaacaccctcaaagttggcatataaaattaattaccacagtatcatgtcaattcctataaagattttgacatcttttaattgcatattttccctagagagttcaggtgaaggtctctttataatagtttgattggaacagggtgagcctttttacttctatgtacaggtctttcttaagttcactgttttcatcttttccaccttgatttttcccaaaataaataaattccattcattctggtctccctacaagaatgcttattttatacatgttggctctccattggccatccttcatgtctaaaatcttctaaccaccacaaacctcttggaaactcagtgtctacttccacgttgtatctttgtttcttaggatggtcgcagagatccagaacgtagagggtcagaacctgcaggagcaggtttgccctgagcccattttcaggttcttcagagaaaacaaggtggagattgcaagtgcaataacaaggccatttcctttccttatgggcctccgagaccgctccttcatctccgagcagatgtatgaagtaagtaagaatttccaaatgatgataaaccaggtccatactcaattatgccaaacttcaagatgcaatgagcaggctaaagggcctcctgtgagtggggaccttcaccattctgtaggttaggaggtgacaggagaagcaggcatcacagaaaacctcccttcttctgtagtaaatgttgggggagggccacagtgagggaggtggggcaggagagagaatgggaatgctgtatgggtgcagatcatcctaggtacttgtaaacaatctactaatggtagccataattaaaataaataagtgacctaggcagcattttattccaaagcctacttatttgaaacacttgaaactgagatttttttgaaactcacagtgaagttgtgtcattttaggttacatttggaagtggatgcttgctactgtctctccaaatcattgtttgatctttggacatttctagagccctagaatgcaagttaatgttagcagtggatgcccttagggatactgaggacaaggcttcttcttgtctttgtgaattttctgtgccctttggccaggagtcatagtgggggctggttgattggtttcctggagctcgtcaggccaggccaatcctagtagtggttattgtccatgcaacagaacagccttgttaaggccactcctgaaataacctggccaggctctaaagccatacacaacattcaactttgaacccacacttattatttaaaattactctctccccttaagtgtacaacaatgtcagagagtcaggttcaaaaaattagagtgtatttttatggtggaggacatttaagaagtcatccaaatatacgcaaaattctaacatttcacaagagaacagatgttctatctacaacctaaaagtcttttgtaacccataaatctctagctacataattctccatttaatatttttaagcattttcaagaagcttttagaaacctggtcccagtgacaagagtgatgtattgtgtactcagtgaactggagaagacatttggctggtcacatctggaagcattgttcagcaggattaacctgatggcctatcctgatttaaacgagatttacagaagcttccagaatggtaactatagctctcaacagctttgggggattcaagcccatttcattcattgattcattcattcactcttcattcatatttgacaaatatttgactgagtgactattacatgccaagcccagggggaatataatgatgaaaaaacacacatgtcccatgtccttatggagtttacatacagtgggagtgacagacgttaaccaagtaatcctgcaaatggttgctcagccaggacttgattttgatgctgtaaaacatagggttgaagtctctatttttttgaaggaatacatgagtgatgtcttttcatgggaaaggaggaagccttctctgatatttgcagatatgttcaaagataaaacaattttctttgtattagaaaatttatcatccagtgcagtcctgtgtcaacttgtttctccaaacaaagactggagaagtcacgaagagagcctagcacatactggtacactgaggaggagctgcatgtgaaagctatgaagacagaaaagggggttggtgggggcctttccgaaccatgtggttgaattgcagactgtgggaggcagggtgtgagagctgactctggagaaagaagttgaagtggattctggaaggcttgacaccctgtgctaaggaatctggagtttaatttttggaaaataaagaaggaataaagggcattt

SEQ ID NO: 14225 - DNA, 910 bp, Homo sapiens
attgcggtggttatggatcatgtgacctccagctacatgactcctgaaccataattctaatcttgtatccaatttgttagttttacaaaagtggttttggtcccagagcaaggagggggtttccacaaatgctgtggtctgttgtagtctgttcatgcttaccagcaagatgctgaaaagtaaacttgaaactccatttaatgagatgggcttgcaaacttgtgggcttcactgagcaaataccaaatccctgaaggatggtcgcagagatccagaacgtagagggtcagaacctgcaggagcaggtttgccctgagcccattttcaggttcttcagagaaaacaaggtggagattgcaagtgcaataacaaggccatttcctttccttatgggcctccgagaccgctccttcatctccgagcagatgtatgaacattttcaagaagcttttagaaacctggtcccagtgacaagagtgatgtattgtgtactcagtgaactggagaagacatttggctggtcacatctggaagcattgttcagcaggattaacctgatggcctatcctgatttaaacgagatttacagaagcttccagaatgaaaatttatcatccagtgcagtcctgtgtcaacttgtttctccaaacaaagactggagaagtcacgaagagagcctagcacatactggtacactgaggaggagctgcatgtgaaagctatgaagacagaaaagggggttggtgggggcctttccgaaccatgtggttgaattgcagactgtgggaggcagggtgtgagagctgactctggagaaagaagttgaagtggattctggaaggcttgacaccctgtgctaaggaatctggagtttaatttttggaaaataaagaaggaataaagggcattt

SEQ ID NO: 14226 - DNA, 6277 bp, Homo sapiens
atagacagacgaacgggagtgggcggagcgggcgccggatgtgacgtttccggaacctccgggtgtcatccgcggggaaagaacttggtcctgatgtctgaccatggagatgtgagcctcccgcccgaagaccgggtgagggctctctcccagctgggtagtgcggtagaggtgaatgaagacattccaccccgtcggtacttccgctctggagttgagattatccgaatggcatccatttactctgaggaaggcaacattgaacatgccttcatcctctataacaagtatatcacgctctttattgagaaactaccaaaacatcgagattacaaatctgctgtcattcctgaaaagaaagacacagtaaagaaattaaaggagattgcatttcccaaagcagaagagctgaaggcagagctgttaaaacgatataccaaagaatatacagaatataatgaagaaaagaagaaggaagcagaggaattggcccggaacatggccatccagcaagagctggaaaaggaaaaacagagggtagcacaacagaagcagcagcaattggaacaggaacagttccatgccttcgaggagatgatccggaaccaggagctagaaaaagagcgactgaaaattgtacaggagtttgggaaggtagaccctggcctaggtggcccgctagtgcctgacttggagaagccctccttagatgtgttccccaccttaacagtctcatccatacagccttcagactgtcacacaactgtaaggccagctaagccacctgtggtggacaggtccttgaaacctggagcactgagcaactcagaaagtattcccacaatcgatggattgcgccatgtggtggtgcctgggcggctgtgcccacagtttctccagttagccagtgccaacactgcccggggagtggagacatgtggaattctctgtggaaaactgatgaggaatgaatttaccattacccatgttctcatccccaagcaaagtgctgggtctgattactgcaacacagagaacgaagaagaacttttcctcatacaggatcagcagggcctcatcacactgggctggattcatactcaccccacacagaccgcgtttctctccagtgtcgacctacacactcactgctcttaccagatgatgttgccagagtcagtagccattgtttgctcccccaagttccaggaaactggattctttaaactaactgaccatggactagaggagatttcttcctgtcgccagaaaggatttcatccacacagcaaggatccacctctgttctgtagctgcagccacgtgactgttgtggacagagcagtgaccatcacagaccttcgatgagcgtttgagtccaacaccttccaagaacaacaaaaccatatcagtgtactgtagccccttaatttaagctttctagaaagctttggaagtttttgtagatagtagaaaggggggcatcacctgagaaagagctgattttgtatttcaggtttgaaaagaaataactgaacatattttttaggcaagtcagaaagagaacatggtcacccaaaagcaactgtaactcagaaattaagttactcagaaattaagtagctcagaaattaagaaagaatggtataatgaacccccatatacccttccttctggattcaccaattgttaacatttttttcctctcagctatccttctaatttctctctaatttcaatttgtttatatttacctctgggctcaataagggcatctgtgcagaaatttggaagccatttagaaaatcttttggattttcctgtggtttatggcaatatgaatggagcttattactggggtgagggacagcttactccatttgaccagattgtttggctaacacatcccgaagaatgattttgtcaggaattattgttatttaataaatatttcaggatatttttcctctacaataaagtaacaattaacttatgtttttgtgcttcagagtgatccatttgatcaagcattgtataaacaggttaaaaaaaaggtatggttgttttggaaaggtgaaggaaaaatggaatttgagatatactgacactgatggtgtgtcccagttcacttttaattactccttgttttttatctgcctgttgccatcttccagaggtgttgtgaagtcatctctgttcttttggtgctgtctcaaatgggtcaaccattcacttcctccttatgccctccatgcttttggctgaggataatgaagcctttgtttggagtaccaggttacactccaataaatgattacatttcccagccaccccaccctaccaatttcattgtgttggctgttcttttctgactaaggcaatacctaggaaaacgcttgaagcagcaattgttactgcaattttctgtgagctgagcctggtgttctaggtggcctagaaataatggtgtcatttgtgacacctcgagtgagggcaggagagtaaatactttggctaggagaagagtgatttattctttatcagaattctaggtgggggagggagaatctgtgaatgcataaagttttcttcatttttaaattttgtctcagtctttattgcttaggttagtggtccttgaacttgtcccctgaaagagcccagttctctatattctttttcttctcttgggttcttaattccccatatagtggaaattccttctttgctgttttggtatgggtgggtctgggggccagctgggcttggacaagccatttcctgctgcagcccagagcagcctggctgttccaccttgctctaaacagtcctgaaattgcccagtcctctgcttttgggaaatccatccccttcttcccattctttgtctaccacttagcttagggctttcttaccttttatttcgactgtagccgttggcttttaccaagtctctttgtttttagcatttcttcattccagtctgttctgcacactttgatcaggagaagcttctcacattccagccatgttcatgttttctctcttgctcaaaaacctgcaatagcttcccattgctgaaaatctaaatttagcttttagtcagaactttccacttaaagttcttacccctggctatatattcaaatatctagggagcaatttaaaaaatactgatgcctgtgttctaccccccaccaattaaagctgaatctctagggtggagcctcagatgttgtttctgcatttgtctttcaagctgctagaattctcaagtacaaccagggttgacaaccactgcattggtctttgatacctaagaattgtgagctctcttatccgtctctgcccaccaaagacattcagccaggtcaacaacatatcatacgttgcaaccacattgatcacagactgatcaccaaactgctatattttcttttctcttcctctaggcacaagatatcttagtggctagatgggtgcaggaaatcagtctgtagatccctcttcatatctgctgcagcctagccactgcagaggcactctgcataggatggtctaagtgtctctgtcttcatcttacctctgtggaggagacgtggaatcaagccagcccacaagccctgagactggataggccggagagaaagaggagtagccagagcggtcgggaaaagaggaaaggaatactgtgggtaaaagggacaaagaccacgcaacctgaggaaagacattgtattgaaagggtaatgactatttggctaaagggactgactcctgggttcccgaggctcaaagaccaggagacttttccactcttgcaagctgcacaagtaccatacttagtgttctgggctgagaggggagacaaaagcatcgtcaggttgccaaacaatgtcccagttgccctgggaggcacaaacctaccaaagtgccataggccaggtgcagagagaatcagaggagctgatttgcttggggtcagagcagagctgggttttttcagatgatcactttcacatactccttgttaaatgggaccaaaggggaagaagaagaaacccttaagcttttgtaatattgtcttgggtaccagataccataaaaggcagcatgagagaaacattcccttgggccagtgtcatggtggattttcttgcttgagaggcaaggatttcagctttcatttggtaccacagaatttaaaattgtaagtgcctatcccttttgactgttgatggcttctttggggttttagttaccccagttgaaagagaaatttttcatattggggttgagaagaatggaggctattaggagcaaagctttaatgagtgaaagtctggtgaatcctgcaattttgatatgtttccagtggattttgagaacacagttttaggaccagagtagatgttgttccctagaaaatagagtcagctattgatattgtgcctcccatccctcatatctcagtgttttaaccccacctgagtttggagaccagtttgtccaaggatctttcaaacatgtgagcccagagtagaacttctgagtcaaggatcatgtctttttctgaggagctttgcttggggcactggaaatcctgtttagatcaggactattggaatattatcctctccaggggaagtgccaggttgaacatttaaggctttgcttctaggcccagctatacattcaccagcaaatcacttaacttcctaaatttctttaaaatctgtaaaatgggatcagtctaatatgcctacctcaaatgatgacagaatgacatctatatgcatatgaggcctacgttagttgaaagatgctataaagatataagggatttgttacttgtctttcttgaaatgttacagttggggtgcggttgcttctatcttctggacctctgcccattcagcatacagctagaggaatctttgggcagatccacattctttagcactagctaggctttgactccaaagctatctggtctaccttgatgttctgagcaggaaaactgaggacctcaagaaccattccaaatttctactcattctccctaagacccagagcagacccaggacctaaagaaattacatcatctctattttcccttggctccagcccactcttgtttgaacctcccacttttgttgttccaactacttcttgagatgaaggaagggcagaacattggccctcttcactgaagtcttcaccccttaatccagggttcaatttttagttcaccttagcctgtttgagattagaagctgggccttaacttacaggtgtgtccggcatcattcaatcagcctgttagatccagaatccagcactgtgacgctacataaccatgggctctgtccttccagttcctttagtgccttccctcactggtaggttcactctgagggcttccttccttgaactccagtggcaactatagtctgtttcccacaatttgttgtgtgtgttttttgttgttttgcagcgttttcatattgtcttttatgtaagtcatgtttctgaactatcgtataaatttcattagggtaagaatcatgtttgctttatgcactgtgtaacatgccttgcagtcagtataggcacttaaccttattgatcagttgttccttggtgttgaataatgtgttaggtagccaggtggacctgtgtcctagcctggagaagctctatgtcaccttgtaggaagccatctgaatttgactcagcatcatatgctgggcctgtgctgcacttgagctttctttccagccgccaggagggatggttgtcctggccaacagcgaatttaatgggtggtcaaaagaagatgtgcctgcatagaaggctgaaagagggagctggaagtaggaggagacaaggagatagtgacaccagtatcttgtcacagaaatcaaggaaggcaacagtttaaaggaggggagggagatcagtggtgccaactggctcagaagaggtttgctgggttaaatctcaagatgagcccatgagatctggtggttagcagaggcctttcctgacaaccccattttaagcacctcttccccatcactctatctcatcactgttactgtctgtgtagccctgtcatgagctaaaatcatcctgtttgtttattgctagcttatgtgtctaaagtatactccttgagaacagcaactttgtctttttcacctttgtactgagtcccctgacatggaataagatatgaataaatgcacagacttgtccaaaatcatccaattaa

SEQ ID NO: 14227 - DNA, 6746 bp, Homo sapiens
gtttccggaacctccgggtgtcatccgcggggaaaggtggggaagggtcccgggaacgtggtggggcagggcctccgagcgtggttggactttgaaggggatcggccgccgtgagtgtggggcctgcagcctactctccccgagtcccctgcccggcctgcctcgctcgaggcacccgacggcttctgtctccgcgggctggcgcctgaccagccaggcccagcggttccccgcctactgcatttgaaagatcccgaaaaccctggatgattgtgcctggggttggcaagttcgtcttgagtgccttcaagaagggttcctcaagcagttgtcgatagagccctccctactgtatacgccccctccgctcattcctgctacttcctttctcctcctcgtatttccccctcggtcctttacgccgcctttccccctcatttgcagatgctgcatcccctttttggaattgctcaaccaggtggtaaccggcgccgcttcctggccttgggaggtggttcctttcttaacccacaagaacctctcccaagagaacttggtcctgatgtctgaccatggagatgtgagcctcccgcccgaagaccgggtgagggctctctcccagctgggtagtgcggtagaggtgaatgaagacattccaccccgtcggtacttccgctctggagttgagattatccgaatggcatccatttactctgaggaaggcaacattgaacatgccttcatcctctataacaagtatatcacgctctttattgagaaactaccaaaacatcgagattacaaatctgctgtcattcctgaaaagaaagacacagtaaagaaattaaaggagattgcatttcccaaagcagaagagctgaaggcagagctgttaaaacgatataccaaagaatatacagaatataatgaagaaaagaagaaggaagcagaggaattggcccggaacatggccatccagcaagagctggaaaaggaaaaacagagggtagcacaacagaagcagcagcaattggaacaggaacagttccatgccttcgaggagatgatccggaaccaggagctagaaaaagagcgactgaaaattgtacaggagtttgggaaggtagaccctggcctaggtggcccgctagtgcctgacttggagaagccctccttagatgtgttccccaccttaacagtctcatccatacagccttcagactgtcacacaactgtaaggccagctaagccacctgtggtggacaggtccttgaaacctggagcactgagcaactcagaaagtattcccacaatcgatggattgcgccatgtggtggtgcctgggcggctgtgcccacagtttctccagttagccagtgccaacactgcccggggagtggagacatgtggaattctctgtggaaaactgatgaggaatgaatttaccattacccatgttctcatccccaagcaaagtgctgggtctgattactgcaacacagagaacgaagaagaacttttcctcatacaggatcagcagggcctcatcacactgggctggattcatactcaccccacacagaccgcgtttctctccagtgtcgacctacacactcactgctcttaccagatgatgttgccagagtcagtagccattgtttgctcccccaagttccaggaaactggattctttaaactaactgaccatggactagaggagatttcttcctgtcgccagaaaggatttcatccacacagcaaggatccacctctgttctgtagctgcagccacgtgactgttgtggacagagcagtgaccatcacagaccttcgatgagcgtttgagtccaacaccttccaagaacaacaaaaccatatcagtgtactgtagccccttaatttaagctttctagaaagctttggaagtttttgtagatagtagaaaggggggcatcacctgagaaagagctgattttgtatttcaggtttgaaaagaaataactgaacatattttttaggcaagtcagaaagagaacatggtcacccaaaagcaactgtaactcagaaattaagttactcagaaattaagtagctcagaaattaagaaagaatggtataatgaacccccatatacccttccttctggattcaccaattgttaacatttttttcctctcagctatccttctaatttctctctaatttcaatttgtttatatttacctctgggctcaataagggcatctgtgcagaaatttggaagccatttagaaaatcttttggattttcctgtggtttatggcaatatgaatggagcttattactggggtgagggacagcttactccatttgaccagattgtttggctaacacatcccgaagaatgattttgtcaggaattattgttatttaataaatatttcaggatatttttcctctacaataaagtaacaattaacttatgtttttgtgcttcagagtgatccatttgatcaagcattgtataaacaggttaaaaaaaaggtatggttgttttggaaaggtgaaggaaaaatggaatttgagatatactgacactgatggtgtgtcccagttcacttttaattactccttgttttttatctgcctgttgccatcttccagaggtgttgtgaagtcatctctgttcttttggtgctgtctcaaatgggtcaaccattcacttcctccttatgccctccatgcttttggctgaggataatgaagcctttgtttggagtaccaggttacactccaataaatgattacatttcccagccaccccaccctaccaatttcattgtgttggctgttcttttctgactaaggcaatacctaggaaaacgcttgaagcagcaattgttactgcaattttctgtgagctgagcctggtgttctaggtggcctagaaataatggtgtcatttgtgacacctcgagtgagggcaggagagtaaatactttggctaggagaagagtgatttattctttatcagaattctaggtgggggagggagaatctgtgaatgcataaagttttcttcatttttaaattttgtctcagtctttattgcttaggttagtggtccttgaacttgtcccctgaaagagcccagttctctatattctttttcttctcttgggttcttaattccccatatagtggaaattccttctttgctgttttggtatgggtgggtctgggggccagctgggcttggacaagccatttcctgctgcagcccagagcagcctggctgttccaccttgctctaaacagtcctgaaattgcccagtcctctgcttttgggaaatccatccccttcttcccattctttgtctaccacttagcttagggctttcttaccttttatttcgactgtagccgttggcttttaccaagtctctttgtttttagcatttcttcattccagtctgttctgcacactttgatcaggagaagcttctcacattccagccatgttcatgttttctctcttgctcaaaaacctgcaatagcttcccattgctgaaaatctaaatttagcttttagtcagaactttccacttaaagttcttacccctggctatatattcaaatatctagggagcaatttaaaaaatactgatgcctgtgttctaccccccaccaattaaagctgaatctctagggtggagcctcagatgttgtttctgcatttgtctttcaagctgctagaattctcaagtacaaccagggttgacaaccactgcattggtctttgatacctaagaattgtgagctctcttatccgtctctgcccaccaaagacattcagccaggtcaacaacatatcatacgttgcaaccacattgatcacagactgatcaccaaactgctatattttcttttctcttcctctaggcacaagatatcttagtggctagatgggtgcaggaaatcagtctgtagatccctcttcatatctgctgcagcctagccactgcagaggcactctgcataggatggtctaagtgtctctgtcttcatcttacctctgtggaggagacgtggaatcaagccagcccacaagccctgagactggataggccggagagaaagaggagtagccagagcggtcgggaaaagaggaaaggaatactgtgggtaaaagggacaaagaccacgcaacctgaggaaagacattgtattgaaagggtaatgactatttggctaaagggactgactcctgggttcccgaggctcaaagaccaggagacttttccactcttgcaagctgcacaagtaccatacttagtgttctgggctgagaggggagacaaaagcatcgtcaggttgccaaacaatgtcccagttgccctgggaggcacaaacctaccaaagtgccataggccaggtgcagagagaatcagaggagctgatttgcttggggtcagagcagagctgggttttttcagatgatcactttcacatactccttgttaaatgggaccaaaggggaagaagaagaaacccttaagcttttgtaatattgtcttgggtaccagataccataaaaggcagcatgagagaaacattcccttgggccagtgtcatggtggattttcttgcttgagaggcaaggatttcagctttcatttggtaccacagaatttaaaattgtaagtgcctatcccttttgactgttgatggcttctttggggttttagttaccccagttgaaagagaaatttttcatattggggttgagaagaatggaggctattaggagcaaagctttaatgagtgaaagtctggtgaatcctgcaattttgatatgtttccagtggattttgagaacacagttttaggaccagagtagatgttgttccctagaaaatagagtcagctattgatattgtgcctcccatccctcatatctcagtgttttaaccccacctgagtttggagaccagtttgtccaaggatctttcaaacatgtgagcccagagtagaacttctgagtcaaggatcatgtctttttctgaggagctttgcttggggcactggaaatcctgtttagatcaggactattggaatattatcctctccaggggaagtgccaggttgaacatttaaggctttgcttctaggcccagctatacattcaccagcaaatcacttaacttcctaaatttctttaaaatctgtaaaatgggatcagtctaatatgcctacctcaaatgatgacagaatgacatctatatgcatatgaggcctacgttagttgaaagatgctataaagatataagggatttgttacttgtctttcttgaaatgttacagttggggtgcggttgcttctatcttctggacctctgcccattcagcatacagctagaggaatctttgggcagatccacattctttagcactagctaggctttgactccaaagctatctggtctaccttgatgttctgagcaggaaaactgaggacctcaagaaccattccaaatttctactcattctccctaagacccagagcagacccaggacctaaagaaattacatcatctctattttcccttggctccagcccactcttgtttgaacctcccacttttgttgttccaactacttcttgagatgaaggaagggcagaacattggccctcttcactgaagtcttcaccccttaatccagggttcaatttttagttcaccttagcctgtttgagattagaagctgggccttaacttacaggtgtgtccggcatcattcaatcagcctgttagatccagaatccagcactgtgacgctacataaccatgggctctgtccttccagttcctttagtgccttccctcactggtaggttcactctgagggcttccttccttgaactccagtggcaactatagtctgtttcccacaatttgttgtgtgtgttttttgttgttttgcagcgttttcatattgtcttttatgtaagtcatgtttctgaactatcgtataaatttcattagggtaagaatcatgtttgctttatgcactgtgtaacatgccttgcagtcagtataggcacttaaccttattgatcagttgttccttggtgttgaataatgtgttaggtagccaggtggacctgtgtcctagcctggagaagctctatgtcaccttgtaggaagccatctgaatttgactcagcatcatatgctgggcctgtgctgcacttgagctttctttccagccgccaggagggatggttgtcctggccaacagcgaatttaatgggtggtcaaaagaagatgtgcctgcatagaaggctgaaagagggagctggaagtaggaggagacaaggagatagtgacaccagtatcttgtcacagaaatcaaggaaggcaacagtttaaaggaggggagggagatcagtggtgccaactggctcagaagaggtttgctgggttaaatctcaagatgagcccatgagatctggtggttagcagaggcctttcctgacaaccccattttaagcacctcttccccatcactctatctcatcactgttactgtctgtgtagccctgtcatgagctaaaatcatcctgtttgtttattgctagcttatgtgtctaaagtatactccttgagaacagcaactttgtctttttcacctttgtactgagtcccctgacatggaataagatatgaataaatgcacagacttgtccaaaatcatccaattaa

SEQ ID NO: 14228 - DNA, 6386 bp, Homo sapiens
gcggggaaaggtggggaagggtcccgggaacgtggtggggcagggcctccgagcgtggttggactttgaaggggatcggccgccatgctgcatcccctttttggaattgctcaaccaggtggtaaccggcgccgcttcctggccttgggaggtggttcctttcttaacccacaagaacctctcccaagagaacttggtcctgatgtctgaccatggagatgtgagcctcccgcccgaagaccgggtgagggctctctcccagctgggtagtgcggtagaggtgaatgaagacattccaccccgtcggtacttccgctctggagttgagattatccgaatggcatccatttactctgaggaaggcaacattgaacatgccttcatcctctataacaagtatatcacgctctttattgagaaactaccaaaacatcgagattacaaatctgctgtcattcctgaaaagaaagacacagtaaagaaattaaaggagattgcatttcccaaagcagaagagctgaaggcagagctgttaaaacgatataccaaagaatatacagaatataatgaagaaaagaagaaggaagcagaggaattggcccggaacatggccatccagcaagagctggaaaaggaaaaacagagggtagcacaacagaagcagcagcaattggaacaggaacagttccatgccttcgaggagatgatccggaaccaggagctagaaaaagagcgactgaaaattgtacaggagtttgggaaggtagaccctggcctaggtggcccgctagtgcctgacttggagaagccctccttagatgtgttccccaccttaacagtctcatccatacagccttcagactgtcacacaactgtaaggccagctaagccacctgtggtggacaggtccttgaaacctggagcactgagcaactcagaaagtattcccacaatcgatggattgcgccatgtggtggtgcctgggcggctgtgcccacagtttctccagttagccagtgccaacactgcccggggagtggagacatgtggaattctctgtggaaaactgatgaggaatgaatttaccattacccatgttctcatccccaagcaaagtgctgggtctgattactgcaacacagagaacgaagaagaacttttcctcatacaggatcagcagggcctcatcacactgggctggattcatactcaccccacacagaccgcgtttctctccagtgtcgacctacacactcactgctcttaccagatgatgttgccagagtcagtagccattgtttgctcccccaagttccaggaaactggattctttaaactaactgaccatggactagaggagatttcttcctgtcgccagaaaggatttcatccacacagcaaggatccacctctgttctgtagctgcagccacgtgactgttgtggacagagcagtgaccatcacagaccttcgatgagcgtttgagtccaacaccttccaagaacaacaaaaccatatcagtgtactgtagccccttaatttaagctttctagaaagctttggaagtttttgtagatagtagaaaggggggcatcacctgagaaagagctgattttgtatttcaggtttgaaaagaaataactgaacatattttttaggcaagtcagaaagagaacatggtcacccaaaagcaactgtaactcagaaattaagttactcagaaattaagtagctcagaaattaagaaagaatggtataatgaacccccatatacccttccttctggattcaccaattgttaacatttttttcctctcagctatccttctaatttctctctaatttcaatttgtttatatttacctctgggctcaataagggcatctgtgcagaaatttggaagccatttagaaaatcttttggattttcctgtggtttatggcaatatgaatggagcttattactggggtgagggacagcttactccatttgaccagattgtttggctaacacatcccgaagaatgattttgtcaggaattattgttatttaataaatatttcaggatatttttcctctacaataaagtaacaattaacttatgtttttgtgcttcagagtgatccatttgatcaagcattgtataaacaggttaaaaaaaaggtatggttgttttggaaaggtgaaggaaaaatggaatttgagatatactgacactgatggtgtgtcccagttcacttttaattactccttgttttttatctgcctgttgccatcttccagaggtgttgtgaagtcatctctgttcttttggtgctgtctcaaatgggtcaaccattcacttcctccttatgccctccatgcttttggctgaggataatgaagcctttgtttggagtaccaggttacactccaataaatgattacatttcccagccaccccaccctaccaatttcattgtgttggctgttcttttctgactaaggcaatacctaggaaaacgcttgaagcagcaattgttactgcaattttctgtgagctgagcctggtgttctaggtggcctagaaataatggtgtcatttgtgacacctcgagtgagggcaggagagtaaatactttggctaggagaagagtgatttattctttatcagaattctaggtgggggagggagaatctgtgaatgcataaagttttcttcatttttaaattttgtctcagtctttattgcttaggttagtggtccttgaacttgtcccctgaaagagcccagttctctatattctttttcttctcttgggttcttaattccccatatagtggaaattccttctttgctgttttggtatgggtgggtctgggggccagctgggcttggacaagccatttcctgctgcagcccagagcagcctggctgttccaccttgctctaaacagtcctgaaattgcccagtcctctgcttttgggaaatccatccccttcttcccattctttgtctaccacttagcttagggctttcttaccttttatttcgactgtagccgttggcttttaccaagtctctttgtttttagcatttcttcattccagtctgttctgcacactttgatcaggagaagcttctcacattccagccatgttcatgttttctctcttgctcaaaaacctgcaatagcttcccattgctgaaaatctaaatttagcttttagtcagaactttccacttaaagttcttacccctggctatatattcaaatatctagggagcaatttaaaaaatactgatgcctgtgttctaccccccaccaattaaagctgaatctctagggtggagcctcagatgttgtttctgcatttgtctttcaagctgctagaattctcaagtacaaccagggttgacaaccactgcattggtctttgatacctaagaattgtgagctctcttatccgtctctgcccaccaaagacattcagccaggtcaacaacatatcatacgttgcaaccacattgatcacagactgatcaccaaactgctatattttcttttctcttcctctaggcacaagatatcttagtggctagatgggtgcaggaaatcagtctgtagatccctcttcatatctgctgcagcctagccactgcagaggcactctgcataggatggtctaagtgtctctgtcttcatcttacctctgtggaggagacgtggaatcaagccagcccacaagccctgagactggataggccggagagaaagaggagtagccagagcggtcgggaaaagaggaaaggaatactgtgggtaaaagggacaaagaccacgcaacctgaggaaagacattgtattgaaagggtaatgactatttggctaaagggactgactcctgggttcccgaggctcaaagaccaggagacttttccactcttgcaagctgcacaagtaccatacttagtgttctgggctgagaggggagacaaaagcatcgtcaggttgccaaacaatgtcccagttgccctgggaggcacaaacctaccaaagtgccataggccaggtgcagagagaatcagaggagctgatttgcttggggtcagagcagagctgggttttttcagatgatcactttcacatactccttgttaaatgggaccaaaggggaagaagaagaaacccttaagcttttgtaatattgtcttgggtaccagataccataaaaggcagcatgagagaaacattcccttgggccagtgtcatggtggattttcttgcttgagaggcaaggatttcagctttcatttggtaccacagaatttaaaattgtaagtgcctatcccttttgactgttgatggcttctttggggttttagttaccccagttgaaagagaaatttttcatattggggttgagaagaatggaggctattaggagcaaagctttaatgagtgaaagtctggtgaatcctgcaattttgatatgtttccagtggattttgagaacacagttttaggaccagagtagatgttgttccctagaaaatagagtcagctattgatattgtgcctcccatccctcatatctcagtgttttaaccccacctgagtttggagaccagtttgtccaaggatctttcaaacatgtgagcccagagtagaacttctgagtcaaggatcatgtctttttctgaggagctttgcttggggcactggaaatcctgtttagatcaggactattggaatattatcctctccaggggaagtgccaggttgaacatttaaggctttgcttctaggcccagctatacattcaccagcaaatcacttaacttcctaaatttctttaaaatctgtaaaatgggatcagtctaatatgcctacctcaaatgatgacagaatgacatctatatgcatatgaggcctacgttagttgaaagatgctataaagatataagggatttgttacttgtctttcttgaaatgttacagttggggtgcggttgcttctatcttctggacctctgcccattcagcatacagctagaggaatctttgggcagatccacattctttagcactagctaggctttgactccaaagctatctggtctaccttgatgttctgagcaggaaaactgaggacctcaagaaccattccaaatttctactcattctccctaagacccagagcagacccaggacctaaagaaattacatcatctctattttcccttggctccagcccactcttgtttgaacctcccacttttgttgttccaactacttcttgagatgaaggaagggcagaacattggccctcttcactgaagtcttcaccccttaatccagggttcaatttttagttcaccttagcctgtttgagattagaagctgggccttaacttacaggtgtgtccggcatcattcaatcagcctgttagatccagaatccagcactgtgacgctacataaccatgggctctgtccttccagttcctttagtgccttccctcactggtaggttcactctgagggcttccttccttgaactccagtggcaactatagtctgtttcccacaatttgttgtgtgtgttttttgttgttttgcagcgttttcatattgtcttttatgtaagtcatgtttctgaactatcgtataaatttcattagggtaagaatcatgtttgctttatgcactgtgtaacatgccttgcagtcagtataggcacttaaccttattgatcagttgttccttggtgttgaataatgtgttaggtagccaggtggacctgtgtcctagcctggagaagctctatgtcaccttgtaggaagccatctgaatttgactcagcatcatatgctgggcctgtgctgcacttgagctttctttccagccgccaggagggatggttgtcctggccaacagcgaatttaatgggtggtcaaaagaagatgtgcctgcatagaaggctgaaagagggagctggaagtaggaggagacaaggagatagtgacaccagtatcttgtcacagaaatcaaggaaggcaacagtttaaaggaggggagggagatcagtggtgccaactggctcagaagaggtttgctgggttaaatctcaagatgagcccatgagatctggtggttagcagaggcctttcctgacaaccccattttaagcacctcttccccatcactctatctcatcactgttactgtctgtgtagccctgtcatgagctaaaatcatcctgtttgtttattgctagcttatgtgtctaaagtatactccttgagaacagcaactttgtctttttcacctttgtactgagtcccctgacatggaataagatatgaataaatgcacagacttgtccaaaatcatccaattaa

SEQ ID NO: 14229 - DNA, 1649 bp, Homo sapiens
tttccggaacctccgggtgtcatccgcggggaaagaacttggtcctgatgtctgaccatggagatgtgagcctcccgcccgaagaccgggtgagggctctctcccagctgggtagtgcggtagaggtgaatgaagacattccaccccgtcggtacttccgctctggagttgagattatccgaatggcatccatttactctgaggaaggcaacattgaacatgccttcatcctctataacaagtatatcacgctctttattgagaaactaccaaaacatcgagattacaaatctgctgtcattcctgaaaagaaagacacagtaaagaaattaaaggagattgcatttcccaaagcagaagagctgaaggcagagctgttaaaacgatataccaaagaatatacagaatataatgaagaaaagaagaaggaagcagaggaattggcccggaacatggccatccagcaagagctggaaaaggaaaaacagagggtagcacaacagaagcagcagcaattggaacaggaacagttccatgccttcgaggagatgatccggaaccaggagctagaaaaagagcgactgaaaattgtacaggagtttgggaaggtagaccctggcctaggtggcccgctagtgcctgacttggagaagccctccttagatgtgttccccaccttaacagtctcatccatacagccttcagactgtcacacaactgtaaggccagctaagccacctgtggtggacaggtccttgaaacctggagcactgagcaactcagaaagtattcccacaatcgatggattgcgccatgtggtggtgcctgggcggctgtgcccacagtttctccagttagccagtgccaacactgcccggggagtggagacatgtggaattctctgtggaaaactgatgaggaatgaatttaccattacccatgttctcatccccaagcaaagtgctgggtctgattactgcaacacagagaacgaagaagaacttttcctcatacaggatcagcagggcctcatcacactgggctggattcatactcaccccacacagaccgcgtttctctccagtgtcgacctacacactcactgctcttaccagatgatgttgccagagtcagtagccattgtttgctcccccaagttccaggaaactggattctttaaactaactgaccatggactagaggagatttcttcctgtcgccagaaaggatttcatccacacagcaaggatccacctctgttctgtagctgcagccacgtgactgttgtggacagagcagtgaccatcacagaccttcgatgagcgtttgagtccaacaccttccaagaacaacaaaaccatatcagtctcaccaagatggaggaacagagcccatggcccacttactacatggattcccactttacagtggagaaggagcttgcagtaaccacaaaagtttctgtataagcaaatttagggaattgaacttcagacagtgtggttgtctccttacttatgaacttgggaatacttacttaggtaacaactaacatcagaggtttttgatctgtagcctttctttctgtccataattagctaatagcttctgctgtacaaacacaaaccattccctgtccaagaaaatta

SEQ ID NO: 14230 - DNA, 18512 bp, Homo sapiens
gggaaaggtggggaagggtcccgggaacgtggtggggcagggcctccgagcgtggttggactttgaaggggatcggccgccgtgagtgtggggcctgcagcctactctccccgagtcccctgcccggcctgcctcgctcgaggcacccgacggcttctgtctccgcgggctggcgcctgaccagccaggcccagcggttccccgcctactgcatttgaaagatcccgaaaaccctggatgattgtgcctggggttggcaagttcgtcttgagtgccttcaagaagggttcctcaagcagttgtcgatagagccctccctactgtatacgccccctccgctcattcctgctacttcctttctcctcctcgtatttccccctcggtcctttacgccgcctttccccctcatttgcagatgctgcatcccctttttggaattgctcaaccaggtggtaaccggcgccgcttcctggccttgggaggtggttcctttcttaacccacaagaacctctcccaagaggtactgagatgcaacaagcatcctctgtttcagttaactttcatgggccgtggactaggtttactaattacttggggaggttttagatatgcttgcggctttctgagtccctaaggaggcctcgtgagagatggactatctctgcatccctagtagtcctcacggcttttgtgctattagtgagggtgttttagaggggaaggtttgtggaggaattgtgacccgaatattgaagagacctaaagatggaattggctgagagaagactacccctgagggaagagttgtagtagaaaagaaaaactggatagataaatgaaactgaaatgtgaggatgcctgggcggattggaatcctgactgaagcaaaagatctctgttggggagggccagttgccacagggccttgaattccaagatttattctactgtagtttgtgtattctagagcatactgattagggtttgctgtaatgcaatgtgtgtcaaatgcccagttttattttggagatgatagtggtgatatctggttggaatttggaatctgattctaacagcaactatatctagaaagactagaattactggagttttgggacaccaggggtttttgcaatgcaagttaccatcgtgcctttttgttattcagtgtttagtctatgaagatgagtaaatggttgttttcaagatttaagtctcttgccatgataatgatgaatgaatgattttatagattgactatagtggtttagtgagcagagttacaattatgagcattaattcccagaccagttcccctaactcaccttgtgctcaaatatgaaaaaggataccacagaaaatgtcagttactctcagattaagtaaaaatggtcaaccttgaagttagttaacaatcctcaagaaagttcactgagtgcactctgccaggtactggggtggaggtatgtgggtatctggaaggagaaataatagaaaataaaagatgctgttcccacttttacagtgctgtgggcggagccccctaatggcaaaggatttgattaacttgaactgaacctttggttggtccactgtggttctactccttataccacctaattatggtacaggggttgtatgttttctagtctgccagtactctcatcgttgtgatttgggcttccttgagggtctcagccttcttgtaggaaagtccttatttaataggagccacagcatttggtatgtttctcttatattttcttcttaaggtagaggtctgtgagataaactgtaaaactgctgggatgatgagggcaacggtattgatgccatctgttttttctgtctcagaacttggtcctgatgtctgaccatggagatgtgagcctcccgcccgaagaccgggtgagggctctctcccagctgggtagtgcggtagaggtgaatgaagacattccaccccgtcggtacttccgctctggagttgagattatccgaatggcatccatttactctgaggaaggcaacattgaacatgccttcatcctctataacaagtatatcacgtaagacacctacagtttcctttttcctttctggtgactggtgcctcgcctatttggctcagaattgctaaaaccacagaacttcacaatatcatcaacattaatcatttttgctggcaactcctacatattggctgtccttgccgttcaaagacatgagtgctgaaggtgttattttcatgactcagtaatttatgagtaagagatttagttctttggcctatgcccacatagcccagctgttagacaaaagagttggtggttaaactagacatattatgttctgatgaatgcttttactgttctctttctactaaagcagccaatcataggattattgttggggtctagcagagccaaaattcctcacttgtacttattttgtagcaaatttagtgatacaggaaaaaattttttcctcttaacctttatcataatcatgcaaatcatcaaataattagtaactgcctacagtttgtgtggctcatcataataagacctttcccttaagttatttatcatcttagggtaggcagcataagtagaagatttcagtactattaacagcaaacaacttctaaaactccattgacaatgatacataatttagaaaggaaataatgttaaaggtcttatttatcatttctaatcttgttctttcacaatatcaggactttttaaaaaataattataatgtatttggttctgagtagctcatagtgtgtttcacctgcataatttcatttgatcttcacagttctgtgtgcatggaatagggtacactaccctacattctacatatgaggaaacaaactcagtgtttggtggatgctcatgtttgaagtgacaaaaccttggttttctgactcctaattcaggatttgttctacaacataggtcctgttcttcttgttttccatttagtaatgttctagagtcagaggtagtcttttgagatcatagtcatgagccacactggctatttttttgttatttattttactactgatttttgagtaggtaacatatatatatatatatatatatatacacatatatatggtgcacaattcagaggcacaaaagaataactatagttaaaaagtaagtcttggccaggcgcagtggctctcgcctgtaatcccagcactttgggaggccagggcaggcggatcacctgaggtcaagagttcaagaccagcttggccaacatggcaaaaccccatctctactaaaaatacaaaaattagtcgggcatggtggcgtgtgcctgtaatcccagctacttgggaggctaaggcaggagaatcgcttgaaaccaggaggcagaggttgtagtgagccgagatcgtgccactgcactccaggactccagactaggtggcaaagcgagactgtttcaaaaaaaaaaaaaaaagtctccccacccactcctcttttccccccaaaccctcagtgcttctccccagagacaaccactcttagtagtttcttagatatcttccaagagatgatatacacataccagttttatcacattaagtttttgatcacatactcctctaaagcagggcttttcaactttggccctattgaccttttggactgaatcattatttgtggtgggagctgtcctgtgtgtcacagaatgtttagcagcatccctggtttctgctcaccagatgccagtatcccccctccccgcagtgtgacaaccaaaaatgtcaccagacattatctgatgttctcccaggggcagaatcacctctgagaaccagtgctccaaaggaaagtatgcggaagaatggactgtctaggattcatattgtaattgtagagtggagaaatgggactgctattgtcttttttatttagaagtgttgcctgtgttaagaggagaaaaccttagacaagttaaatttaacagagtttaatccagtagaaaaaggttcagggaacactcaggaccaaaagtggtgcagaatgttccaccccatagtggaggttgtgcaggctatatttatagtcagagaaaaggaaatgagatacagaaatagcctgattggctacagttatgtgtttgccttatttggtcatgttttggcaggctttagcctccaattggctggaggtttcagctgctatgattggctgagactcagctatttgttacacttgtaacctaactcttatgttaagttacagtttgtttatacattaaattaggttacagttcactatctttggaggcagctttaacttaacacctgtttccttaaagatctgtagttctttaatgccattatgtcatgtcatgtggcctcaatgttgttaaggtttcataaaattataattatatttctgcttctgtttgctgttatgagtttttcattcctaggcacactatttattttcctgcacagtttttttgaccctgtcttctttatatattcttggtagaaagaatattcttatgtatttcctataagcttgtagattgttctctcagaatgaaacccaggggcacaattcctttggagaaacactaattcagaaagttcagtagaatcatggaatcactgcaccaggtatttcctgaagggccttcagaatcctattgccccacaatagaaagggctttcagggcaaagaccatattcattcaacacatgtatattgagtatacctgctgtctacatggcactgcactaggtcctgaacagcagtgagtaaaatggcccctgtccttattggtgttcctttataggtatgggagaagacaataaacagataagcaaataaatacagctgacccctgaacaacacagaggttagcaccaatcccccatgcaatcaaaaatatacatatggtcaggcacagtggctcacacctgtaatcccagcactttgggaggccgaagtggatggatcacttgaggtcaggagttcaagacaagcctcgtcaacatggtgaaaccccgtctctactaaaaatacaaaaattagcctggtgtggtggcgggtgcctgtaaccccagccacttgggagactgaggcaggagaattgcttgaactcaggaagtggaggttgcagtgagccgagatcacgccactgcactccagcctggggacagagcaagatcatgtcttaaaaaaaaaaaaaaaaaaaaaaaaaaaatatatatatatatatatatatatatatatatatatatatatatatatataaagtttttgactccccagaaacttaactactaatagcttactcttgactggaagccttattgataacatggtcagttatcacatactttatatattgtatgtattatgtactatattcttacagaaaagtaagcttgagaatagagaatgttattaagaaaatcataaagaatagaaaatatagatactatttgttaagtggaagtggatcattatgaaggtcttcatcctcgtcatcttcatgttgagtaggctgaggaagaggaggggttggtcttgctgtctcaggggcggcagtggcagaagtaaatccgtgtataaatggacccacaccattgaaacccatgttgtccaaaagtcagctgtagtcgaaataaggaaaatacttaagagtactgtgatagagaataagcaggggtttatgactagagtagtcagggtaaggtctgtctgagaagacaagatttgagctgagacttgagggatgcaatacagttggtcattccaagagcatagggcagagcattaaaacacaggtaactatgtgtttagaagtgcttagatgggaaagaccttagcatgttctggggattgaaagatcattgtgtttggagtatagccagagaaaagcaagatgactccaggtaaggctggagaggcaagtggggctggatcatgcaggactttatgggccatggtaaggagtctgttttttatcttgagggtaacagcaagccattgaaaagttttaagtgggattcagacctaaatttacttactgttttttaaaagagatgaggtctcggccgggcacagtggctcacgcctgtgatctcagcactttgggaggccaccctggagttcaaggccagcctggccaacatggtgataccccatctctactaaaaatacaaaacttagccgggcgtggtggcccacgtctacaatcccagctacccgagaggctgaggcaggagacttgcatgaacccgggaggcagaggtttcagtgagccaagatcgcggcactgcactccagcctgggtgatagagcgagactcggtctcaaaaaaaaaaaaaaaaaagagatgtcactaatgttgcccaggctggtctcgaactcctggatgcaagcgatcctcccatctcagcctcccaaagtgctaggattacaggtgtgagcctccatgcccaatcaatatttaaagtataaattttggcagttgtgtggtaaatggtggagcaagcgttaagagaaggcagggagagtagttaggaaattcttgcaggctggtggcttgaagtagtgtggcaacatggaaagagacagatggatttggtattttggaggtcaggtccataggacttactaatcacttaggaaaaaagatactgcggaggttgatgtcgtgtttctgccttgaacaacttaaacgatagggtagtccatgtattgagatgggaaaagccctctaaagagggctgggtagcgggggaatttaaccgttcacgtttggggtttttttgacatgttaaaatttgagatgcctgtgagatatccaagtagagatgtcaagtgggaggttgaatgtaccagtctgaactcagaagactgaggtctgggctggaaatacagacaagggagtcctcagcatacagatggttctgaagtcatgagaatggctgagattttctttttctttttttttttctgctgtagaaattaattttattcttattcagactattttcaaaagaagcagtggtgcgctgtttttctaaaaatacgcctttagagatttttatatatgtatataataaaatccatacatgtatttacatgattgctacatacaaaattacagcactgtggtatgtacacatctacaggtacattctttccacacatccctgctgtgctttccccgtgtgaaggagggagactgaatcagttgtgagcagccaagggctggcccgtcgtcggaacctccgaatgggggctggggtggaggaggtgaggcgattgccgaggcaggagcagcagctgttgcagggctctcctgcaggccagcaggcagcatctggaggctcccggcagcctccccctcccctccaccccgtggtgcccgcgctgccctcaaggtggggtggctgaccacagacccctctggtgccattctgtggcctagacttgcttggctgggccaagaagttgtgtatgtgaggggtggaggagggagctgtgggaggaatagaccctgtccagccccagccctgagcaggggaaagggctggatggctaaagcctgcagatgactggtgagaacactccgcttggcccggcactgctaagggtcagagactagaggctgggagggagagcagtggccgccggctggggaacagggccttcttcctccctggggctcagagggtggcctcagctgagcttgagtaagcccagctcttaggccctgcggccagaggcttggcctcctgccagcagaggtgcatgcacactggggaggggctgccatctccacttcaacccctgggccaggggctggggaagaaatggaggcttaggcctggcctgctgccctgtaggactaggtccccggggctcaggattcctgaggcatgcagagaagggcctgagaatgcctgagattttctagtgaaggggctcttaatctggggtccaggaacctcacagagattcattgatagaattcaggggatctgtgaaccggaataggaaaaacttttcttgttttttctaaccagtgactgaaatttagcatttccttccattttgaatgtaggcctcaaagtacagtagtagtaatatttgtaattttgtcaccagtagaaatcaagatattttcatattgcattacagttgttgctgacatctcaaaatagcatctaaacatcactacttcagaattacagtacagaattattagacctacagctagatcccattatcaaatgcattgataaagaacacattaggccgggcacagtggctcacgcctgtaatcccagcactttgggaggccaaggctggcggatcacgaggtcaggagatcgagaccatcctggctaacatggtgaaaccccatctctactaaaaatacaaaaaataagcctggcatggtggcaggtgcctgtagtcccagctactcagaaggctgaggcaggagaatggcgtgaacccgggaggcggagcttgcagtgagccgagatcgcgccactgcactccagcctgggcaacagagcgagactccatctcaaaaaaaaaaaaaaaaaaaaaaaaaaaagaacacattaatacagaagaatatatcacaatttttaaaatttttgaaaactgtttttccataaaattggggtattcttggtaatcctttgtactttaagttataccttaaaaaaattgttctgaaaagggtccataggcttcaccagatgccagaaggatccatggaacataaaagatcaagtatctttgttaataaggctagggaatgagaagagaaggagcctaggactgagccctgaggttagttaatggagggagagtcaataggggagactttctttgaagggaggttcaagaggcaggaggaaatccaagagagaatggtgttgtgtcatgggagccaaaataaattagtgtttgaaaaaggagagtagccacctatgtcagatgggtgaagacagaagattggcctttgggtttggtaagatgatgtcatgggtgatcttcataagcaatttcgctagaaggattacagagaccctaattagaacgggtagaaaggtgaatggacagtaagaaagtggaggcaaagggtatagacctgaaagtggcaaatttttttctataggggaccagagagtaaaaatttttggttttgtaggctacttgctgtgtctgtgactacctctgctttatagtgtgaaagtagccatagacaacacataaatgaatggatgtgactggttccaatgacactttatttacaagaacagatggctagctggatttggcacaccagctgtagtttgccaaccccggtatagacaactctttggagaagtttagatgggaagggaagtagaaaaatggggaagtagttgatgggggacaaggagcgtgtgaacatgtgtatgtattttaagttaggagattttagagcatgtttttgctgatggaaaaggatcttatggaggaggagaggctaacagtccagaagagagcttagctgtactaataaactcctcagaagtcaagaggggataggattaagagtacatggatgcctaaggaattgttttttatgacacttagtgttattttgagtgacatattagtgttaacagcaagactgatatggggagtttgtccctgtcacttataggaccacttaaaatgatgaactactaggagagttggtgcggatgagatttagcagctcatttacttgatttgtgggatttagagtttaatttggaattttgttgtattggccttacctgaagtaattaatgtagctaccttcacttttcttggagatacctttaaaatcttgattctgattctgattctgtgaacagaaaatcacagcaattgcaaacaaattctagctcactgattctcagtctgttttctgttgtattttacttagtacattcctatcaataacagtggctcagctttggcagttactacaaccgaggagaaaagagaggggagtatacatctgcctcaccactcctctgcctcccctactactgagaatcattgttctagaccttttgtggatactttctttacttcagggttttaaaaggcatgtttgttccttttcctggagcagttcaggcatcttaatgatctcaggcatatttcccccctcagtagcttccctaatgtaggaatgctttgccttttgcagaccccagtatagaagaaagagttcagcatattaaatcagtacatattttcatgatgagcgcagacaataaaccaggcagtggattctttcacagctttttatggtcatcaactaggctgcccagaagggagtgagagtattcaggcaattcctgtgtgctatgtgagcctcctggaacaccaaccctttttctgaaaatgaactgtcacctgtgttgaaaatgtttgctgggattggggtttatagactgaagaaggttccatctgtgatcatgcttaccatgctgagtaacttttaagactggaagaatcgagatgaggatccttaatgcatccatgttaaagaacctttgcttgactttttgaattagttgttttcatacaaaattaacacttattcacgatttaaaaaatttttcaaacactacaagggagatattaaagtgaaaagagaagtctcatctatcagaggtggccactattgtatttctggcatggatgaggtgtgattaagctcataggtgcccccatgtgtccttttccttaaagcatcaatgggatcttaccacgtattctgttctgcgacttgctttcttcacagtagtgtctttccatatcaggacatactgagccatctcattctgcctcagagctattccatctgcctggaacatgaatctggaacagtcccagattcatggctcactcttgtctagtccttactcaaatgcctccttcttaatgatgacttccttagctgctgtatctaaaatttcaaccattcccctatccctttctatcccccttccctattaatgactttcctagcatacttctgtttattgtctgttcccccattgtaatgtatactctatggtggggaggaatatttgactgtgttgttcactgccatatccccaacctttagaataattctggaccctgtagtagatgctcagtaaatattcactgaatgaatgggtgaatgattacattgtcttcacatttgaatgcacattattttttaaacaatcccctattgatggacatttaggggtttgttttttttttttttttcagttttttctactttttaaaacaatgctgtattgaatatttttatacatatatctttgtactgttttataatgatctctaggataaattcctagagatagaattgtgagtttaaaggatatacacattttaagttggatgcggtggctcacgcctgtaatcccagcatttcgggaggctgacgcgggcagatcacctgaggtcaggagttggagaccagcctggtcaacatggcgaaaccccatctctactaaaaatacgcaaattagctgggcgtggtagcaggtgcctctaatcgcagctactcgggaggctgaggcaggagaatcacttgaacctgggaggtagaggttgcagtgagccgagactgccccactgcactccaaccagggcggcagagcaagactctgtctcaaaaaaaaaaaaataaataaatcaaaaaaaaaataaatagtacaaattaaaaataaaggatatacacgttttaaattttgaataattagcttccattttccctcccttaagatgaaaggttatattaatttacaatcttgctaacactgtatgggtatcccatttctctataccaggtatgatcaacctttaagtcccatttctctaccaggtataattaacctttacgcctttgccaatccgatggatgaaaatggtatctcatcctaatttgaatttctttaattatgagtggattcagcattattgcatatattcatcttttgtatttacttttctgcttatgtcttcttttttcattgtttattgggtcattttgcttgtgtttttgcaatcatatctttgtttgctttggtacctttcctctctccaggcttcaaccagatataaccccagagaacagtatacatctgggccaccgctttctatccttagaaagtttctagggatagaactttgaaccatgtaatggagtctagtttataagtaaagaaaaaactcccaaacctgtatatgatgctggtgttagcatcttcatctcttattcttgctcacattttttgtttattagttaaaaaaaatcatagaaacccatagcaaatattgactatgttctagataccgtgtttagcattttattatctctttaagtgtcacagcaagcctgtcagggagtactagtttgtctccatctctacaattttatggacaggatatcagccatgtccaaccctttgaatgcaaggacttttttgcttatctatggtagcagatatcacctttttaaaagttcattagctagttagtgttagtgtattttatgtatggcccaagacagttcttcttccagtgtggcccagggaagctaaaaggttggacacccctgcaaaaaactgagggatggtgagattaagtgacttgcccaaggtcacatagctagtaaatggcaaaaccaggatttgagcccaggcacagtggctccagagccagccctactaaccactaagttcttttacctccagtatgagtaatggggtatgttgcccattgtctgtttcaggagacctttttgcccatctatccccattcagaaaactggctacagttgttgaagcaagggaaagctattcatgtacaggtctgggaggttttttttgtttgttttttgtttttgtttttttacttataaactagatttccattacatggctcaaagtcaaagtaatataaagaggtacttggtgaaaagtttcacacctactcttatctgttctattacccctgccctcatttctgtgtatacttcctgtttctttgtatacttacaaagcaaagtaaataaatacggcaggctaaatacggcaggttgtcaaataatgtcgttttgtccaatgtcgttttgttttaatgttgatgagaaaagaaaaatccattcctgcctggggccactgtctgtgtggagtctgcacattctccccatgtctgtgtgggttttctccgggtattcaagtttcttcccacaccccaaaggtctgcacattaggtgaactggcatgtctgaattgtccccagtctgagtgagtgcaagtgtatgtgtgatgccaatgggatggcatcctctccagggctggttcccaccttggccttgagctgctgggatggactctggccacctgggactgaataggcaggtaaatcatttacttacttgtttttataagtctttcttaaatgtatgtatagctcatatttatttcagtgtttaatattagaagtgttttggtctgtatttagaagtctggtgtttttgtgaccaggatagatcaaaggaacttaactcttgtttatgtcaattagtgcatggtaaagttggttttgttatatgtcattgtgcttaaagtcacaatttccaagaacctatcaacattaaggacttactgtgtatatgtacatacttgtacatatatgtaatgtttactcatcaaatatttattgagtgcctctttatacaaggcactgtgctggcttccaaggagtatacaaagaagcatgaaacacagaaatctctggcctcaggaagctcgcagtgtagttctataataagagcataagtaaaaataaaacatagtgtttatatgacatagtactttcttagctgattcaggcctcaatacaaagcacattcagcctgctaaaggtagtaaatattaatatgtatcttggcttttggggctaagatgagagttctactgaatcatctatcagtctctaaaatataagaaatatgtcttatttatcttaatagattcttcaggactttatggtttgaacaaatgaatctgtatttcttttaaatatagacttcaaggaaactgttttatatctttctttttttttttttttttccaaatagagataggatctccctctgtcacccaggctggagtgcagtggtgtgatcaaagctcactgtaacctcagacttctgggatcgagagatcctcctgcctcagcctcccaagcagctgggactacagatgcataccaccacacccagctaatttttgtgtttttttatgttttgttatatatgtttgtgtatgtatatatatatatgtatatatatatataaattaaaaaatataaatagagacaaggtctcaccctgttacccaggctggtcttgaactcctgggctcaagcagtcttcctgcctcggtctcccaaagtgctgggattacaggcatgagccaccgcacccagcctcttttatatcttcttcatgaacccaaaaggaagctttttaaagaaccatttttattttagagtccatccctgccttgaggagccttatcaagttggatcaaaatgaaacttgtgtgcctaatatagaactgaaggatgaggacttatctttagaaagtttgttttggtggggatcatcttttttctttattgaggattcttcttccaattacttctgccccatgggcagtaagtagaaaagagtttatcccaattacaatataatattttagagctatcagcaagctaccttcaatttatttttttatctcagtttctgtgtattacaacttaattctgttaaaagacatctttgttcagaatccctccagtagttctagacattccagaatccgtatggaagaagtatggtgtagtggttaaaagaataggctctggagccagcctgctcatactgaaattctgaatctgccactttctttctgtgacaggttactggacttttatttattttcactgcccctaagtagatgtcttaaatgttagagatttgtgaattaattaagtttattctccccactgagctttagagccatggacaagaaccaaaagatgaaatctagcatcttatatttacctaagcacttttcatcaaagacagtgcatgctaacatgtaatatgcacatactacatgcatagaacacatgcactaagtatttccatgcatttttgtatgatgcaaagtagtattcttctttgaaggaacacgaatcccaaaggaaaaaagccaaagttaaaggttacataagagctagaaggagtaaggaaacatggttttctcttgcttcctgcccatggctgccaaacggttctctgaagactgctatgtgacagaagccctttcctttgaaaacctgtcacgtcacaacaagaaaaagatctctttctttggaggtacatttttgggcacaagaaaggctttttaaaatttttttggccatctttttcattgtaggagtctggtgcttgctgcctagtttgggagtagaggaaaagactctggctctttagggggatagagatgggaaaggagcatggcccagctgggtgtattagctctccctccgctgcacttctggaacctttcatataagggcttcaggataagggggttgcatagctttagggtcttatggacatttggaccatttgcttcataatcattttgaactgtttccttaggctctttattgagaaactaccaaaacatcgagattacaaatctgctgtcattcctgaaaagaaagacacagtaaaggtgggtcttcactttcattgttgcccatctaaaagcttcagagcagcacagactgacttcaagataaaagtagtagtctctgcatctgagtaccagatcctgcaataggagataaggccatttcaccacaacagttctgaagtagcaggtatggtacagtagggggtattttaaatcattttgggaaatgttgcagtcaccaacttgacttaagtcttcttttggattctgtaattttctggcattgttctaattctattttctgttttgtgtctcagaaattaaaggagattgcatttcccaaagcagaagagctgaaggcagagctgttaaaacgatataccaaagaatatacagaatataatgaagaaaaggtcagtatataacagctaagaagaaaattattttgcttttttaggctgtgccctgggattgtaatatgacatttcaatatatcctgtgcttttaatgtgctgtttcaccttttttgggcaaagaccagaaactcaaaaaagtagaacaccagtggttaggctcagggttgtaacacagatatagcctatttgtcgaagagagtgacttgagggacagaaaatctgtcgcctacctgctatgtctagagtgagaatcataagaacaatgaacattctctccaaaacataggtttttagatcagagaatttgagggttggattcacatttggttatacctgaagctatttataagaattgacttttcaagctattttttttttttttttttgagacagtctcactctgtcgcctaggctggagtgcagtggcacgatctcagctcactgcaacctctgcctccccgactcaagtgattctcctacctcagcctcccgagtgactgggactacaggcatccgccaccatacccggctaatttttgtatttttagtagagatggggtttcaccatgttggccaagatggtctcaaactcctgacctcaagtgatccgcctgcctcggccttccaaagtgctgggattacaggcgtgagccgctgcacccagccatttcaagctattttcaaatgattctttttaggaagtcagttaaaacatgtggagaaactgccagggcgctgtcagtggccagctgtgaatacatactgcagccactcacaggctgttgtgtagctgtctgctggtctctattctggactctgatgttgaaaatcagcagagggatgaacagctatgaggtatatacttctaaagcaccaagtgagtgtaagctttaaggaggaggttattacttagcatttctttctttctttttttttttaatccaaatgcctctcaagtatttcttattagcttaaaatgtcactctgtgttgaacaaatgcacaaaaaccataaaaatttcagaggcctcattttgggttaaaattcagtagaaggcaagacgtggtggctcatgcctgtaatcctagcactttgggagcctgaagtgggtgatcgcttgagcccaggagttcgagaccagcctgggcaacatggtgaaaccccatctctacaaaaaatacaaaaattagctgggtctctacaaaaaatacaaaaattagtgtggtggcacgcacctctggtttcagctactcgggaggctgagatgggaggatcacctgcgcccagggagattgaggctgcagtgagccatgattgaccactacagtccagcctaggtgacagagtgagactctctaagaaaaaaaaaaaaaattcagtagagacccccaagatagcaggtataagtttggatctggttctattttatagccttacttgaaatatagaatatgtacatgacacagagagaagaataaaactgtctgtgatacaggttaggagaacacagatagtaagttgcatcaagatttcaggccagacattgtggctcacacctggaatcccagcgcttcgggaggccgaggtgggcagattgtttgagcccaggagttcaagactagcctgggcaacatggcgaaaccctgtctctacaaaaaatacaaaaattagccaggtgtggtggtgcacacctgtggtcccacctactcaggaggctaaggtgggaggattgcttgagcctgggaggtcaaggctgcagtgagctgtgatcatgccattgcacttcagcctgggaaacagaatgagaccctgtctcaaaaaaaaaaaaaaaaagatttcagtgaagaggaaagtgcattaggtagagtcattgtcgggagggtattgagaggattgggattttaattgtccttggagataggtatactgtggccagatagaaaggggtggtgactacactccgtgggtataaagatactgaggaaagcatgaattctgtgttaggtaatcaggccacagcagaagtacattttggaaatctccatgctaaaaagccttgttctcctgaagtgtgaagtcactgaggtgtgaagtgttagcctaaattttctctctttgtagaagaaggaagcagaggaattggcccggaacatggccatccagcaagagctggaaaaggaaaaacagagggtagcacaacagaagcagcagcaattggaacaggaacagttccatg

SEQ ID NO: 14231 - DNA, 583 bp, Homo sapiens
gggaaaggtggggaagggtcccgggaacgtggtggggcagggcctccgagcgtggttggactttgaaggggatcggccgccaacttggtcctgatgtctgaccatggagatgtgagcctcccgcccgaagaccgggtgagggctctctcccagctgggtagtgcggtagaggtgaatgaagacattccaccccgtcggtacttccgctctggagttgagattatccgaatggcatccatttactctgaggaaggcaacattgaacatgccttcatcctctataacaagtatatcacgctctttattgagaaactaccaaaacatcgagattacaaatctgctgtcattcctgaaaagaaagacacagtaaagaaattaaaggagattgcatttcccaaagcagaagagctgaaggcagagctgttaaaacgatataccaaagaatatacagaatataatgaagaaaagaagaaggaagcagaggaattggcccggaacatggccatccagcaagagctggaaaaggaaaaacagagggtagcacaacagaagcagcagcaattggaacaggaacagttccatg

SEQ ID NO: 14232 - DNA, 21476 bp, Homo sapiens
gcggggaaaggtggggaagggtcccgggaacgtggtggggcagggcctccgagcgtggttggactttgaaggggatcggccgccgtgagtgtggggcctgcagcctactctccccgagtcccctgcccggcctgcctcgctcgaggcacccgacggcttctgtctccgcgggctggcgcctgaccagccaggcccagcggttccccgcctactgcatttgaaagatcccgaaaaccctggatgattgtgcctggggttggcaagttcgtcttgagtgccttcaagaagggttcctcaagcagttgtcgatagagccctccctactgtatacgccccctccgctcattcctgctacttcctttctcctcctcgtatttccccctcggtcctttacgccgcctttccccctcatttgcagatgctgcatcccctttttggaattgctcaaccaggtggtaaccggcgccgcttcctggccttgggaggtggttcctttcttaacccacaagaacctctcccaagaggtactgagatgcaacaagcatcctctgtttcagttaactttcatgggccgtggactaggtttactaattacttggggaggttttagatatgcttgcggctttctgagtccctaaggaggcctcgtgagagatggactatctctgcatccctagtagtcctcacggcttttgtgctattagtgagggtgttttagaggggaaggtttgtggaggaattgtgacccgaatattgaagagacctaaagatggaattggctgagagaagactacccctgagggaagagttgtagtagaaaagaaaaactggatagataaatgaaactgaaatgtgaggatgcctgggcggattggaatcctgactgaagcaaaagatctctgttggggagggccagttgccacagggccttgaattccaagatttattctactgtagtttgtgtattctagagcatactgattagggtttgctgtaatgcaatgtgtgtcaaatgcccagttttattttggagatgatagtggtgatatctggttggaatttggaatctgattctaacagcaactatatctagaaagactagaattactggagttttgggacaccaggggtttttgcaatgcaagttaccatcgtgcctttttgttattcagtgtttagtctatgaagatgagtaaatggttgttttcaagatttaagtctcttgccatgataatgatgaatgaatgattttatagattgactatagtggtttagtgagcagagttacaattatgagcattaattcccagaccagttcccctaactcaccttgtgctcaaatatgaaaaaggataccacagaaaatgtcagttactctcagattaagtaaaaatggtcaaccttgaagttagttaacaatcctcaagaaagttcactgagtgcactctgccaggtactggggtggaggtatgtgggtatctggaaggagaaataatagaaaataaaagatgctgttcccacttttacagtgctgtgggcggagccccctaatggcaaaggatttgattaacttgaactgaacctttggttggtccactgtggttctactccttataccacctaattatggtacaggggttgtatgttttctagtctgccagtactctcatcgttgtgatttgggcttccttgagggtctcagccttcttgtaggaaagtccttatttaataggagccacagcatttggtatgtttctcttatattttcttcttaaggtagaggtctgtgagataaactgtaaaactgctgggatgatgagggcaacggtattgatgccatctgttttttctgtctcagaacttggtcctgatgtctgaccatggagatgtgagcctcccgcccgaagaccgggtgagggctctctcccagctgggtagtgcggtagaggtgaatgaagacattccaccccgtcggtacttccgctctggagttgagattatccgaatggcatccatttactctgaggaaggcaacattgaacatgccttcatcctctataacaagtatatcacgtaagacacctacagtttcctttttcctttctggtgactggtgcctcgcctatttggctcagaattgctaaaaccacagaacttcacaatatcatcaacattaatcatttttgctggcaactcctacatattggctgtccttgccgttcaaagacatgagtgctgaaggtgttattttcatgactcagtaatttatgagtaagagatttagttctttggcctatgcccacatagcccagctgttagacaaaagagttggtggttaaactagacatattatgttctgatgaatgcttttactgttctctttctactaaagcagccaatcataggattattgttggggtctagcagagccaaaattcctcacttgtacttattttgtagcaaatttagtgatacaggaaaaaattttttcctcttaacctttatcataatcatgcaaatcatcaaataattagtaactgcctacagtttgtgtggctcatcataataagacctttcccttaagttatttatcatcttagggtaggcagcataagtagaagatttcagtactattaacagcaaacaacttctaaaactccattgacaatgatacataatttagaaaggaaataatgttaaaggtcttatttatcatttctaatcttgttctttcacaatatcaggactttttaaaaaataattataatgtatttggttctgagtagctcatagtgtgtttcacctgcataatttcatttgatcttcacagttctgtgtgcatggaatagggtacactaccctacattctacatatgaggaaacaaactcagtgtttggtggatgctcatgtttgaagtgacaaaaccttggttttctgactcctaattcaggatttgttctacaacataggtcctgttcttcttgttttccatttagtaatgttctagagtcagaggtagtcttttgagatcatagtcatgagccacactggctatttttttgttatttattttactactgatttttgagtaggtaacatatatatatatatatatatatatacacatatatatggtgcacaattcagaggcacaaaagaataactatagttaaaaagtaagtcttggccaggcgcagtggctctcgcctgtaatcccagcactttgggaggccagggcaggcggatcacctgaggtcaagagttcaagaccagcttggccaacatggcaaaaccccatctctactaaaaatacaaaaattagtcgggcatggtggcgtgtgcctgtaatcccagctacttgggaggctaaggcaggagaatcgcttgaaaccaggaggcagaggttgtagtgagccgagatcgtgccactgcactccaggactccagactaggtggcaaagcgagactgtttcaaaaaaaaaaaaaaaagtctccccacccactcctcttttccccccaaaccctcagtgcttctccccagagacaaccactcttagtagtttcttagatatcttccaagagatgatatacacataccagttttatcacattaagtttttgatcacatactcctctaaagcagggcttttcaactttggccctattgaccttttggactgaatcattatttgtggtgggagctgtcctgtgtgtcacagaatgtttagcagcatccctggtttctgctcaccagatgccagtatcccccctccccgcagtgtgacaaccaaaaatgtcaccagacattatctgatgttctcccaggggcagaatcacctctgagaaccagtgctccaaaggaaagtatgcggaagaatggactgtctaggattcatattgtaattgtagagtggagaaatgggactgctattgtcttttttatttagaagtgttgcctgtgttaagaggagaaaaccttagacaagttaaatttaacagagtttaatccagtagaaaaaggttcagggaacactcaggaccaaaagtggtgcagaatgttccaccccatagtggaggttgtgcaggctatatttatagtcagagaaaaggaaatgagatacagaaatagcctgattggctacagttatgtgtttgccttatttggtcatgttttggcaggctttagcctccaattggctggaggtttcagctgctatgattggctgagactcagctatttgttacacttgtaacctaactcttatgttaagttacagtttgtttatacattaaattaggttacagttcactatctttggaggcagctttaacttaacacctgtttccttaaagatctgtagttctttaatgccattatgtcatgtcatgtggcctcaatgttgttaaggtttcataaaattataattatatttctgcttctgtttgctgttatgagtttttcattcctaggcacactatttattttcctgcacagtttttttgaccctgtcttctttatatattcttggtagaaagaatattcttatgtatttcctataagcttgtagattgttctctcagaatgaaacccaggggcacaattcctttggagaaacactaattcagaaagttcagtagaatcatggaatcactgcaccaggtatttcctgaagggccttcagaatcctattgccccacaatagaaagggctttcagggcaaagaccatattcattcaacacatgtatattgagtatacctgctgtctacatggcactgcactaggtcctgaacagcagtgagtaaaatggcccctgtccttattggtgttcctttataggtatgggagaagacaataaacagataagcaaataaatacagctgacccctgaacaacacagaggttagcaccaatcccccatgcaatcaaaaatatacatatggtcaggcacagtggctcacacctgtaatcccagcactttgggaggccgaagtggatggatcacttgaggtcaggagttcaagacaagcctcgtcaacatggtgaaaccccgtctctactaaaaatacaaaaattagcctggtgtggtggcgggtgcctgtaaccccagccacttgggagactgaggcaggagaattgcttgaactcaggaagtggaggttgcagtgagccgagatcacgccactgcactccagcctggggacagagcaagatcatgtcttaaaaaaaaaaaaaaaaaaaaaaaaaaaatatatatatatatatatatatatatatatatatatatatatatatatataaagtttttgactccccagaaacttaactactaatagcttactcttgactggaagccttattgataacatggtcagttatcacatactttatatattgtatgtattatgtactatattcttacagaaaagtaagcttgagaatagagaatgttattaagaaaatcataaagaatagaaaatatagatactatttgttaagtggaagtggatcattatgaaggtcttcatcctcgtcatcttcatgttgagtaggctgaggaagaggaggggttggtcttgctgtctcaggggcggcagtggcagaagtaaatccgtgtataaatggacccacaccattgaaacccatgttgtccaaaagtcagctgtagtcgaaataaggaaaatacttaagagtactgtgatagagaataagcaggggtttatgactagagtagtcagggtaaggtctgtctgagaagacaagatttgagctgagacttgagggatgcaatacagttggtcattccaagagcatagggcagagcattaaaacacaggtaactatgtgtttagaagtgcttagatgggaaagaccttagcatgttctggggattgaaagatcattgtgtttggagtatagccagagaaaagcaagatgactccaggtaaggctggagaggcaagtggggctggatcatgcaggactttatgggccatggtaaggagtctgttttttatcttgagggtaacagcaagccattgaaaagttttaagtgggattcagacctaaatttacttactgttttttaaaagagatgaggtctcggccgggcacagtggctcacgcctgtgatctcagcactttgggaggccaccctggagttcaaggccagcctggccaacatggtgataccccatctctactaaaaatacaaaacttagccgggcgtggtggcccacgtctacaatcccagctacccgagaggctgaggcaggagacttgcatgaacccgggaggcagaggtttcagtgagccaagatcgcggcactgcactccagcctgggtgatagagcgagactcggtctcaaaaaaaaaaaaaaaaaagagatgtcactaatgttgcccaggctggtctcgaactcctggatgcaagcgatcctcccatctcagcctcccaaagtgctaggattacaggtgtgagcctccatgcccaatcaatatttaaagtataaattttggcagttgtgtggtaaatggtggagcaagcgttaagagaaggcagggagagtagttaggaaattcttgcaggctggtggcttgaagtagtgtggcaacatggaaagagacagatggatttggtattttggaggtcaggtccataggacttactaatcacttaggaaaaaagatactgcggaggttgatgtcgtgtttctgccttgaacaacttaaacgatagggtagtccatgtattgagatgggaaaagccctctaaagagggctgggtagcgggggaatttaaccgttcacgtttggggtttttttgacatgttaaaatttgagatgcctgtgagatatccaagtagagatgtcaagtgggaggttgaatgtaccagtctgaactcagaagactgaggtctgggctggaaatacagacaagggagtcctcagcatacagatggttctgaagtcatgagaatggctgagattttctttttctttttttttttctgctgtagaaattaattttattcttattcagactattttcaaaagaagcagtggtgcgctgtttttctaaaaatacgcctttagagatttttatatatgtatataataaaatccatacatgtatttacatgattgctacatacaaaattacagcactgtggtatgtacacatctacaggtacattctttccacacatccctgctgtgctttccccgtgtgaaggagggagactgaatcagttgtgagcagccaagggctggcccgtcgtcggaacctccgaatgggggctggggtggaggaggtgaggcgattgccgaggcaggagcagcagctgttgcagggctctcctgcaggccagcaggcagcatctggaggctcccggcagcctccccctcccctccaccccgtggtgcccgcgctgccctcaaggtggggtggctgaccacagacccctctggtgccattctgtggcctagacttgcttggctgggccaagaagttgtgtatgtgaggggtggaggagggagctgtgggaggaatagaccctgtccagccccagccctgagcaggggaaagggctggatggctaaagcctgcagatgactggtgagaacactccgcttggcccggcactgctaagggtcagagactagaggctgggagggagagcagtggccgccggctggggaacagggccttcttcctccctggggctcagagggtggcctcagctgagcttgagtaagcccagctcttaggccctgcggccagaggcttggcctcctgccagcagaggtgcatgcacactggggaggggctgccatctccacttcaacccctgggccaggggctggggaagaaatggaggcttaggcctggcctgctgccctgtaggactaggtccccggggctcaggattcctgaggcatgcagagaagggcctgagaatgcctgagattttctagtgaaggggctcttaatctggggtccaggaacctcacagagattcattgatagaattcaggggatctgtgaaccggaataggaaaaacttttcttgttttttctaaccagtgactgaaatttagcatttccttccattttgaatgtaggcctcaaagtacagtagtagtaatatttgtaattttgtcaccagtagaaatcaagatattttcatattgcattacagttgttgctgacatctcaaaatagcatctaaacatcactacttcagaattacagtacagaattattagacctacagctagatcccattatcaaatgcattgataaagaacacattaggccgggcacagtggctcacgcctgtaatcccagcactttgggaggccaaggctggcggatcacgaggtcaggagatcgagaccatcctggctaacatggtgaaaccccatctctactaaaaatacaaaaaataagcctggcatggtggcaggtgcctgtagtcccagctactcagaaggctgaggcaggagaatggcgtgaacccgggaggcggagcttgcagtgagccgagatcgcgccactgcactccagcctgggcaacagagcgagactccatctcaaaaaaaaaaaaaaaaaaaaaaaaaaaagaacacattaatacagaagaatatatcacaatttttaaaatttttgaaaactgtttttccataaaattggggtattcttggtaatcctttgtactttaagttataccttaaaaaaattgttctgaaaagggtccataggcttcaccagatgccagaaggatccatggaacataaaagatcaagtatctttgttaataaggctagggaatgagaagagaaggagcctaggactgagccctgaggttagttaatggagggagagtcaataggggagactttctttgaagggaggttcaagaggcaggaggaaatccaagagagaatggtgttgtgtcatgggagccaaaataaattagtgtttgaaaaaggagagtagccacctatgtcagatgggtgaagacagaagattggcctttgggtttggtaagatgatgtcatgggtgatcttcataagcaatttcgctagaaggattacagagaccctaattagaacgggtagaaaggtgaatggacagtaagaaagtggaggcaaagggtatagacctgaaagtggcaaatttttttctataggggaccagagagtaaaaatttttggttttgtaggctacttgctgtgtctgtgactacctctgctttatagtgtgaaagtagccatagacaacacataaatgaatggatgtgactggttccaatgacactttatttacaagaacagatggctagctggatttggcacaccagctgtagtttgccaaccccggtatagacaactctttggagaagtttagatgggaagggaagtagaaaaatggggaagtagttgatgggggacaaggagcgtgtgaacatgtgtatgtattttaagttaggagattttagagcatgtttttgctgatggaaaaggatcttatggaggaggagaggctaacagtccagaagagagcttagctgtactaataaactcctcagaagtcaagaggggataggattaagagtacatggatgcctaaggaattgttttttatgacacttagtgttattttgagtgacatattagtgttaacagcaagactgatatggggagtttgtccctgtcacttataggaccacttaaaatgatgaactactaggagagttggtgcggatgagatttagcagctcatttacttgatttgtgggatttagagtttaatttggaattttgttgtattggccttacctgaagtaattaatgtagctaccttcacttttcttggagatacctttaaaatcttgattctgattctgattctgtgaacagaaaatcacagcaattgcaaacaaattctagctcactgattctcagtctgttttctgttgtattttacttagtacattcctatcaataacagtggctcagctttggcagttactacaaccgaggagaaaagagaggggagtatacatctgcctcaccactcctctgcctcccctactactgagaatcattgttctagaccttttgtggatactttctttacttcagggttttaaaaggcatgtttgttccttttcctggagcagttcaggcatcttaatgatctcaggcatatttcccccctcagtagcttccctaatgtaggaatgctttgccttttgcagaccccagtatagaagaaagagttcagcatattaaatcagtacatattttcatgatgagcgcagacaataaaccaggcagtggattctttcacagctttttatggtcatcaactaggctgcccagaagggagtgagagtattcaggcaattcctgtgtgctatgtgagcctcctggaacaccaaccctttttctgaaaatgaactgtcacctgtgttgaaaatgtttgctgggattggggtttatagactgaagaaggttccatctgtgatcatgcttaccatgctgagtaacttttaagactggaagaatcgagatgaggatccttaatgcatccatgttaaagaacctttgcttgactttttgaattagttgttttcatacaaaattaacacttattcacgatttaaaaaatttttcaaacactacaagggagatattaaagtgaaaagagaagtctcatctatcagaggtggccactattgtatttctggcatggatgaggtgtgattaagctcataggtgcccccatgtgtccttttccttaaagcatcaatgggatcttaccacgtattctgttctgcgacttgctttcttcacagtagtgtctttccatatcaggacatactgagccatctcattctgcctcagagctattccatctgcctggaacatgaatctggaacagtcccagattcatggctcactcttgtctagtccttactcaaatgcctccttcttaatgatgacttccttagctgctgtatctaaaatttcaaccattcccctatccctttctatcccccttccctattaatgactttcctagcatacttctgtttattgtctgttcccccattgtaatgtatactctatggtggggaggaatatttgactgtgttgttcactgccatatccccaacctttagaataattctggaccctgtagtagatgctcagtaaatattcactgaatgaatgggtgaatgattacattgtcttcacatttgaatgcacattattttttaaacaatcccctattgatggacatttaggggtttgttttttttttttttttcagttttttctactttttaaaacaatgctgtattgaatatttttatacatatatctttgtactgttttataatgatctctaggataaattcctagagatagaattgtgagtttaaaggatatacacattttaagttggatgcggtggctcacgcctgtaatcccagcatttcgggaggctgacgcgggcagatcacctgaggtcaggagttggagaccagcctggtcaacatggcgaaaccccatctctactaaaaatacgcaaattagctgggcgtggtagcaggtgcctctaatcgcagctactcgggaggctgaggcaggagaatcacttgaacctgggaggtagaggttgcagtgagccgagactgccccactgcactccaaccagggcggcagagcaagactctgtctcaaaaaaaaaaaaataaataaatcaaaaaaaaaataaatagtacaaattaaaaataaaggatatacacgttttaaattttgaataattagcttccattttccctcccttaagatgaaaggttatattaatttacaatcttgctaacactgtatgggtatcccatttctctataccaggtatgatcaacctttaagtcccatttctctaccaggtataattaacctttacgcctttgccaatccgatggatgaaaatggtatctcatcctaatttgaatttctttaattatgagtggattcagcattattgcatatattcatcttttgtatttacttttctgcttatgtcttcttttttcattgtttattgggtcattttgcttgtgtttttgcaatcatatctttgtttgctttggtacctttcctctctccaggcttcaaccagatataaccccagagaacagtatacatctgggccaccgctttctatccttagaaagtttctagggatagaactttgaaccatgtaatggagtctagtttataagtaaagaaaaaactcccaaacctgtatatgatgctggtgttagcatcttcatctcttattcttgctcacattttttgtttattagttaaaaaaaatcatagaaacccatagcaaatattgactatgttctagataccgtgtttagcattttattatctctttaagtgtcacagcaagcctgtcagggagtactagtttgtctccatctctacaattttatggacaggatatcagccatgtccaaccctttgaatgcaaggacttttttgcttatctatggtagcagatatcacctttttaaaagttcattagctagttagtgttagtgtattttatgtatggcccaagacagttcttcttccagtgtggcccagggaagctaaaaggttggacacccctgcaaaaaactgagggatggtgagattaagtgacttgcccaaggtcacatagctagtaaatggcaaaaccaggatttgagcccaggcacagtggctccagagccagccctactaaccactaagttcttttacctccagtatgagtaatggggtatgttgcccattgtctgtttcaggagacctttttgcccatctatccccattcagaaaactggctacagttgttgaagcaagggaaagctattcatgtacaggtctgggaggttttttttgtttgttttttgtttttgtttttttacttataaactagatttccattacatggctcaaagtcaaagtaatataaagaggtacttggtgaaaagtttcacacctactcttatctgttctattacccctgccctcatttctgtgtatacttcctgtttctttgtatacttacaaagcaaagtaaataaatacggcaggctaaatacggcaggttgtcaaataatgtcgttttgtccaatgtcgttttgttttaatgttgatgagaaaagaaaaatccattcctgcctggggccactgtctgtgtggagtctgcacattctccccatgtctgtgtgggttttctccgggtattcaagtttcttcccacaccccaaaggtctgcacattaggtgaactggcatgtctgaattgtccccagtctgagtgagtgcaagtgtatgtgtgatgccaatgggatggcatcctctccagggctggttcccaccttggccttgagctgctgggatggactctggccacctgggactgaataggcaggtaaatcatttacttacttgtttttataagtctttcttaaatgtatgtatagctcatatttatttcagtgtttaatattagaagtgttttggtctgtatttagaagtctggtgtttttgtgaccaggatagatcaaaggaacttaactcttgtttatgtcaattagtgcatggtaaagttggttttgttatatgtcattgtgcttaaagtcacaatttccaagaacctatcaacattaaggacttactgtgtatatgtacatacttgtacatatatgtaatgtttactcatcaaatatttattgagtgcctctttatacaaggcactgtgctggcttccaaggagtatacaaagaagcatgaaacacagaaatctctggcctcaggaagctcgcagtgtagttctataataagagcataagtaaaaataaaacatagtgtttatatgacatagtactttcttagctgattcaggcctcaatacaaagcacattcagcctgctaaaggtagtaaatattaatatgtatcttggcttttggggctaagatgagagttctactgaatcatctatcagtctctaaaatataagaaatatgtcttatttatcttaatagattcttcaggactttatggtttgaacaaatgaatctgtatttcttttaaatatagacttcaaggaaactgttttatatctttctttttttttttttttttccaaatagagataggatctccctctgtcacccaggctggagtgcagtggtgtgatcaaagctcactgtaacctcagacttctgggatcgagagatcctcctgcctcagcctcccaagcagctgggactacagatgcataccaccacacccagctaatttttgtgtttttttatgttttgttatatatgtttgtgtatgtatatatatatatgtatatatatatataaattaaaaaatataaatagagacaaggtctcaccctgttacccaggctggtcttgaactcctgggctcaagcagtcttcctgcctcggtctcccaaagtgctgggattacaggcatgagccaccgcacccagcctcttttatatcttcttcatgaacccaaaaggaagctttttaaagaaccatttttattttagagtccatccctgccttgaggagccttatcaagttggatcaaaatgaaacttgtgtgcctaatatagaactgaaggatgaggacttatctttagaaagtttgttttggtggggatcatcttttttctttattgaggattcttcttccaattacttctgccccatgggcagtaagtagaaaagagtttatcccaattacaatataatattttagagctatcagcaagctaccttcaatttatttttttatctcagtttctgtgtattacaacttaattctgttaaaagacatctttgttcagaatccctccagtagttctagacattccagaatccgtatggaagaagtatggtgtagtggttaaaagaataggctctggagccagcctgctcatactgaaattctgaatctgccactttctttctgtgacaggttactggacttttatttattttcactgcccctaagtagatgtcttaaatgttagagatttgtgaattaattaagtttattctccccactgagctttagagccatggacaagaaccaaaagatgaaatctagcatcttatatttacctaagcacttttcatcaaagacagtgcatgctaacatgtaatatgcacatactacatgcatagaacacatgcactaagtatttccatgcatttttgtatgatgcaaagtagtattcttctttgaaggaacacgaatcccaaaggaaaaaagccaaagttaaaggttacataagagctagaaggagtaaggaaacatggttttctcttgcttcctgcccatggctgccaaacggttctctgaagactgctatgtgacagaagccctttcctttgaaaacctgtcacgtcacaacaagaaaaagatctctttctttggaggtacatttttgggcacaagaaaggctttttaaaatttttttggccatctttttcattgtaggagtctggtgcttgctgcctagtttgggagtagaggaaaagactctggctctttagggggatagagatgggaaaggagcatggcccagctgggtgtattagctctccctccgctgcacttctggaacctttcatataagggcttcaggataagggggttgcatagctttagggtcttatggacatttggaccatttgcttcataatcattttgaactgtttccttaggctctttattgagaaactaccaaaacatcgagattacaaatctgctgtcattcctgaaaagaaagacacagtaaaggtgggtcttcactttcattgttgcccatctaaaagcttcagagcagcacagactgacttcaagataaaagtagtagtctctgcatctgagtaccagatcctgcaataggagataaggccatttcaccacaacagttctgaagtagcaggtatggtacagtagggggtattttaaatcattttgggaaatgttgcagtcaccaacttgacttaagtcttcttttggattctgtaattttctggcattgttctaattctattttctgttttgtgtctcagaaattaaaggagattgcatttcccaaagcagaagagctgaaggcagagctgttaaaacgatataccaaagaatatacagaatataatgaagaaaaggtcagtatataacagctaagaagaaaattattttgcttttttaggctgtgccctgggattgtaatatgacatttcaatatatcctgtgcttttaatgtgctgtttcaccttttttgggcaaagaccagaaactcaaaaaagtagaacaccagtggttaggctcagggttgtaacacagatatagcctatttgtcgaagagagtgacttgagggacagaaaatctgtcgcctacctgctatgtctagagtgagaatcataagaacaatgaacattctctccaaaacataggtttttagatcagagaatttgagggttggattcacatttggttatacctgaagctatttataagaattgacttttcaagctattttttttttttttttttgagacagtctcactctgtcgcctaggctggagtgcagtggcacgatctcagctcactgcaacctctgcctccccgactcaagtgattctcctacctcagcctcccgagtgactgggactacaggcatccgccaccatacccggctaatttttgtatttttagtagagatggggtttcaccatgttggccaagatggtctcaaactcctgacctcaagtgatccgcctgcctcggccttccaaagtgctgggattacaggcgtgagccgctgcacccagccatttcaagctattttcaaatgattctttttaggaagtcagttaaaacatgtggagaaactgccagggcgctgtcagtggccagctgtgaatacatactgcagccactcacaggctgttgtgtagctgtctgctggtctctattctggactctgatgttgaaaatcagcagagggatgaacagctatgaggtatatacttctaaagcaccaagtgagtgtaagctttaaggaggaggttattacttagcatttctttctttctttttttttttaatccaaatgcctctcaagtatttcttattagcttaaaatgtcactctgtgttgaacaaatgcacaaaaaccataaaaatttcagaggcctcattttgggttaaaattcagtagaaggcaagacgtggtggctcatgcctgtaatcctagcactttgggagcctgaagtgggtgatcgcttgagcccaggagttcgagaccagcctgggcaacatggtgaaaccccatctctacaaaaaatacaaaaattagctgggtctctacaaaaaatacaaaaattagtgtggtggcacgcacctctggtttcagctactcgggaggctgagatgggaggatcacctgcgcccagggagattgaggctgcagtgagccatgattgaccactacagtccagcctaggtgacagagtgagactctctaagaaaaaaaaaaaaaattcagtagagacccccaagatagcaggtataagtttggatctggttctattttatagccttacttgaaatatagaatatgtacatgacacagagagaagaataaaactgtctgtgatacaggttaggagaacacagatagtaagttgcatcaagatttcaggccagacattgtggctcacacctggaatcccagcgcttcgggaggccgaggtgggcagattgtttgagcccaggagttcaagactagcctgggcaacatggcgaaaccctgtctctacaaaaaatacaaaaattagccaggtgtggtggtgcacacctgtggtcccacctactcaggaggctaaggtgggaggattgcttgagcctgggaggtcaaggctgcagtgagctgtgatcatgccattgcacttcagcctgggaaacagaatgagaccctgtctcaaaaaaaaaaaaaaaaagatttcagtgaagaggaaagtgcattaggtagagtcattgtcgggagggtattgagaggattgggattttaattgtccttggagataggtatactgtggccagatagaaaggggtggtgactacactccgtgggtataaagatactgaggaaagcatgaattctgtgttaggtaatcaggccacagcagaagtacattttggaaatctccatgctaaaaagccttgttctcctgaagtgtgaagtcactgaggtgtgaagtgttagcctaaattttctctctttgtagaagaaggaagcagaggaattggcccggaacatggccatccagcaagagctggaaaaggaaaaacagagggtagcacaacagaagcagcagcaattggaacaggaacagttccatgccttcgaggagatgatccggaaccaggagctagaaaaagagcgactgaaaattgtacaggagtttgggaaggtagaccctggcctaggtggcccgctagtgcctgacttggagaagccctccttagatgtgttccccaccttaacagtctcatccatacagccttcagactgtcacacaactgtaaggccagctaagccacctgtggtggacaggtccttgaaacctggagcactgagcaactcagaaagtagtaagtgcatttgctgatgtcctcttccttctcagttgcagccaaacagtatcattctgacggggtcaacctaagattacctccctgatcccactcattaagctttggtcacagaaacccatctgataagtattgctgtactgtgtcctaatacactggctatgttataaaagtggcctttgctgaaacctagtctggtcgattttctgaagagctaatattattcttgaaagtcagactgtcaactttttagtgaaaggaaaagaatgtgccaaaccgaattcataatcctcagataacatcatcagactgctgtgtgactctgtgtcccctgctctgactttgttacctctctagcaattcagatcttgctgttgaatacgcaaaagcagaacatctttcccctcccactttttttttttaaatatgaaaatatagctgtgagagacacttcctaactttagcttgctggctgtctcacagagtttctccatggtgttcagaaactgggtccattcttggcattttttatgagctgctttgttcatgccttttttgggggactacactgtattttttattttgttgtggtttggcatttaacttcttccagaagagtaagttcagaagtaaataactgcccagattgttttccattctcaagaatatacaccagtgtatttcttttaaagtcatactctgatattcttatctgagataaaagagatttaaaattaaaagttcagatgaatgggcagtgtcttagtccattttgtgctgctataacagaatacctgaggctggataatttataatgaacataaatttatttggttcatagttctggagagtggaaagtccaagacccaggggcctggcaaaggccttcttgctgcgtcatcccacgacagaagggtggaagggcaaacaaagatccctcatagcctcatcacctcttaaagatcctacctctcaataattttgcattaggaattaagtttccaaaacatgaactttgggagacacagtcaaaccacagcagggaggttatttttttaattctttgtattagattctgacagaaaattcccaaatgtttcaagaacttgtgtctttttcccccctaaattttattttttacttttattttttaagtttttgtgggtacatagtaggtgtatgtatttatggggtacatgagatgttttgatacaggcatgcaatatgaaataagcacatcatggagaatagggtatccatcccctcaagtatttatcctttgagttacaaacaatccaattacattcttaaggttatttttaagaaaacttttcttaaggtagtagtttgcccttttcttaacttgaataattaaagcctactattttctcttcttgaagtaatgtgctccttacagctgtggcccaagattggagaagacactttacagccctttttttggtgccattagaatgagatccctactcactgcctgaagttgggggaatcccagtggcttaatgttgctcctccagggctgctggctgtgaggtctgcttgaggaggcagggctcagtggtcgcagactattctcctttctcctttacagttcccacaatcgatggattgcgccatgtggtggtgcctgggcggctgtgcccacagtttctccagttagccagtgccaacactgcccggggagtggagacatgtggaattctctgtggaaaactggtaaaaagaaaaaaaaaaccaaactcttctctgaaccgaaactgtttcttcccctcttggcatcctgtgactctcagagaaaatatccagggtcagttactctttgtaccaaggaaccgtggactgcataatttcatgtcactttgaatttggtgaccctgtattgattgattgaattgaagtggttattttaatgctagtagtaagaaatacctaattttaaacttggtaggaagatccagtcattatctacatatcaatttttttggtacctactttatggtaggacctgggaatataaaatatgtaaagcacatagtatgtgtccacgaaaagtgcccagtcactttggagagaaggcagacatgcactaaagtctaaccagcatgctgaaaaatatgtacagtataagtattgggaattttgaggaaggaaaggtcactgaatggaggcacttaaagaacccattactgctgaatgaataaataaatgaagtagagtaaatgtaagccgaggcttacaggatgagaagggcttaaggaaacagtgacaggacaacaactttagacctgagcaagggaagagaaatggtactctacccagagcttctcagcagagcagtttggcacagcaggaaattccctcagggctgtggtgtttgcccaggctgcagagttctggggttggtctctgcatctgtcgctgtacagagtaccccaggcaatgtgcatcagcagccaaggttgtgaaccactgagtggcaggactcctgctgtgtgggaagggctttcacttgtatagatgcttacctttccactgtcgggatggagtggagcagggttgcatgagcaccagggaattgtgaccagctgttttctcctttggcagatgaggaatgaatttaccattacccatgttctcatccccaagcaaagtgctgggtctgattactgcaacacagagaacgaagaagaa

SEQ ID NO: 14233 - DNA, 1156 bp, Homo sapiens
gcggggaaaggtggggaagggtcccgggaacgtggtggggcagggcctccgagcgtggttggactttgaaggggatcggccgccatgctgcatcccctttttggaattgctcaaccaggtggtaaccggcgccgcttcctggccttgggaggtggttcctttcttaacccacaagaacctctcccaagagaacttggtcctgatgtctgaccatggagatgtgagcctcccgcccgaagaccgggtgagggctctctcccagctgggtagtgcggtagaggtgaatgaagacattccaccccgtcggtacttccgctctggagttgagattatccgaatggcatccatttactctgaggaaggcaacattgaacatgccttcatcctctataacaagtatatcacgctctttattgagaaactaccaaaacatcgagattacaaatctgctgtcattcctgaaaagaaagacacagtaaagaaattaaaggagattgcatttcccaaagcagaagagctgaaggcagagctgttaaaacgatataccaaagaatatacagaatataatgaagaaaagaagaaggaagcagaggaattggcccggaacatggccatccagcaagagctggaaaaggaaaaacagagggtagcacaacagaagcagcagcaattggaacaggaacagttccatgccttcgaggagatgatccggaaccaggagctagaaaaagagcgactgaaaattgtacaggagtttgggaaggtagaccctggcctaggtggcccgctagtgcctgacttggagaagccctccttagatgtgttccccaccttaacagtctcatccatacagccttcagactgtcacacaactgtaaggccagctaagccacctgtggtggacaggtccttgaaacctggagcactgagcaactcagaaagtattcccacaatcgatggattgcgccatgtggtggtgcctgggcggctgtgcccacagtttctccagttagccagtgccaacactgcccggggagtggagacatgtggaattctctgtggaaaactgatgaggaatgaatttaccattacccatgttctcatccccaagcaaagtgctgggtctgattactgcaacacagagaacgaagaagaa

SEQ ID NO: 14234 - DNA, 18457 bp, Homo sapiens
ggaacctccgggtgtcatccgcggggaaaggtggggaagggtcccgggaacgtggtggggcagggcctccgagcgtggttggactttgaaggggatcggccgccgtgagtgtggggcctgcagcctactctccccgagtcccctgcccggcctgcctcgctcgaggcacccgacggcttctgtctccgcgggctggcgcctgaccagccaggcccagcggttccccgcctactgcatttgaaagatcccgaaaaccctggatgattgtgcctggggttggcaagttcgtcttgagtgccttcaagaagggttcctcaagcagttgtcgatagagccctccctactgtatacgccccctccgctcattcctgctacttcctttctcctcctcgtatttccccctcggtcctttacgccgcctttccccctcatttgcagatgctgcatcccctttttggaattgctcaaccaggtggtaaccggcgccgcttcctggccttgggaggtggttcctttcttaacccacaagaacctctcccaagaggtactgagatgcaacaagcatcctctgtttcagttaactttcatgggccgtggactaggtttactaattacttggggaggttttagatatgcttgcggctttctgagtccctaaggaggcctcgtgagagatggactatctctgcatccctagtagtcctcacggcttttgtgctattagtgagggtgttttagaggggaaggtttgtggaggaattgtgacccgaatattgaagagacctaaagatggaattggctgagagaagactacccctgagggaagagttgtagtagaaaagaaaaactggatagataaatgaaactgaaatgtgaggatgcctgggcggattggaatcctgactgaagcaaaagatctctgttggggagggccagttgccacagggccttgaattccaagatttattctactgtagtttgtgtattctagagcatactgattagggtttgctgtaatgcaatgtgtgtcaaatgcccagttttattttggagatgatagtggtgatatctggttggaatttggaatctgattctaacagcaactatatctagaaagactagaattactggagttttgggacaccaggggtttttgcaatgcaagttaccatcgtgcctttttgttattcagtgtttagtctatgaagatgagtaaatggttgttttcaagatttaagtctcttgccatgataatgatgaatgaatgattttatagattgactatagtggtttagtgagcagagttacaattatgagcattaattcccagaccagttcccctaactcaccttgtgctcaaatatgaaaaaggataccacagaaaatgtcagttactctcagattaagtaaaaatggtcaaccttgaagttagttaacaatcctcaagaaagttcactgagtgcactctgccaggtactggggtggaggtatgtgggtatctggaaggagaaataatagaaaataaaagatgctgttcccacttttacagtgctgtgggcggagccccctaatggcaaaggatttgattaacttgaactgaacctttggttggtccactgtggttctactccttataccacctaattatggtacaggggttgtatgttttctagtctgccagtactctcatcgttgtgatttgggcttccttgagggtctcagccttcttgtaggaaagtccttatttaataggagccacagcatttggtatgtttctcttatattttcttcttaaggtagaggtctgtgagataaactgtaaaactgctgggatgatgagggcaacggtattgatgccatctgttttttctgtctcagaacttggtcctgatgtctgaccatggagatgtgagcctcccgcccgaagaccgggtgagggctctctcccagctgggtagtgcggtagaggtgaatgaagacattccaccccgtcggtacttccgctctggagttgagattatccgaatggcatccatttactctgaggaaggcaacattgaacatgccttcatcctctataacaagtatatcacgtaagacacctacagtttcctttttcctttctggtgactggtgcctcgcctatttggctcagaattgctaaaaccacagaacttcacaatatcatcaacattaatcatttttgctggcaactcctacatattggctgtccttgccgttcaaagacatgagtgctgaaggtgttattttcatgactcagtaatttatgagtaagagatttagttctttggcctatgcccacatagcccagctgttagacaaaagagttggtggttaaactagacatattatgttctgatgaatgcttttactgttctctttctactaaagcagccaatcataggattattgttggggtctagcagagccaaaattcctcacttgtacttattttgtagcaaatttagtgatacaggaaaaaattttttcctcttaacctttatcataatcatgcaaatcatcaaataattagtaactgcctacagtttgtgtggctcatcataataagacctttcccttaagttatttatcatcttagggtaggcagcataagtagaagatttcagtactattaacagcaaacaacttctaaaactccattgacaatgatacataatttagaaaggaaataatgttaaaggtcttatttatcatttctaatcttgttctttcacaatatcaggactttttaaaaaataattataatgtatttggttctgagtagctcatagtgtgtttcacctgcataatttcatttgatcttcacagttctgtgtgcatggaatagggtacactaccctacattctacatatgaggaaacaaactcagtgtttggtggatgctcatgtttgaagtgacaaaaccttggttttctgactcctaattcaggatttgttctacaacataggtcctgttcttcttgttttccatttagtaatgttctagagtcagaggtagtcttttgagatcatagtcatgagccacactggctatttttttgttatttattttactactgatttttgagtaggtaacatatatatatatatatatatatatacacatatatatggtgcacaattcagaggcacaaaagaataactatagttaaaaagtaagtcttggccaggcgcagtggctctcgcctgtaatcccagcactttgggaggccagggcaggcggatcacctgaggtcaagagttcaagaccagcttggccaacatggcaaaaccccatctctactaaaaatacaaaaattagtcgggcatggtggcgtgtgcctgtaatcccagctacttgggaggctaaggcaggagaatcgcttgaaaccaggaggcagaggttgtagtgagccgagatcgtgccactgcactccaggactccagactaggtggcaaagcgagactgtttcaaaaaaaaaaaaaaaagtctccccacccactcctcttttccccccaaaccctcagtgcttctccccagagacaaccactcttagtagtttcttagatatcttccaagagatgatatacacataccagttttatcacattaagtttttgatcacatactcctctaaagcagggcttttcaactttggccctattgaccttttggactgaatcattatttgtggtgggagctgtcctgtgtgtcacagaatgtttagcagcatccctggtttctgctcaccagatgccagtatcccccctccccgcagtgtgacaaccaaaaatgtcaccagacattatctgatgttctcccaggggcagaatcacctctgagaaccagtgctccaaaggaaagtatgcggaagaatggactgtctaggattcatattgtaattgtagagtggagaaatgggactgctattgtcttttttatttagaagtgttgcctgtgttaagaggagaaaaccttagacaagttaaatttaacagagtttaatccagtagaaaaaggttcagggaacactcaggaccaaaagtggtgcagaatgttccaccccatagtggaggttgtgcaggctatatttatagtcagagaaaaggaaatgagatacagaaatagcctgattggctacagttatgtgtttgccttatttggtcatgttttggcaggctttagcctccaattggctggaggtttcagctgctatgattggctgagactcagctatttgttacacttgtaacctaactcttatgttaagttacagtttgtttatacattaaattaggttacagttcactatctttggaggcagctttaacttaacacctgtttccttaaagatctgtagttctttaatgccattatgtcatgtcatgtggcctcaatgttgttaaggtttcataaaattataattatatttctgcttctgtttgctgttatgagtttttcattcctaggcacactatttattttcctgcacagtttttttgaccctgtcttctttatatattcttggtagaaagaatattcttatgtatttcctataagcttgtagattgttctctcagaatgaaacccaggggcacaattcctttggagaaacactaattcagaaagttcagtagaatcatggaatcactgcaccaggtatttcctgaagggccttcagaatcctattgccccacaatagaaagggctttcagggcaaagaccatattcattcaacacatgtatattgagtatacctgctgtctacatggcactgcactaggtcctgaacagcagtgagtaaaatggcccctgtccttattggtgttcctttataggtatgggagaagacaataaacagataagcaaataaatacagctgacccctgaacaacacagaggttagcaccaatcccccatgcaatcaaaaatatacatatggtcaggcacagtggctcacacctgtaatcccagcactttgggaggccgaagtggatggatcacttgaggtcaggagttcaagacaagcctcgtcaacatggtgaaaccccgtctctactaaaaatacaaaaattagcctggtgtggtggcgggtgcctgtaaccccagccacttgggagactgaggcaggagaattgcttgaactcaggaagtggaggttgcagtgagccgagatcacgccactgcactccagcctggggacagagcaagatcatgtcttaaaaaaaaaaaaaaaaaaaaaaaaaaaatatatatatatatatatatatatatatatatatatatatatatatatataaagtttttgactccccagaaacttaactactaatagcttactcttgactggaagccttattgataacatggtcagttatcacatactttatatattgtatgtattatgtactatattcttacagaaaagtaagcttgagaatagagaatgttattaagaaaatcataaagaatagaaaatatagatactatttgttaagtggaagtggatcattatgaaggtcttcatcctcgtcatcttcatgttgagtaggctgaggaagaggaggggttggtcttgctgtctcaggggcggcagtggcagaagtaaatccgtgtataaatggacccacaccattgaaacccatgttgtccaaaagtcagctgtagtcgaaataaggaaaatacttaagagtactgtgatagagaataagcaggggtttatgactagagtagtcagggtaaggtctgtctgagaagacaagatttgagctgagacttgagggatgcaatacagttggtcattccaagagcatagggcagagcattaaaacacaggtaactatgtgtttagaagtgcttagatgggaaagaccttagcatgttctggggattgaaagatcattgtgtttggagtatagccagagaaaagcaagatgactccaggtaaggctggagaggcaagtggggctggatcatgcaggactttatgggccatggtaaggagtctgttttttatcttgagggtaacagcaagccattgaaaagttttaagtgggattcagacctaaatttacttactgttttttaaaagagatgaggtctcggccgggcacagtggctcacgcctgtgatctcagcactttgggaggccaccctggagttcaaggccagcctggccaacatggtgataccccatctctactaaaaatacaaaacttagccgggcgtggtggcccacgtctacaatcccagctacccgagaggctgaggcaggagacttgcatgaacccgggaggcagaggtttcagtgagccaagatcgcggcactgcactccagcctgggtgatagagcgagactcggtctcaaaaaaaaaaaaaaaaaagagatgtcactaatgttgcccaggctggtctcgaactcctggatgcaagcgatcctcccatctcagcctcccaaagtgctaggattacaggtgtgagcctccatgcccaatcaatatttaaagtataaattttggcagttgtgtggtaaatggtggagcaagcgttaagagaaggcagggagagtagttaggaaattcttgcaggctggtggcttgaagtagtgtggcaacatggaaagagacagatggatttggtattttggaggtcaggtccataggacttactaatcacttaggaaaaaagatactgcggaggttgatgtcgtgtttctgccttgaacaacttaaacgatagggtagtccatgtattgagatgggaaaagccctctaaagagggctgggtagcgggggaatttaaccgttcacgtttggggtttttttgacatgttaaaatttgagatgcctgtgagatatccaagtagagatgtcaagtgggaggttgaatgtaccagtctgaactcagaagactgaggtctgggctggaaatacagacaagggagtcctcagcatacagatggttctgaagtcatgagaatggctgagattttctttttctttttttttttctgctgtagaaattaattttattcttattcagactattttcaaaagaagcagtggtgcgctgtttttctaaaaatacgcctttagagatttttatatatgtatataataaaatccatacatgtatttacatgattgctacatacaaaattacagcactgtggtatgtacacatctacaggtacattctttccacacatccctgctgtgctttccccgtgtgaaggagggagactgaatcagttgtgagcagccaagggctggcccgtcgtcggaacctccgaatgggggctggggtggaggaggtgaggcgattgccgaggcaggagcagcagctgttgcagggctctcctgcaggccagcaggcagcatctggaggctcccggcagcctccccctcccctccaccccgtggtgcccgcgctgccctcaaggtggggtggctgaccacagacccctctggtgccattctgtggcctagacttgcttggctgggccaagaagttgtgtatgtgaggggtggaggagggagctgtgggaggaatagaccctgtccagccccagccctgagcaggggaaagggctggatggctaaagcctgcagatgactggtgagaacactccgcttggcccggcactgctaagggtcagagactagaggctgggagggagagcagtggccgccggctggggaacagggccttcttcctccctggggctcagagggtggcctcagctgagcttgagtaagcccagctcttaggccctgcggccagaggcttggcctcctgccagcagaggtgcatgcacactggggaggggctgccatctccacttcaacccctgggccaggggctggggaagaaatggaggcttaggcctggcctgctgccctgtaggactaggtccccggggctcaggattcctgaggcatgcagagaagggcctgagaatgcctgagattttctagtgaaggggctcttaatctggggtccaggaacctcacagagattcattgatagaattcaggggatctgtgaaccggaataggaaaaacttttcttgttttttctaaccagtgactgaaatttagcatttccttccattttgaatgtaggcctcaaagtacagtagtagtaatatttgtaattttgtcaccagtagaaatcaagatattttcatattgcattacagttgttgctgacatctcaaaatagcatctaaacatcactacttcagaattacagtacagaattattagacctacagctagatcccattatcaaatgcattgataaagaacacattaggccgggcacagtggctcacgcctgtaatcccagcactttgggaggccaaggctggcggatcacgaggtcaggagatcgagaccatcctggctaacatggtgaaaccccatctctactaaaaatacaaaaaataagcctggcatggtggcaggtgcctgtagtcccagctactcagaaggctgaggcaggagaatggcgtgaacccgggaggcggagcttgcagtgagccgagatcgcgccactgcactccagcctgggcaacagagcgagactccatctcaaaaaaaaaaaaaaaaaaaaaaaaaaaagaacacattaatacagaagaatatatcacaatttttaaaatttttgaaaactgtttttccataaaattggggtattcttggtaatcctttgtactttaagttataccttaaaaaaattgttctgaaaagggtccataggcttcaccagatgccagaaggatccatggaacataaaagatcaagtatctttgttaataaggctagggaatgagaagagaaggagcctaggactgagccctgaggttagttaatggagggagagtcaataggggagactttctttgaagggaggttcaagaggcaggaggaaatccaagagagaatggtgttgtgtcatgggagccaaaataaattagtgtttgaaaaaggagagtagccacctatgtcagatgggtgaagacagaagattggcctttgggtttggtaagatgatgtcatgggtgatcttcataagcaatttcgctagaaggattacagagaccctaattagaacgggtagaaaggtgaatggacagtaagaaagtggaggcaaagggtatagacctgaaagtggcaaatttttttctataggggaccagagagtaaaaatttttggttttgtaggctacttgctgtgtctgtgactacctctgctttatagtgtgaaagtagccatagacaacacataaatgaatggatgtgactggttccaatgacactttatttacaagaacagatggctagctggatttggcacaccagctgtagtttgccaaccccggtatagacaactctttggagaagtttagatgggaagggaagtagaaaaatggggaagtagttgatgggggacaaggagcgtgtgaacatgtgtatgtattttaagttaggagattttagagcatgtttttgctgatggaaaaggatcttatggaggaggagaggctaacagtccagaagagagcttagctgtactaataaactcctcagaagtcaagaggggataggattaagagtacatggatgcctaaggaattgttttttatgacacttagtgttattttgagtgacatattagtgttaacagcaagactgatatggggagtttgtccctgtcacttataggaccacttaaaatgatgaactactaggagagttggtgcggatgagatttagcagctcatttacttgatttgtgggatttagagtttaatttggaattttgttgtattggccttacctgaagtaattaatgtagctaccttcacttttcttggagatacctttaaaatcttgattctgattctgattctgtgaacagaaaatcacagcaattgcaaacaaattctagctcactgattctcagtctgttttctgttgtattttacttagtacattcctatcaataacagtggctcagctttggcagttactacaaccgaggagaaaagagaggggagtatacatctgcctcaccactcctctgcctcccctactactgagaatcattgttctagaccttttgtggatactttctttacttcagggttttaaaaggcatgtttgttccttttcctggagcagttcaggcatcttaatgatctcaggcatatttcccccctcagtagcttccctaatgtaggaatgctttgccttttgcagaccccagtatagaagaaagagttcagcatattaaatcagtacatattttcatgatgagcgcagacaataaaccaggcagtggattctttcacagctttttatggtcatcaactaggctgcccagaagggagtgagagtattcaggcaattcctgtgtgctatgtgagcctcctggaacaccaaccctttttctgaaaatgaactgtcacctgtgttgaaaatgtttgctgggattggggtttatagactgaagaaggttccatctgtgatcatgcttaccatgctgagtaacttttaagactggaagaatcgagatgaggatccttaatgcatccatgttaaagaacctttgcttgactttttgaattagttgttttcatacaaaattaacacttattcacgatttaaaaaatttttcaaacactacaagggagatattaaagtgaaaagagaagtctcatctatcagaggtggccactattgtatttctggcatggatgaggtgtgattaagctcataggtgcccccatgtgtccttttccttaaagcatcaatgggatcttaccacgtattctgttctgcgacttgctttcttcacagtagtgtctttccatatcaggacatactgagccatctcattctgcctcagagctattccatctgcctggaacatgaatctggaacagtcccagattcatggctcactcttgtctagtccttactcaaatgcctccttcttaatgatgacttccttagctgctgtatctaaaatttcaaccattcccctatccctttctatcccccttccctattaatgactttcctagcatacttctgtttattgtctgttcccccattgtaatgtatactctatggtggggaggaatatttgactgtgttgttcactgccatatccccaacctttagaataattctggaccctgtagtagatgctcagtaaatattcactgaatgaatgggtgaatgattacattgtcttcacatttgaatgcacattattttttaaacaatcccctattgatggacatttaggggtttgttttttttttttttttcagttttttctactttttaaaacaatgctgtattgaatatttttatacatatatctttgtactgttttataatgatctctaggataaattcctagagatagaattgtgagtttaaaggatatacacattttaagttggatgcggtggctcacgcctgtaatcccagcatttcgggaggctgacgcgggcagatcacctgaggtcaggagttggagaccagcctggtcaacatggcgaaaccccatctctactaaaaatacgcaaattagctgggcgtggtagcaggtgcctctaatcgcagctactcgggaggctgaggcaggagaatcacttgaacctgggaggtagaggttgcagtgagccgagactgccccactgcactccaaccagggcggcagagcaagactctgtctcaaaaaaaaaaaaataaataaatcaaaaaaaaaataaatagtacaaattaaaaataaaggatatacacgttttaaattttgaataattagcttccattttccctcccttaagatgaaaggttatattaatttacaatcttgctaacactgtatgggtatcccatttctctataccaggtatgatcaacctttaagtcccatttctctaccaggtataattaacctttacgcctttgccaatccgatggatgaaaatggtatctcatcctaatttgaatttctttaattatgagtggattcagcattattgcatatattcatcttttgtatttacttttctgcttatgtcttcttttttcattgtttattgggtcattttgcttgtgtttttgcaatcatatctttgtttgctttggtacctttcctctctccaggcttcaaccagatataaccccagagaacagtatacatctgggccaccgctttctatccttagaaagtttctagggatagaactttgaaccatgtaatggagtctagtttataagtaaagaaaaaactcccaaacctgtatatgatgctggtgttagcatcttcatctcttattcttgctcacattttttgtttattagttaaaaaaaatcatagaaacccatagcaaatattgactatgttctagataccgtgtttagcattttattatctctttaagtgtcacagcaagcctgtcagggagtactagtttgtctccatctctacaattttatggacaggatatcagccatgtccaaccctttgaatgcaaggacttttttgcttatctatggtagcagatatcacctttttaaaagttcattagctagttagtgttagtgtattttatgtatggcccaagacagttcttcttccagtgtggcccagggaagctaaaaggttggacacccctgcaaaaaactgagggatggtgagattaagtgacttgcccaaggtcacatagctagtaaatggcaaaaccaggatttgagcccaggcacagtggctccagagccagccctactaaccactaagttcttttacctccagtatgagtaatggggtatgttgcccattgtctgtttcaggagacctttttgcccatctatccccattcagaaaactggctacagttgttgaagcaagggaaagctattcatgtacaggtctgggaggttttttttgtttgttttttgtttttgtttttttacttataaactagatttccattacatggctcaaagtcaaagtaatataaagaggtacttggtgaaaagtttcacacctactcttatctgttctattacccctgccctcatttctgtgtatacttcctgtttctttgtatacttacaaagcaaagtaaataaatacggcaggctaaatacggcaggttgtcaaataatgtcgttttgtccaatgtcgttttgttttaatgttgatgagaaaagaaaaatccattcctgcctggggccactgtctgtgtggagtctgcacattctccccatgtctgtgtgggttttctccgggtattcaagtttcttcccacaccccaaaggtctgcacattaggtgaactggcatgtctgaattgtccccagtctgagtgagtgcaagtgtatgtgtgatgccaatgggatggcatcctctccagggctggttcccaccttggccttgagctgctgggatggactctggccacctgggactgaataggcaggtaaatcatttacttacttgtttttataagtctttcttaaatgtatgtatagctcatatttatttcagtgtttaatattagaagtgttttggtctgtatttagaagtctggtgtttttgtgaccaggatagatcaaaggaacttaactcttgtttatgtcaattagtgcatggtaaagttggttttgttatatgtcattgtgcttaaagtcacaatttccaagaacctatcaacattaaggacttactgtgtatatgtacatacttgtacatatatgtaatgtttactcatcaaatatttattgagtgcctctttatacaaggcactgtgctggcttccaaggagtatacaaagaagcatgaaacacagaaatctctggcctcaggaagctcgcagtgtagttctataataagagcataagtaaaaataaaacatagtgtttatatgacatagtactttcttagctgattcaggcctcaatacaaagcacattcagcctgctaaaggtagtaaatattaatatgtatcttggcttttggggctaagatgagagttctactgaatcatctatcagtctctaaaatataagaaatatgtcttatttatcttaatagattcttcaggactttatggtttgaacaaatgaatctgtatttcttttaaatatagacttcaaggaaactgttttatatctttctttttttttttttttttccaaatagagataggatctccctctgtcacccaggctggagtgcagtggtgtgatcaaagctcactgtaacctcagacttctgggatcgagagatcctcctgcctcagcctcccaagcagctgggactacagatgcataccaccacacccagctaatttttgtgtttttttatgttttgttatatatgtttgtgtatgtatatatatatatgtatatatatatataaattaaaaaatataaatagagacaaggtctcaccctgttacccaggctggtcttgaactcctgggctcaagcagtcttcctgcctcggtctcccaaagtgctgggattacaggcatgagccaccgcacccagcctcttttatatcttcttcatgaacccaaaaggaagctttttaaagaaccatttttattttagagtccatccctgccttgaggagccttatcaagttggatcaaaatgaaacttgtgtgcctaatatagaactgaaggatgaggacttatctttagaaagtttgttttggtggggatcatcttttttctttattgaggattcttcttccaattacttctgccccatgggcagtaagtagaaaagagtttatcccaattacaatataatattttagagctatcagcaagctaccttcaatttatttttttatctcagtttctgtgtattacaacttaattctgttaaaagacatctttgttcagaatccctccagtagttctagacattccagaatccgtatggaagaagtatggtgtagtggttaaaagaataggctctggagccagcctgctcatactgaaattctgaatctgccactttctttctgtgacaggttactggacttttatttattttcactgcccctaagtagatgtcttaaatgttagagatttgtgaattaattaagtttattctccccactgagctttagagccatggacaagaaccaaaagatgaaatctagcatcttatatttacctaagcacttttcatcaaagacagtgcatgctaacatgtaatatgcacatactacatgcatagaacacatgcactaagtatttccatgcatttttgtatgatgcaaagtagtattcttctttgaaggaacacgaatcccaaaggaaaaaagccaaagttaaaggttacataagagctagaaggagtaaggaaacatggttttctcttgcttcctgcccatggctgccaaacggttctctgaagactgctatgtgacagaagccctttcctttgaaaacctgtcacgtcacaacaagaaaaagatctctttctttggaggtacatttttgggcacaagaaaggctttttaaaatttttttggccatctttttcattgtaggagtctggtgcttgctgcctagtttgggagtagaggaaaagactctggctctttagggggatagagatgggaaaggagcatggcccagctgggtgtattagctctccctccgctgcacttctggaacctttcatataagggcttcaggataagggggttgcatagctttagggtcttatggacatttggaccatttgcttcataatcattttgaactgtttccttaggctctttattgagaaactaccaaaacatcgagattacaaatctgctgtcattcctgaaaagaaagacacagtaaaggtgggtcttcactttcattgttgcccatctaaaagcttcagagcagcacagactgacttcaagataaaagtagtagtctctgcatctgagtaccagatcctgcaataggagataaggccatttcaccacaacagttctgaagtagcaggtatggtacagtagggggtattttaaatcattttgggaaatgttgcagtcaccaacttgacttaagtcttcttttggattctgtaattttctggcattgttctaattctattttctgttttgtgtctcagaaattaaaggagattgcatttcccaaagcagaagagctgaaggcagagctgttaaaacgatataccaaagaatatacagaatataatgaagaaaaggtcagtatataacagctaagaagaaaattattttgcttttttaggctgtgccctgggattgtaatatgacatttcaatatatcctgtgcttttaatgtgctgtttcaccttttttgggcaaagaccagaaactcaaaaaagtagaacaccagtggttaggctcagggttgtaacacagatatagcctatttgtcgaagagagtgacttgagggacagaaaatctgtcgcctacctgctatgtctagagtgagaatcataagaacaatgaacattctctccaaaacataggtttttagatcagagaatttgagggttggattcacatttggttatacctgaagctatttataagaattgacttttcaagctattttttttttttttttttgagacagtctcactctgtcgcctaggctggagtgcagtggcacgatctcagctcactgcaacctctgcctccccgactcaagtgattctcctacctcagcctcccgagtgactgggactacaggcatccgccaccatacccggctaatttttgtatttttagtagagatggggtttcaccatgttggccaagatggtctcaaactcctgacctcaagtgatccgcctgcctcggccttccaaagtgctgggattacaggcgtgagccgctgcacccagccatttcaagctattttcaaatgattctttttaggaagtcagttaaaacatgtggagaaactgccagggcgctgtcagtggccagctgtgaatacatactgcagccactcacaggctgttgtgtagctgtctgctggtctctattctggactctgatgttgaaaatcagcagagggatgaacagctatgaggtatatacttctaaagcaccaagtgagtgtaagctttaaggaggaggttattacttagcatttctttctttctttttttttttaatccaaatgcctctcaagtatttcttattagcttaaaatgtcactctgtgttgaacaaatgcacaaaaaccataaaaatttcagaggcctcattttgggttaaaattcagtagaaggcaagacgtggtggctcatgcctgtaatcctagcactttgggagcctgaagtgggtgatcgcttgagcccaggagttcgagaccagcctgggcaacatggtgaaaccccatctctacaaaaaatacaaaaattagctgggtctctacaaaaaatacaaaaattagtgtggtggcacgcacctctggtttcagctactcgggaggctgagatgggaggatcacctgcgcccagggagattgaggctgcagtgagccatgattgaccactacagtccagcctaggtgacagagtgagactctctaagaaaaaaaaaaaaaattcagtagagacccccaagatagcaggtataagtttggatctggttctattttatagccttacttgaaatatagaatatgtacatgacacagagagaagaataaaactgtctgtgatacaggttaggagaacacagatagtaagttgcatcaagatttcaggccagacattgtggctcacacctggaatcccagcgcttcgggaggccgaggtgggcagattgtttgagcccaggagttcaagactagcctgggcaacatggcgaaaccctgtctctacaaaaaatacaaaaattagccaggtgtggtggtgcacacctgtggtcccacctactcaggaggctaaggtgggaggattgcttgagcctgggaggtcaaggctgcagtgagctgtgatcatgccattgcacttcagcctgggaaacagaatgagaccctgtctcaaaaaaaaaaaaaaaaagatttcagtgaagaggaaagtgcattaggtagagtcattgtcgggagggtattgagaggattgggattttaattgtccttggagataggtatactgtggccagatagaaaggggtggtgactacactccgtgggtataaagatactgaggaaagcatgaattctgtgttaggtaatcaggccacagcagaagtacattttggaaatctccatgctaaaaagccttgttctcctgaagtgtgaagtcactgaggtgtgaagtgttagcctaaattttctctctttgtagaagaaggaagcagaggaattggcccggaacatggcca

SEQ ID NO: 14235 - DNA, 560 bp, Homo sapiens
ggaacctccgggtgtcatccgcggggaaagatgctgcatcccctttttggaattgctcaaccaggtggtaaccggcgccgcttcctggccttgggaggtggttcctttcttaacccacaagaacctctcccaagagaacttggtcctgatgtctgaccatggagatgtgagcctcccgcccgaagaccgggtgagggctctctcccagctgggtagtgcggtagaggtgaatgaagacattccaccccgtcggtacttccgctctggagttgagattatccgaatggcatccatttactctgaggaaggcaacattgaacatgccttcatcctctataacaagtatatcacgctctttattgagaaactaccaaaacatcgagattacaaatctgctgtcattcctgaaaagaaagacacagtaaagaaattaaaggagattgcatttcccaaagcagaagagctgaaggcagagctgttaaaacgatataccaaagaatatacagaatataatgaagaaaagaagaaggaagcagaggaattggcccggaacatggcca

SEQ ID NO: 14236 - DNA, 4818 bp, Homo sapiens
ctctttagggggatagagatgggaaaggagcatggcccagctgggtgtattagctctccctccgctgcacttctggaacctttcatataagggcttcaggataagggggttgcatagctttagggtcttatggacatttggaccatttgcttcataatcattttgaactgtttccttaggctctttattgagaaactaccaaaacatcgagattacaaatctgctgtcattcctgaaaagaaagacacagtaaaggtgggtcttcactttcattgttgcccatctaaaagcttcagagcagcacagactgacttcaagataaaagtagtagtctctgcatctgagtaccagatcctgcaataggagataaggccatttcaccacaacagttctgaagtagcaggtatggtacagtagggggtattttaaatcattttgggaaatgttgcagtcaccaacttgacttaagtcttcttttggattctgtaattttctggcattgttctaattctattttctgttttgtgtctcagaaattaaaggagattgcatttcccaaagcagaagagctgaaggcagagctgttaaaacgatataccaaagaatatacagaatataatgaagaaaaggtcagtatataacagctaagaagaaaattattttgcttttttaggctgtgccctgggattgtaatatgacatttcaatatatcctgtgcttttaatgtgctgtttcaccttttttgggcaaagaccagaaactcaaaaaagtagaacaccagtggttaggctcagggttgtaacacagatatagcctatttgtcgaagagagtgacttgagggacagaaaatctgtcgcctacctgctatgtctagagtgagaatcataagaacaatgaacattctctccaaaacataggtttttagatcagagaatttgagggttggattcacatttggttatacctgaagctatttataagaattgacttttcaagctattttttttttttttttttgagacagtctcactctgtcgcctaggctggagtgcagtggcacgatctcagctcactgcaacctctgcctccccgactcaagtgattctcctacctcagcctcccgagtgactgggactacaggcatccgccaccatacccggctaatttttgtatttttagtagagatggggtttcaccatgttggccaagatggtctcaaactcctgacctcaagtgatccgcctgcctcggccttccaaagtgctgggattacaggcgtgagccgctgcacccagccatttcaagctattttcaaatgattctttttaggaagtcagttaaaacatgtggagaaactgccagggcgctgtcagtggccagctgtgaatacatactgcagccactcacaggctgttgtgtagctgtctgctggtctctattctggactctgatgttgaaaatcagcagagggatgaacagctatgaggtatatacttctaaagcaccaagtgagtgtaagctttaaggaggaggttattacttagcatttctttctttctttttttttttaatccaaatgcctctcaagtatttcttattagcttaaaatgtcactctgtgttgaacaaatgcacaaaaaccataaaaatttcagaggcctcattttgggttaaaattcagtagaaggcaagacgtggtggctcatgcctgtaatcctagcactttgggagcctgaagtgggtgatcgcttgagcccaggagttcgagaccagcctgggcaacatggtgaaaccccatctctacaaaaaatacaaaaattagctgggtctctacaaaaaatacaaaaattagtgtggtggcacgcacctctggtttcagctactcgggaggctgagatgggaggatcacctgcgcccagggagattgaggctgcagtgagccatgattgaccactacagtccagcctaggtgacagagtgagactctctaagaaaaaaaaaaaaaattcagtagagacccccaagatagcaggtataagtttggatctggttctattttatagccttacttgaaatatagaatatgtacatgacacagagagaagaataaaactgtctgtgatacaggttaggagaacacagatagtaagttgcatcaagatttcaggccagacattgtggctcacacctggaatcccagcgcttcgggaggccgaggtgggcagattgtttgagcccaggagttcaagactagcctgggcaacatggcgaaaccctgtctctacaaaaaatacaaaaattagccaggtgtggtggtgcacacctgtggtcccacctactcaggaggctaaggtgggaggattgcttgagcctgggaggtcaaggctgcagtgagctgtgatcatgccattgcacttcagcctgggaaacagaatgagaccctgtctcaaaaaaaaaaaaaaaaagatttcagtgaagaggaaagtgcattaggtagagtcattgtcgggagggtattgagaggattgggattttaattgtccttggagataggtatactgtggccagatagaaaggggtggtgactacactccgtgggtataaagatactgaggaaagcatgaattctgtgttaggtaatcaggccacagcagaagtacattttggaaatctccatgctaaaaagccttgttctcctgaagtgtgaagtcactgaggtgtgaagtgttagcctaaattttctctctttgtagaagaaggaagcagaggaattggcccggaacatggccatccagcaagagctggaaaaggaaaaacagagggtagcacaacagaagcagcagcaattggaacaggaacagttccatgccttcgaggagatgatccggaaccaggagctagaaaaagagcgactgaaaattgtacaggagtttgggaaggtagaccctggcctaggtggcccgctagtgcctgacttggagaagccctccttagatgtgttccccaccttaacagtctcatccatacagccttcagactgtcacacaactgtaaggccagctaagccacctgtggtggacaggtccttgaaacctggagcactgagcaactcagaaagtagtaagtgcatttgctgatgtcctcttccttctcagttgcagccaaacagtatcattctgacggggtcaacctaagattacctccctgatcccactcattaagctttggtcacagaaacccatctgataagtattgctgtactgtgtcctaatacactggctatgttataaaagtggcctttgctgaaacctagtctggtcgattttctgaagagctaatattattcttgaaagtcagactgtcaactttttagtgaaaggaaaagaatgtgccaaaccgaattcataatcctcagataacatcatcagactgctgtgtgactctgtgtcccctgctctgactttgttacctctctagcaattcagatcttgctgttgaatacgcaaaagcagaacatctttcccctcccactttttttttttaaatatgaaaatatagctgtgagagacacttcctaactttagcttgctggctgtctcacagagtttctccatggtgttcagaaactgggtccattcttggcattttttatgagctgctttgttcatgccttttttgggggactacactgtattttttattttgttgtggtttggcatttaacttcttccagaagagtaagttcagaagtaaataactgcccagattgttttccattctcaagaatatacaccagtgtatttcttttaaagtcatactctgatattcttatctgagataaaagagatttaaaattaaaagttcagatgaatgggcagtgtcttagtccattttgtgctgctataacagaatacctgaggctggataatttataatgaacataaatttatttggttcatagttctggagagtggaaagtccaagacccaggggcctggcaaaggccttcttgctgcgtcatcccacgacagaagggtggaagggcaaacaaagatccctcatagcctcatcacctcttaaagatcctacctctcaataattttgcattaggaattaagtttccaaaacatgaactttgggagacacagtcaaaccacagcagggaggttatttttttaattctttgtattagattctgacagaaaattcccaaatgtttcaagaacttgtgtctttttcccccctaaattttattttttacttttattttttaagtttttgtgggtacatagtaggtgtatgtatttatggggtacatgagatgttttgatacaggcatgcaatatgaaataagcacatcatggagaatagggtatccatcccctcaagtatttatcctttgagttacaaacaatccaattacattcttaaggttatttttaagaaaacttttcttaaggtagtagtttgcccttttcttaacttgaataattaaagcctactattttctcttcttgaagtaatgtgctccttacagctgtggcccaagattggagaagacactttacagccctttttttggtgccattagaatgagatccctactcactgcctgaagttgggggaatcccagtggcttaatgttgctcctccagggctgctggctgtgaggtctgcttgaggaggcagggctcagtggtcgcagactattctcctttctcctttacagttcccacaatcgatggattgcgccatgtggtggtgcctgggcggctgtgcccacagtttctccagttagccagtgccaacactgcccgg

SEQ ID NO: 14237 - DNA, 955 bp, Homo sapiens
ctctttagggggatagagatgggaaaggagcatggcccagctgggtgtattagctctccctccgctgcacttctggaacctttcatataagggcttcaggataagggggttgcatagctttagggtcttatggacatttggaccatttgcttcataatcattttgaactgtttccttaggctctttattgagaaactaccaaaacatcgagattacaaatctgctgtcattcctgaaaagaaagacacagtaaaggtgggtcttcactttcattgttgcccatctaaaagcttcagagcagcacagactgacttcaagataaaagtagtagtctctgcatctgagtaccagatcctgcaataggagataaggccatttcaccacaacagttctgaagtagcagaaattaaaggagattgcatttcccaaagcagaagagctgaaggcagagctgttaaaacgatataccaaagaatatacagaatataatgaagaaaagaagaaggaagcagaggaattggcccggaacatggccatccagcaagagctggaaaaggaaaaacagagggtagcacaacagaagcagcagcaattggaacaggaacagttccatgccttcgaggagatgatccggaaccaggagctagaaaaagagcgactgaaaattgtacaggagtttgggaaggtagaccctggcctaggtggcccgctagtgcctgacttggagaagccctccttagatgtgttccccaccttaacagtctcatccatacagccttcagactgtcacacaactgtaaggccagctaagccacctgtggtggacaggtccttgaaacctggagcactgagcaactcagaaagtattcccacaatcgatggattgcgccatgtggtggtgcctgggcggctgtgcccacagtttctccagttagccagtgccaacactgcccgg

SEQ ID NO: 14238 - DNA, 12432 bp, Homo sapiens
gatgaggaatgaatttaccattacccatgttctcatccccaagcaaagtgctgggtctgattactgcaacacagagaacgaagaagaacttttcctcatacaggatcagcagggcctcatcacactgggctggattcatgtaagcaattctgagctgtccgagagttagtctctgcctctcccatggtggtataaatacatgagtgtttctttgaacaaagtcaattatatccagattatttattgtttttctctcttttggatgcagtccttagcatacttgactattgcactttggtattgttttctgggaacacttagggcttttaaatttttttaactttttatttattttttagtaaaaataaactgttttccctaaagttccagtttccctctgagtgtaactggtgatgggatgctggcctagaatataagtggacattgaccttagagactatgcctactgtgtacagatgatgttccttaaaggtatataattcaaaatattttaaatgagccaaggaggttaattcagatgcttgcatttggtctttcttaaagcacctttatataaacaagaagggctataaatacacatgattttcaagtgtctgcatatcttgtgcagccttctggtaatgttcaggtaaaatataatgccttccctaaagattatttttaaatttttctttctattccttttcaacccctcactctcatagcccaagctgcattttatgctgtatgacagagttacaaataaattggcttattcttggattacacatacttgtatgccagaatttgggaaagactgacctgtgaggcagtcccatgtgccttctgtcctttcttctattcaattacattcatgttgatgatttgcctattattgtgtatccccatcccacccccattgtagtagatgggggagagaaaacttgttccttatctgccagggcatacaaatttgagtaaggtatgattttagcctcatgaaggagattaaataaatagacaattaataacttcacctggggcagaacgtgctaaaggccacaagaggtgccagcgaggcactgtggaattcagaggaaggagggaccatgcctgatagggtttagtagaatgttggcaagctgggccaagggcaagttccttaaggagcagacaggtggagaagaggcggactctgtccctggagcactggggggaccagttcactgagatttatggttcatatcaggaaacagtggtagatttttttttttttttttttgagacagagtttcactcttttcacccagactggagtgcaatggcaagatcttggctcactgcaacctccacctcccggattcaagcgattctcctacctcagcctcccaagtagctgggactacaagcgcccgccaccatgcccagctaatttttgtatttttggtagagatgggatttcaccatgttggccagactggtctcgaactactgatctcaggtgatccacccgcctcagcctcccaaagtgctgggattacaggcatgagccaccacgcccggctagatatgttttaatgtagtacattggagccgagttctggagggtctggggtggacaggcagaattgttccactttttagtaagtggaaaattcctaaaggtttttgagtagagcaatgatatgattaaagccatactttagaaaatttaacataaatacagttttaaggtaggttgtggcaaggagatgatttaagaggttagtgtgctgataaagcctaataatgataagagctagggtgatgctagtgtgtttgggaaggaggagatgaatgtaggatttcagaggatttgggaaatgagtaatagaggatgatgactcagagtcaatggtgactcagagatttggggccttgcagtgatcatctcataagcaaaagtaggggatccaggagaaggatttggtttgaaagtggggttcagttctgagcatgttaaatttcaggtattgatgagatattaaatcactggaggtagttatcagccagttggcaatgtagggctagaacttgggagcaaagtcaaagcaggagagagggctctgggaatccactatttagtgctgatcttggaagccctggaagtaggagaagagtctagagcaagaaaaggttcactggcaacttgggggacaggctacctaatgtaacatagaatgtagttagcaatggagcaaagagatgtatgaaaaaggtgagggtagtggtaaggcacagaagccataggaggaggaaggctcttttgttttgttttgtttttgagacggagtctcacactgtcgcccaggttggggtgcagtggcgcaatcttggctctgcaacctccgcctcccaggttcaagtgattctcctgcctcagtgtcctgagtagctgtgattacaggtacccgccactatgcctggctaattgtgtgtgtgtgtgtgtgtgtgtgtgtgtgtgtgtgtatttttagtagactgggtttcactatgttggccaggtgtgtgtgtgtgtgtgtgtgtgtgtgtgtgtgtgtgtatttttagtagagactgggtttcactatgttggccaggctggtctcgaaatcctgaccttgtgatcctcgtgattataggcatgagccaccgcacccggccaaggaaggctttaagaaaaaatttccagatgttaaccatgtcacatcctatggagagctccagaatggtgaagactcggatcggcctggatttgatgaaattattgaggatctcgatttagtgtgttttaggcattaatgggagtagactgtaagagtttaagaactcatagggattaagtttgtggagacaatgaagtatacactaccattttgagcaacttagctctagaggaaaggagaaacatggaatggtggtttaaggagaagttgggttgagagaatgtttggttgattgttcaaagtgaaaggcttgaacatgttttgttttgatgaaatataacacatgtaataagaaagcacacagaaactaaatatatactttaggccgggtgcggtggctcaagcctgtaatcccagcagtttgggagaccaaggcgggcagatcacgaggtcaggagtgcgagaccagcctggccaacatagtgaaaccctgtctctactaaaaacacaaaaattagctggacatggtggcgcatgcctgtagtcccagctactcgagaggctgaggcaggagaattgcttgaaccccagaggcggaggttgtggtgagccaagattacgccactgcactccagcctgggcaacagagcgagacttggtcttgggaaaaaaagaaactaaatgtacactttaacaaatcattaagcaaatatctatgtacatacactacctaggtcaggaaacagaacactgtcaggagcatgcatgccctaagggagggaagtcctcccttccttgcttcgtttataatttcaccacttcaatgtgtatctctaaacactatagtttacttttgcctggcttttacctttttgtaaatggagttataccatatgtatatttgtgtcttgcttcttttgctcaacattttgaaggtttatccacattcttgtgtgtagttttctgaacatgttcttatgcccaatgagccaacaatggagatgtaaaagggcaggagagacaaggtaatgtggtgataaggaaggatcgaatgagaagtacatagagggattcatcttcacagggggaaaaacatccattcctccaagacaagattgaatgaacggaaatgaagatccagagagatttttgaaatgatgtctggaggagttgaggaaacacgttttagacaatcttgacctcaataaggttggagtctaggtctgctgttgagcaagagggagaccaaggaggaattagaaactggaggagatgggggaaagtttagaatcattactgtacagacttcaggtagaacttagctacaaatgaataaaagagttttaagtatcagtgagggtccagttgggaacagatttgaagcctaaattgatagtagttcagcttttttatttttattttttgagatgaggtctcactacattgtttatgttggaatacagtggctattcacaggcacaatcatactgcactacagccttgagctcctgggcccaagtgatcctcctgcctcagcctcctgagtagctaagactacaagcacacaccactgtgcccagctagttcagctttttttcctccatatttctgcaccattccttcctaattcgggattaaaaacaaacaggctgagtatggtggctcacacctgtaatcccagaactttgggaggccaaggtgggaggatcacttgaggccaggagttcaagaccagcctgggcaacatagcaagacctcatctctataaattaaaaaaaaaattatgcatttgtggtggcacacgcctgtggtcccagctacttgggaggctgaggcaggaagatcgcttgagactgggaggtcaaagctgcagtgagccgtgatcacaccactgcactccagcctgggcacctgggcaacagagcgaaaaccctatctcaaaaacaaacgaaaagcagaccgaaagatttattcagatcttaaaattggccagaggaaaatgcaaaagatcagttcttccttcttaaccttgtcaactatgaatcagctgcccaggtcaaaagtatggttatggattgatcaccaactgttgtcaaacctccagcccagaactcaaggcactcctcatcatgtttcagcgctatctgagccatttccctttagggaaaatttccctcttaggtacccaggctgccttcagcattcaccctccttgctcatttctgctccttcggtatattgttttctctttgtcaaagtgccttcctctatccccagcagcatgggcacagtgaacataatgaactattcattcaagaaacttgactgtgaaaggaaggagggagagaaggtacagtagttagagaggagcaggggatcatggcaaagttttttgattctgtttaagagttgtttactgagtccctgcttatgtctctttattatctttctggctacccacgtttgctcccagttagaatcctggactctaaccatgggatggaaggtggtgttggcacaggccactgctctttagcagcctaaaggattatattctcatcaggtagaaactttgtggtcactgaagtccttacatgccccatgaagacttgtgtgtggatttgctgcctgcactgagctaacacgttcctgtcctgaaggcttcttccacagtgagctcatcacagcaccctgtggaatggtgcttctcagatgaggctgcacataagaatcacttagtgagctttcaagaaaaatgttccttcatgatggttctttctaggagtggggtgcaggagtctgggcttttgtcaagctcctcaggagatttgtttttttggacagcaggtttgaaaacgctagtcaattgcatgtctttattgtctgtgcttttctgtcagtgaaggttggttgtctttttgaatcatgctagatctttttccatttttgttacctaagatcacacctcctctaagatgaacataagtcattatatagttgtctgttttgtatataaaatatgtgcttaataaaacaaacaatggaaacaaataatcgggatgcacatttaggtgatattttaactgattaacctcaaattttagcatcgtgttctccttccaaacagaatggtctcctttgtatggtttaactatcaactgaaattcaagtattcccctacctcccatatcttccttggatgatgctttagctacaggacagcctttgcctatagaacctgattcatgtttgaccttttaacacctctgtgggagagaagaatcattcatctaattgtggtttactaagtccttgacttccaccatgttgaaatattgggtatgtaccatctgttccagaatgggtgactcagtggtatgaagagaccttgtaaggaaccaaataagtcttgatggtcagttagaaattatgagtctcttgaaaaaccaaagcctgaatcatccagagagaaacacttcttagaggagatagaagaaattccctagcaaaagttccaagggccactgagtgccattcacaattgttgaggacacccacctaccttgtccatggatgcccatcatgacaaccccattaacacctttgattccatggatccctgggtgaatccaacatcatagtccttgagttcttccaatttggttcaagaacaggagagctagagcaggaaatatcaacaaacaaccccctcttctgtctccaaccctgagatgcaaatgtcttttcctgtctccactcctactgtctggtgatctttgtgcagcaggtatgtgcctgaaggaggtctccaagccagtttctgtgtgctgtcatctgagatggggttccccttgccagttctcacaccccacaagacccaccatactgatctcctggctagcacacaccaaccccagggaagccttttcttcacacttggaacctagatcttgatttccttttgtgaggtcagaatttgtttaactggaatgtggcacagcattgaattcttctgccttgtctattccagcctcagaattctgtttttctcccactttgcagtggtctttgagttttaacactgtggaacagtatctttccccgatgatgccccagatggaaggtttgagttctgtccctgggtcctctccataccctacctgtttaatggcccgatgtcttgatgccttctcgcatcaaggctctgcgcctacagtccttcatccaaccaggaattccagaacccatcaggtaccctagatcttctgaaccagtgggatcagagtccccgttttgagtagtacagagaagaaagttccccctttgtgtttacctccctttttgtctgcctactccagttcccccttccccctgagtgctcaagctgcctaacatcttccactgccttcaaacaagggaagccagaaagttccaagcctcttcgtccacagtttacttttgtccagtacagccttggtgacctctgggagctctctccctgagaaggttgtctgagtgaattagatgaaatgtggtgggtgggttatttggtatgtcatctataaccatgagctaggacggcatgcgcttgcctgggcttaatgctgttactttccattagaaaaagatcaccttatcattcatcagacactctacagaatctcagaattatggttctgcacaatgtaagtgagggcatacatccacctacccaggaactgaagtggaatctcccccaccccacttgtggcatctccccacgattgctcttcagacaaatcctcatctgtttagttgtcattctgctggggacaatgcaatctaagttatttcatttagttattttcatccccttcccctctctcattgtatccttcaccacagacagctcttccagtttccaataattgtttatactccttatttctttttctttttttttgagatggagtctcgctctgtcacccaggctggagtgcagtggcgcgatctcggctcactgcaagctccacctcccgggttcatgctcttctcctgcctcaacctcctaagtagctgggactacaggcgcgtgccaccacgcctggctaattgttttgtattttttttttttttttttttttttttagtagagacagggtttcaccatgttagccaggatggtcttgatctcctgacctcatgatctgcctgcctcagcctcccgaatagctgagattacaggtgcccgccaccacgcccagccaacttttgtatttttaagagagatgtggtttcaccatgttggccaggctggtctcaaactcctgacctcaaatgatctgccctcctcagcctcccaaagtgctgggggttacggacataagcctccatgcccagcctgtttttgttttttctttttttaattgacaaataacaatagtctatatgttttgaaatatgtatgcatatattgtggaatgggaaaatcaagctaattagcatatgcattatgtcacatacttttttgtggtgagaacacttgaaatctactctcttaagcagttttcaagtgtataatacattgtgatgaacagtagtcaccatgttgtatagtaagtctcttgaacttaaaaaaggaaagaaattatgagtctcttcacatactggtattaagcaatatttgtttacagtgctggaaaggagcttccttacttattaggaacctcaggtggacctctcatggttgcagatggcttctcacttacaaaggagattgtgaccagctgttgagaactgtttggctttacttccttcagagaccagacttggttgtatgtcagagtagtcccccccttatcctcaggggatatgagcccagaccccccaatggatgcctgaaatcacagatagtaccaaaccctatatatgctatgtttttttcctatacatgcatacttgcgataaagtttaatttataaattaggcacaggaagagattaacaacaactataataaaacagaacagttataaaaatacagtgtaataaaagttatgtgaagatgatctctctttctcaaagtatgttatcgtatgtaatattttcagattgcagttgatatggatagctttaaacctcagaaagggaatcgcaaataaggagggattaccatatatcctcgctaagagtcctctgactctttttctctcctcagactcaccccacacagaccgcgtttctctccagtgtcgacctacacactcactgctcttaccagatgatgttgccagagtcagtagccattgtttgctcccccaagttccaggagtgagtatagagggcatggttctgggtgtttcaagggggtagtagggaagaaagcctcaggggaaaaggtctctattcttgtggacttgtcctttgtaaaatacatagattataatgtaagttggttattctaaagggcttccttttaagccccatatcatgatttatctatcatgcttgttcaaaaagatatccaagtaacaacttagttgcttttctaagaaaagtctacaagaaatttgaagtgtttgacttgaagcgataggaatgtcaagagttttatgttggattagaaagtttcaaaatcataaaatataaaaaaataaaaaataaaaaataaaaaaatataataaaaaaataaaaataaaaaataagaaagtttcaaaatcaaacacattatctcagaatgcacttctttttcataccaaatcctgtctctactcccactttgattatttactatgaattctccagcaaaactagtgtgatggcagtaatgagtcattctctaactgtgattcattcaccagagaagagacctgtgaggcagcatcctacagaagctgtctcacaatgacctctgccctgctgtgtgagtgtgcatgctggtgtgtgtgtgcgtgcatatgtttgggatggagggacacctttgcttgactcttagcctgccttttttaaatttcagaactggattctttaaactaactgaccatggactagaggagatttcttcctgtcgccagaaaggatttcatccacacagcaaggatccacctctgttctgtgtacgtatctatgtaaaagaaaatggggctatgcttcaagcagggaggacagtcagagctgatgaaatgcatcatcctttctgatccacacagaagaccagctttgtcacttaccttgccagatctccataataaggacgtacatgagaagcagtgtgggacaggaatagatttgaatcttagctttgccactgtgtgcctttgattgggctacttaccgttcctgggcctcagttttcccatctataaaataggcataataataacacctactttatagggttcttgagatgattaaatgaagtaatgtgcaggaagtacgtaatgcagttgctggcttattaaatgttactttttcctttcatcaatgtctctttctaagcctgtacttcaataagagatttgaaggcaaaggaaaagagaagccacttcagataggtaaattaagtatatttgtagaattttgcttaaatcataggggctttacgaccttcctacaaagttcttttttccctatgttgtggtctgtgaataaaaagtttagttgatgataagatcagtatgtttccatttgcccctgcaagctgatttgatggtgttgcattactccatgctggccatggagtattatttcttttgggttcagagaaaagtgagcaatatggaaaagggactaagaaccttgacacttaaaaggacctggagatgcttagaagagaaaccccaggaaggatctgagagctgatttcaagtgttagaagagttgaagtataaaaaaagggattgggtatatttcacgtcactcctagcactaaaacaaagacttcatggaatgatggttttctgctgagcgtgaggaagaactttctgacaaatctgttcaaaaatagatcagtctgccttggaatgtctaagtactaggatgttgaaacaaagactacacaatcagaaaaaaaggtctggggcaccagtgcccatgttttcagttataaaggcccctgttgcatgccaaaagggagcattcttctctcaccatgtgacagtaggtatactttattatttgggtgacatcatagctaaaaaaactgtgatgaattcagtaattcttttaaattaatatatattttagggatgacactatttgttcccaagtttaggaatcaaagaatgagtctagaatgtatatacattttaaaaataaacaaaggtaaatgggcaaacactgattccatctacaggtgggactggtggtagtaatgagtcccagactcttaccacaactaccacttaaatagcagtctggcttccagactgagaaccactagcctagaatgaacattttaaataagggtttttttgtttttgtttttgtttttgtttttgtttgaaacagagtctcgctctgttgccgggctggagtgcagtggtatgatctcagctcactgcagcctctgccccccaggttcaaacaattctgctgcctcagcctctcgagtagctgggactacaggtgcgcgccgccacaccgggttaaattttttttttttttttttttttagtagggtcagggtttcaccatgttggccaggatggtcttgatctcctaacctcatgatctgcccaccttggcctcccaaagtgctgggattacaagcgtgagccaccgcacccagccaaaaagtggttttttaaaatgacttttcaggccgggcacggtggctcacgcctataatcccaatactttgggagactgaggcaggcagattacttgaggtcaggagttcaagtccaggctgaccaacatggcgaaaccccacctctactaaaaacacaaaattagccaggcatggtggctcgtgcctgtaatcccagctactgggaaagctaaggcagaagaatcgcttgaacccaggaggcgggggttgcagtgagccgagatcgtgccactgcactccagcctgggcaacagagcaagaccctatatgaagaaaaaaaaaaaaaagacttttcagaattttctaggactccacctttcttttttcctattgcagagctgcagccacgtgactgttgtggacagagcagtgaccatcacagaccttcgatgagcgtttgagtccaacaccttccaagaacaacaaaaccatatcagtgtactgtagccccttaatttaagctttctagaaagctttggaagtttttgtagatagtagaaaggggggcatcacctgagaaagagctgattttgtatttcaggtttgaaaagaaataactgaacatattttttaggcaagtcagaaagagaacatggtcacccaaaagcaactgtaactcagaaattaagttactcagaaattaagtagctcagaaattaagaaagaatggtataatgaacccccatatacccttccttctggattcaccaattgttaacatttttttcctctcagctatccttctaatttctctctaatttcaatttgtttatatttacctctgggctcaataagggcatctgtgcagaaatttggaagccatttagaaaatcttttggattttcctgtggtttatggcaatatgaatggagcttattactggggtgagggacagcttactccatttgaccagattgtttggctaacacatcccgaagaa

SEQ ID NO: 14239 - DNA, 1012 bp, Homo sapiens
gatgaggaatgaatttaccattacccatgttctcatccccaagcaaagtgctgggtctgattactgcaacacagagaacgaagaagaacttttcctcatacaggatcagcagggcctcatcacactgggctggattcatactcaccccacacagaccgcgtttctctccagtgtcgacctacacactcactgctcttaccagatgatgttgccagagtcagtagccattgtttgctcccccaagttccaggaaactggattctttaaactaactgaccatggactagaggagatttcttcctgtcgccagaaaggatttcatccacacagcaaggatccacctctgttctgtcctgtacttcaataagagatttgaaggcaaaggaaaagagaagccacttcagatagagctgcagccacgtgactgttgtggacagagcagtgaccatcacagaccttcgatgagcgtttgagtccaacaccttccaagaacaacaaaaccatatcagtgtactgtagccccttaatttaagctttctagaaagctttggaagtttttgtagatagtagaaaggggggcatcacctgagaaagagctgattttgtatttcaggtttgaaaagaaataactgaacatattttttaggcaagtcagaaagagaacatggtcacccaaaagcaactgtaactcagaaattaagttactcagaaattaagtagctcagaaattaagaaagaatggtataatgaacccccatatacccttccttctggattcaccaattgttaacatttttttcctctcagctatccttctaatttctctctaatttcaatttgtttatatttacctctgggctcaataagggcatctgtgcagaaatttggaagccatttagaaaatcttttggattttcctgtggtttatggcaatatgaatggagcttattactggggtgagggacagcttactccatttgaccagattgtttggctaacacatcccgaagaa

SEQ ID NO: 14240 - DNA, 13583 bp, Homo sapiens
catggactagaggagatttcttcctgtcgccagaaaggatttcatccacacagcaaggatccacctctgttctgtgtacgtatctatgtaaaagaaaatggggctatgcttcaagcagggaggacagtcagagctgatgaaatgcatcatcctttctgatccacacagaagaccagctttgtcacttaccttgccagatctccataataaggacgtacatgagaagcagtgtgggacaggaatagatttgaatcttagctttgccactgtgtgcctttgattgggctacttaccgttcctgggcctcagttttcccatctataaaataggcataataataacacctactttatagggttcttgagatgattaaatgaagtaatgtgcaggaagtacgtaatgcagttgctggcttattaaatgttactttttcctttcatcaatgtctctttctaagcctgtacttcaataagagatttgaaggcaaaggaaaagagaagccacttcagataggtaaattaagtatatttgtagaattttgcttaaatcataggggctttacgaccttcctacaaagttcttttttccctatgttgtggtctgtgaataaaaagtttagttgatgataagatcagtatgtttccatttgcccctgcaagctgatttgatggtgttgcattactccatgctggccatggagtattatttcttttgggttcagagaaaagtgagcaatatggaaaagggactaagaaccttgacacttaaaaggacctggagatgcttagaagagaaaccccaggaaggatctgagagctgatttcaagtgttagaagagttgaagtataaaaaaagggattgggtatatttcacgtcactcctagcactaaaacaaagacttcatggaatgatggttttctgctgagcgtgaggaagaactttctgacaaatctgttcaaaaatagatcagtctgccttggaatgtctaagtactaggatgttgaaacaaagactacacaatcagaaaaaaaggtctggggcaccagtgcccatgttttcagttataaaggcccctgttgcatgccaaaagggagcattcttctctcaccatgtgacagtaggtatactttattatttgggtgacatcatagctaaaaaaactgtgatgaattcagtaattcttttaaattaatatatattttagggatgacactatttgttcccaagtttaggaatcaaagaatgagtctagaatgtatatacattttaaaaataaacaaaggtaaatgggcaaacactgattccatctacaggtgggactggtggtagtaatgagtcccagactcttaccacaactaccacttaaatagcagtctggcttccagactgagaaccactagcctagaatgaacattttaaataagggtttttttgtttttgtttttgtttttgtttttgtttgaaacagagtctcgctctgttgccgggctggagtgcagtggtatgatctcagctcactgcagcctctgccccccaggttcaaacaattctgctgcctcagcctctcgagtagctgggactacaggtgcgcgccgccacaccgggttaaattttttttttttttttttttttagtagggtcagggtttcaccatgttggccaggatggtcttgatctcctaacctcatgatctgcccaccttggcctcccaaagtgctgggattacaagcgtgagccaccgcacccagccaaaaagtggttttttaaaatgacttttcaggccgggcacggtggctcacgcctataatcccaatactttgggagactgaggcaggcagattacttgaggtcaggagttcaagtccaggctgaccaacatggcgaaaccccacctctactaaaaacacaaaattagccaggcatggtggctcgtgcctgtaatcccagctactgggaaagctaaggcagaagaatcgcttgaacccaggaggcgggggttgcagtgagccgagatcgtgccactgcactccagcctgggcaacagagcaagaccctatatgaagaaaaaaaaaaaaaagacttttcagaattttctaggactccacctttcttttttcctattgcagagctgcagccacgtgactgttgtggacagagcagtgaccatcacagaccttcgatgagcgtttgagtccaacaccttccaagaacaacaaaaccatatcagtgtactgtagccccttaatttaagctttctagaaagctttggaagtttttgtagatagtagaaaggggggcatcacctgagaaagagctgattttgtatttcaggtttgaaaagaaataactgaacatattttttaggcaagtcagaaagagaacatggtcacccaaaagcaactgtaactcagaaattaagttactcagaaattaagtagctcagaaattaagaaagaatggtataatgaacccccatatacccttccttctggattcaccaattgttaacatttttttcctctcagctatccttctaatttctctctaatttcaatttgtttatatttacctctgggctcaataagggcatctgtgcagaaatttggaagccatttagaaaatcttttggattttcctgtggtttatggcaatatgaatggagcttattactggggtgagggacagcttactccatttgaccagattgtttggctaacacatcccgaagaatgattttgtcaggaattattgttatttaataaatatttcaggatatttttcctctacaataaagtaacaattaacttatgtttttgtgcttcagagtgatccatttgatcaagcattgtataaacaggttaaaaaaaaggtatggttgttttggaaaggtgaaggaaaaatggaatttgagatatactgacactgatggtgtgtcccagttcacttttaattactccttgttttttatctgcctgttgccatcttccagaggtgttgtgaagtcatctctgttcttttggtgctgtctcaaatgggtcaaccattcacttcctccttatgccctccatgcttttggctgaggataatgaagcctttgtttggagtaccaggttacactccaataaatgattacatttcccagccaccccaccctaccaatttcattgtgttggctgttcttttctgactaaggcaatacctaggaaaacgcttgaagcagcaattgttactgcaattttctgtgagctgagcctggtgttctaggtggcctagaaataatggtgtcatttgtgacacctcgagtgagggcaggagagtaaatactttggctaggagaagagtgatttattctttatcagaattctaggtgggggagggagaatctgtgaatgcataaagttttcttcatttttaaattttgtctcagtctttattgcttaggttagtggtccttgaacttgtcccctgaaagagcccagttctctatattctttttcttctcttgggttcttaattccccatatagtggaaattccttctttgctgttttggtatgggtgggtctgggggccagctgggcttggacaagccatttcctgctgcagcccagagcagcctggctgttccaccttgctctaaacagtcctgaaattgcccagtcctctgcttttgggaaatccatccccttcttcccattctttgtctaccacttagcttagggctttcttaccttttatttcgactgtagccgttggcttttaccaagtctctttgtttttagcatttcttcattccagtctgttctgcacactttgatcaggagaagcttctcacattccagccatgttcatgttttctctcttgctcaaaaacctgcaatagcttcccattgctgaaaatctaaatttagcttttagtcagaactttccacttaaagttcttacccctggctatatattcaaatatctagggagcaatttaaaaaatactgatgcctgtgttctaccccccaccaattaaagctgaatctctagggtggagcctcagatgttgtttctgcatttgtctttcaagctgctagaattctcaagtacaaccagggttgacaaccactgcattggtctttgatacctaagaattgtgagctctcttatccgtctctgcccaccaaagacattcagccaggtcaacaacatatcatacgttgcaaccacattgatcacagactgatcaccaaactgctatattttcttttctcttcctctaggcacaagatatcttagtggctagatgggtgcaggaaatcagtctgtagatccctcttcatatctgctgcagcctagccactgcagaggcactctgcataggatggtctaagtgtctctgtcttcatcttacctctgtggaggagacgtggaatcaagccagcccacaagccctgagactggataggccggagagaaagaggagtagccagagcggtcgggaaaagaggaaaggaatactgtgggtaaaagggacaaagaccacgcaacctgaggaaagacattgtattgaaagggtaatgactatttggctaaagggactgactcctgggttcccgaggctcaaagaccaggagacttttccactcttgcaagctgcacaagtaccatacttagtgttctgggctgagaggggagacaaaagcatcgtcaggttgccaaacaatgtcccagttgccctgggaggcacaaacctaccaaagtgccataggccaggtgcagagagaatcagaggagctgatttgcttggggtcagagcagagctgggttttttcagatgatcactttcacatactccttgttaaatgggaccaaaggggaagaagaagaaacccttaagcttttgtaatattgtcttgggtaccagataccataaaaggcagcatgagagaaacattcccttgggccagtgtcatggtggattttcttgcttgagaggcaaggatttcagctttcatttggtaccacagaatttaaaattgtaagtgcctatcccttttgactgttgatggcttctttggggttttagttaccccagttgaaagagaaatttttcatattggggttgagaagaatggaggctattaggagcaaagctttaatgagtgaaagtctggtgaatcctgcaattttgatatgtttccagtggattttgagaacacagttttaggaccagagtagatgttgttccctagaaaatagagtcagctattgatattgtgcctcccatccctcatatctcagtgttttaaccccacctgagtttggagaccagtttgtccaaggatctttcaaacatgtgagcccagagtagaacttctgagtcaaggatcatgtctttttctgaggagctttgcttggggcactggaaatcctgtttagatcaggactattggaatattatcctctccaggggaagtgccaggttgaacatttaaggctttgcttctaggcccagctatacattcaccagcaaatcacttaacttcctaaatttctttaaaatctgtaaaatgggatcagtctaatatgcctacctcaaatgatgacagaatgacatctatatgcatatgaggcctacgttagttgaaagatgctataaagatataagggatttgttacttgtctttcttgaaatgttacagttggggtgcggttgcttctatcttctggacctctgcccattcagcatacagctagaggaatctttgggcagatccacattctttagcactagctaggctttgactccaaagctatctggtctaccttgatgttctgagcaggaaaactgaggacctcaagaaccattccaaatttctactcattctccctaagacccagagcagacccaggacctaaagaaattacatcatctctattttcccttggctccagcccactcttgtttgaacctcccacttttgttgttccaactacttcttgagatgaaggaagggcagaacattggccctcttcactgaagtcttcaccccttaatccagggttcaatttttagttcaccttagcctgtttgagattagaagctgggccttaacttacaggtgtgtccggcatcattcaatcagcctgttagatccagaatccagcactgtgacgctacataaccatgggctctgtccttccagttcctttagtgccttccctcactggtaggttcactctgagggcttccttccttgaactccagtggcaactatagtctgtttcccacaatttgttgtgtgtgttttttgttgttttgcagcgttttcatattgtcttttatgtaagtcatgtttctgaactatcgtataaatttcattagggtaagaatcatgtttgctttatgcactgtgtaacatgccttgcagtcagtataggcacttaaccttattgatcagttgttccttggtgttgaataatgtgttaggtagccaggtggacctgtgtcctagcctggagaagctctatgtcaccttgtaggaagccatctgaatttgactcagcatcatatgctgggcctgtgctgcacttgagctttctttccagccgccaggagggatggttgtcctggccaacagcgaatttaatgggtggtcaaaagaagatgtgcctgcatagaaggctgaaagagggagctggaagtaggaggagacaaggagatagtgacaccagtatcttgtcacagaaatcaaggaaggcaacagtttaaaggaggggagggagatcagtggtgccaactggctcagaagaggtttgctgggttaaatctcaagatgagcccatgagatctggtggttagcagaggcctttcctgacaaccccattttaagcacctcttccccatcactctatctcatcactgttactgtctgtgtagccctgtcatgagctaaaatcatcctgtttgtttattgctagcttatgtgtctaaagtatactccttgagaacagcaactttgtctttttcacctttgtactgagtcccctgacatggaataagatatgaataaatgcacagacttgtccaaaatcatccaattaataaatggtaaggctttgcttttttgggagaagtgcaacaaatgtgagcacattttaaatattgatgtttaaagattgtgaaaattaaaaattaacaatcagccgggcatggtggctcatgcctgtcatcccagcaggaggccaaggcgggtggatcacctgaggtcaggagtttgagaccagcctgatcaacatggagaaaccctgtctctactaaaaatacaaaattagccagatgtggtggcacatgcctgtaatcccagctacttgggaggctaaggcatgagaatcgcttgaacctgggaagtggaggttgtggtgagccaagatcacgccattgcactccagcctgggcaacgagcgaaactccgtctaaaaaaataaataaataacaataatagaaggttacctctagaagaaaggcaaatgagaaaaactacatatataatcattcatcttttatttagagatgaacgataatacaatatcacaaattaaaatttctgtaatttctacaaattatacagagaaggaaatttagaactctaaatgctttcattatttaagaagaaagaatcaaaagatatgaattaagcatcggactcaaattagaaaaagaataataaaatatactaggaaaccagggggaaagaaataagtactaaagcagaaattggccaggtgcggtggcttacgcctgtaatcccagcactttaggaggccgaggcgggtggatcacctgaggtcaggagttcaagaccagcgtgacaaacatggagaaaccccatctttactaaaaatacaaaattagccggctgtggtggcacacgcctgtaatcccagctacttgggaggctgaggcaggagaatcgtttgagctcaggaggcggaggttgtggtgagccgagatcacgccattgcgctccagcctgggcaacaagagcaaaactctgtctcaaaaaaaaaaaaaaaacccagaaattaagtaaatgacataagtcatttttatgagcacaatctcataaattgtgtacacacacacacacttcacatcaaaatcaataatatagatgcaaaaattctaaatagaacactaaaaaaatcatcaatctagtaaaggaataaagtatcctaactgccagcatgtattatgcatcctcatgtaggacttgcccatgattccactgctagaaagtgatgagtcggatggcagcccaggtctacctgactctgagagccctgaggcgtttggtgatttttgtccctagaatgtaatggtgacctcattaaaagaaatccactgatataatatatcacaggagtaggtcaaaggaaacaagcagaaacaagagtctctcataaaaaaaaatttttttaagatgaaaatcaacatttattttttattttttaaactcccctagtaaggaaagaaagggccaggcacagtggcatacatctgtgatcccagcgctttgggaggctgaggtgggcggatcacttaagcccagggattcgagaccagcctgggcaacatagtgaaaccctgtctctacaaaaaactagccaggcattggtgcatgcctgtggtcctagctacccagtaagctgaggtgggaggatcacctgagcccagggaggtcaaggctatagtgagctgtgatagcgccactgcactccagcctggacgagggtgagagaggccttgactcaaaaaaagaaaaaaaaagaaagcaagaagcttcgttaacatgataaaataaatcttctaatatataacacccagcgtcatacttaataagcaaacactgctgtcagggacaagatagatccattctaactactattattgaacagtgtcctgaaaggataatctaaccaatgcagtgaagcaggataaagagtatactactggaaagcagacaggtttgggctacaagctaagtatctacctagaaatctgaagataataaattctgaaaaatggtcagacctattaagagaaaggcacaacgatgttcactaaaagatacattttaaaactttgaaaatagcttttcagtacaggtaatagccatttgtgattgggggaaaaaaaatctaattcagcacatagcaactaaaaatataaaatactttggaacaaagttaacaggaaatgtgcaagcctcatatgaagaaaaccagtaagcttttcagaggaacatgaagaaaataaatggaaagacaggcacactatcggtattctatgagagaaagacaatgttttaattttaaagatgctacgtcttctttaatccaaaaatttaaatgcaagtctgctaaaaagtatcattttttaacttgaaagattattctaaaattaatctgagatatgtgaaataacatttaaaaattgaaagaaaaaaagaattttgggggaaatttattaccagataatgcttattataaacctatgctaaatgacgagttaatgggtgcagcacaccaacatggcacatgtatacatatggaacaaacctgcacattgtgcacatgtaccctaaaacttaaagtataataataataaaactttaaaaaataaaaataaaaaataaacctataagttaaagtaatttgatactgaccgaggactagattaagaatcagcaaactttattgttgaaggaagtaagacttagaagagtttaagttgaccaaggccacagaactccaaatgaatagtgtcagactttcaaacccacactcaaccacactgtaatgctgccttcctaaaatatacattaatacatgtattcagaaaaactatgaataagaagtacctaaaaatattaatattagttatctgtaggtgatagaattatgggatgactgttcatttttcccccatatcctttttcgaatttcttcaaatgtactacaaagaacatgtattgcttttataattggacaaaaaggacaataccttctattttcagaaaccgaaacttcattgccccttcaatgtgggaatccagccagaccctattcttggacagcatcagtgaaaggggcttgggaaagctcttgggcgtagcagcagaggcatgtcatatatggaaaccttccatgagggtgacctcaccactggaacccgttcaacataaaccttgctgcaagaactagcagagctctttggacaaaacgtggtgagtggagagctgagaaagaactgacctaaagaagagagaagtgctggtcttacagcatgaagaagtcctgggtacccatctgggcttagcaggcctcctttatgatctattcctagagaaggattacttttcccaacctcagcctccttcaaagaagaactcccaccgtggcccagggttatttctgtctttttttctggacttgcgttagaatgtaggatgtttcttgtgttggacaaatcataatgggttattggtgggtgacagaagtgaaaacattacctagactaaaggaagtaacactattcttagatatccctccataattccctatggttagcttccctatccccagcagcctcctctcttcaccccattttgccttcaaaaaagtgaatggcatcatatcaaagcacaattccatcaaaatatttccatgccacctgcagcaccaggccctgtgccacgttgaacagctcttaacaccctgcttgccacacttagacacctgtgtctagaacttttctcacacagcctagtatacacctttcccatgttgtaggagggtttaaattttattttatattatttttagtagagacgggagtctcactttgttgtccaggctggccttaagctcctggcctcaagcaattctcccaccccagccttccaaagcgctgggattacaggtgtgagccactgtgccttggccaagagtttaaaattatttttaattgaaccatagtaaatgcaggataagtttacacaaatattttggttctcagccacagtgttgttctgtaagcacagggcctatgattatggcctttgagacttcagctggcctatgaggaaaccacataatgaaaatagaaccctgttagttaaaattcttttaattgcggccgggcgtggtggctcatgcttgtaatcccagcactttgggaggctgaggtgggtggatcaccagagatcaggagttcaagaccagcctgtccaacatagtgaaaccccgtctctacgaaaaataccaaaaaaaattagccaggcgtggtggtgggtgcctgcaatcccagctactcaggaggctgagacaggagaatcacttgaacccgggaggcagaggttgcagtgagccgagatcgcatcactacactccagcctgggcaacagagtgagactccgtctcaaaaaaaaaaaaaaaaattcttttaattgcactgacagaaaactcaattaaaactggtgttcaggtacagctggatccagtgtccattgtcatcaaggctaattttttattcatctctaggctcttctatgcttaatgtttgttcatttaattgggtttttcaatgaggtagctttgacagctagaaggttatagcctattgccttggtaaactcagcaagaaaaaaactttttttttgaaacagaggctcgctgtgtcacccaggctggagtgcagtggcgtgatctcagctcaccgcaacctctacctcctgggttcaagtgattcttctgcctcagcctcctgagcagctgggattacaggcgcacaccaccatgcctggctaatttttgtattttttttttagtatagacggggtttcaccatgttggccaagctggtctcaaactcctgacctcaagggatccacccgcctagacctcccaaagtgctgggattacagacgtgagccacctcatctggccaagaaaaagaactttttagttcaacagtttcaacacaatatttggaattgagatattgggtcatggctttggtcatgacttcatccttgaaccaatcactctgaccaggaggatggaatattagccaggcctggatcatgtacccataacccatctacgccacatgcactgagagtggggcagcattcatttccaaagaagaatggtggtggcagaaggggaagtagatgctgggcaggcaaaggcaacagatgtccaccatgcatgcctagaagaaaaaagtgctgttagctttagataatagcagctggacgatggggtagtgaccttctcactcccaaaaaggtgggtcgcacatccaggctgtgggtcattcatttaatttgcatatattgagtacctgctgtgtgcagagcactgttcaaagtacacaagaagtagatgttacgctctctgtcctcaaggagcagataagtaagataaaggagccctactctcacagtgcaagagcaattcatgatcaatgagtgtacgcagaatcatgagcaccaactttatcccgaagtgttgagggaacccaagtgagggagaaatgaatgttctcattttaatttctgtatcttccacttttattcaacaaatatttactgtatgcctactaaattcaagtcccacaggactctagaaacctcgtagaaaggatttcagacagattcctaggatgtgtaaaatatgagaaagagaaaataaattgaaagtgggggaaggatctagaaatcaagtatgcaacaaagtgaattcaggaataaagtaaaacacgtaaaccgtgattacttacattcctaccgtggatgggccgtaggatgtatgatgtaataaataatttgcataacaaacccaacatcaggtagaggggttctgttttcccatagaaatgatggaatctcactaaagcacaagatatggtaaatgtaattctactggaactgtggtgagtgtggggaaggcaacatagtccagctgagacaccgggttgtctgctaactggacctagcctagggatggatttcatcacatctgggagctcaggtggactgcatgcattttaaacaactctgggttgttttctgcactgacattttaataaatatttagtgacagtgagctcagaatcgtatctttggcaagtgcctggggtgcagctgccattctttattgatggctgagtaagatatgaggcgcttaacttttaactcatttttgttttgttttaacacagctcaccaagatggaggaacagagcccatggcccacttactacatggattcccactttacagtggagaaggagcttgcagtaaccacaaaagtttctgtataagcaaatttagggaattgaacttcagacagtgtggttgtctccttacttatgaacttgggaatacttacttaggtaacaactaacatcagaggtttttgatctgtagcctttctttctgtccataattagctaatagcttctgctgtacaaacacaaaccattccctgtccaagaaaattaaactatatcatcagaataagaaagaa

SEQ ID NO: 14241 - DNA, 695 bp, Homo sapiens
catggactagaggagatttcttcctgtcgccagaaaggatttcatccacacagcaaggatccacctctgttctgtagctgcagccacgtgactgttgtggacagagcagtgaccatcacagaccttcgatgagcgtttgagtccaacaccttccaagaacaacaaaaccatatcagtaaaccgaaacttcattgccccttcaatgtgggaatccagccagaccctattcttggacagcatcagtgaaaggggcttgggaaagctcttgggcgtagcagcagaggcatgtcatatatggaaaccttccatgagggtgacctcaccactggaacccgttcaacataaaccttgctgcaagaactagcagagctctttggacaaaacgtgctcaccaagatggaggaacagagcccatggcccacttactacatggattcccactttacagtggagaaggagcttgcagtaaccacaaaagtttctgtataagcaaatttagggaattgaacttcagacagtgtggttgtctccttacttatgaacttgggaatacttacttaggtaacaactaacatcagaggtttttgatctgtagcctttctttctgtccataattagctaatagcttctgctgtacaaacacaaaccattccctgtccaagaaaattaaactatatcatcagaataagaaagaa

SEQ ID NO: 14242 - DNA, 20458 bp, Homo sapiens
gcctccgagcgtggttggactttgaaggggatcggccgccgtgagtgtggggcctgcagcctactctccccgagtcccctgcccggcctgcctcgctcgaggcacccgacggcttctgtctccgcgggctggcgcctgaccagccaggcccagcggttccccgcctactgcatttgaaagatcccgaaaaccctggatgattgtgcctggggttggcaagttcgtcttgagtgccttcaagaagggttcctcaagcagttgtcgatagagccctccctactgtatacgccccctccgctcattcctgctacttcctttctcctcctcgtatttccccctcggtcctttacgccgcctttccccctcatttgcagatgctgcatcccctttttggaattgctcaaccaggtggtaaccggcgccgcttcctggccttgggaggtggttcctttcttaacccacaagaacctctcccaagaggtactgagatgcaacaagcatcctctgtttcagttaactttcatgggccgtggactaggtttactaattacttggggaggttttagatatgcttgcggctttctgagtccctaaggaggcctcgtgagagatggactatctctgcatccctagtagtcctcacggcttttgtgctattagtgagggtgttttagaggggaaggtttgtggaggaattgtgacccgaatattgaagagacctaaagatggaattggctgagagaagactacccctgagggaagagttgtagtagaaaagaaaaactggatagataaatgaaactgaaatgtgaggatgcctgggcggattggaatcctgactgaagcaaaagatctctgttggggagggccagttgccacagggccttgaattccaagatttattctactgtagtttgtgtattctagagcatactgattagggtttgctgtaatgcaatgtgtgtcaaatgcccagttttattttggagatgatagtggtgatatctggttggaatttggaatctgattctaacagcaactatatctagaaagactagaattactggagttttgggacaccaggggtttttgcaatgcaagttaccatcgtgcctttttgttattcagtgtttagtctatgaagatgagtaaatggttgttttcaagatttaagtctcttgccatgataatgatgaatgaatgattttatagattgactatagtggtttagtgagcagagttacaattatgagcattaattcccagaccagttcccctaactcaccttgtgctcaaatatgaaaaaggataccacagaaaatgtcagttactctcagattaagtaaaaatggtcaaccttgaagttagttaacaatcctcaagaaagttcactgagtgcactctgccaggtactggggtggaggtatgtgggtatctggaaggagaaataatagaaaataaaagatgctgttcccacttttacagtgctgtgggcggagccccctaatggcaaaggatttgattaacttgaactgaacctttggttggtccactgtggttctactccttataccacctaattatggtacaggggttgtatgttttctagtctgccagtactctcatcgttgtgatttgggcttccttgagggtctcagccttcttgtaggaaagtccttatttaataggagccacagcatttggtatgtttctcttatattttcttcttaaggtagaggtctgtgagataaactgtaaaactgctgggatgatgagggcaacggtattgatgccatctgttttttctgtctcagaacttggtcctgatgtctgaccatggagatgtgagcctcccgcccgaagaccgggtgagggctctctcccagctgggtagtgcggtagaggtgaatgaagacattccaccccgtcggtacttccgctctggagttgagattatccgaatggcatccatttactctgaggaaggcaacattgaacatgccttcatcctctataacaagtatatcacgtaagacacctacagtttcctttttcctttctggtgactggtgcctcgcctatttggctcagaattgctaaaaccacagaacttcacaatatcatcaacattaatcatttttgctggcaactcctacatattggctgtccttgccgttcaaagacatgagtgctgaaggtgttattttcatgactcagtaatttatgagtaagagatttagttctttggcctatgcccacatagcccagctgttagacaaaagagttggtggttaaactagacatattatgttctgatgaatgcttttactgttctctttctactaaagcagccaatcataggattattgttggggtctagcagagccaaaattcctcacttgtacttattttgtagcaaatttagtgatacaggaaaaaattttttcctcttaacctttatcataatcatgcaaatcatcaaataattagtaactgcctacagtttgtgtggctcatcataataagacctttcccttaagttatttatcatcttagggtaggcagcataagtagaagatttcagtactattaacagcaaacaacttctaaaactccattgacaatgatacataatttagaaaggaaataatgttaaaggtcttatttatcatttctaatcttgttctttcacaatatcaggactttttaaaaaataattataatgtatttggttctgagtagctcatagtgtgtttcacctgcataatttcatttgatcttcacagttctgtgtgcatggaatagggtacactaccctacattctacatatgaggaaacaaactcagtgtttggtggatgctcatgtttgaagtgacaaaaccttggttttctgactcctaattcaggatttgttctacaacataggtcctgttcttcttgttttccatttagtaatgttctagagtcagaggtagtcttttgagatcatagtcatgagccacactggctatttttttgttatttattttactactgatttttgagtaggtaacatatatatatatatatatatatatacacatatatatggtgcacaattcagaggcacaaaagaataactatagttaaaaagtaagtcttggccaggcgcagtggctctcgcctgtaatcccagcactttgggaggccagggcaggcggatcacctgaggtcaagagttcaagaccagcttggccaacatggcaaaaccccatctctactaaaaatacaaaaattagtcgggcatggtggcgtgtgcctgtaatcccagctacttgggaggctaaggcaggagaatcgcttgaaaccaggaggcagaggttgtagtgagccgagatcgtgccactgcactccaggactccagactaggtggcaaagcgagactgtttcaaaaaaaaaaaaaaaagtctccccacccactcctcttttccccccaaaccctcagtgcttctccccagagacaaccactcttagtagtttcttagatatcttccaagagatgatatacacataccagttttatcacattaagtttttgatcacatactcctctaaagcagggcttttcaactttggccctattgaccttttggactgaatcattatttgtggtgggagctgtcctgtgtgtcacagaatgtttagcagcatccctggtttctgctcaccagatgccagtatcccccctccccgcagtgtgacaaccaaaaatgtcaccagacattatctgatgttctcccaggggcagaatcacctctgagaaccagtgctccaaaggaaagtatgcggaagaatggactgtctaggattcatattgtaattgtagagtggagaaatgggactgctattgtcttttttatttagaagtgttgcctgtgttaagaggagaaaaccttagacaagttaaatttaacagagtttaatccagtagaaaaaggttcagggaacactcaggaccaaaagtggtgcagaatgttccaccccatagtggaggttgtgcaggctatatttatagtcagagaaaaggaaatgagatacagaaatagcctgattggctacagttatgtgtttgccttatttggtcatgttttggcaggctttagcctccaattggctggaggtttcagctgctatgattggctgagactcagctatttgttacacttgtaacctaactcttatgttaagttacagtttgtttatacattaaattaggttacagttcactatctttggaggcagctttaacttaacacctgtttccttaaagatctgtagttctttaatgccattatgtcatgtcatgtggcctcaatgttgttaaggtttcataaaattataattatatttctgcttctgtttgctgttatgagtttttcattcctaggcacactatttattttcctgcacagtttttttgaccctgtcttctttatatattcttggtagaaagaatattcttatgtatttcctataagcttgtagattgttctctcagaatgaaacccaggggcacaattcctttggagaaacactaattcagaaagttcagtagaatcatggaatcactgcaccaggtatttcctgaagggccttcagaatcctattgccccacaatagaaagggctttcagggcaaagaccatattcattcaacacatgtatattgagtatacctgctgtctacatggcactgcactaggtcctgaacagcagtgagtaaaatggcccctgtccttattggtgttcctttataggtatgggagaagacaataaacagataagcaaataaatacagctgacccctgaacaacacagaggttagcaccaatcccccatgcaatcaaaaatatacatatggtcaggcacagtggctcacacctgtaatcccagcactttgggaggccgaagtggatggatcacttgaggtcaggagttcaagacaagcctcgtcaacatggtgaaaccccgtctctactaaaaatacaaaaattagcctggtgtggtggcgggtgcctgtaaccccagccacttgggagactgaggcaggagaattgcttgaactcaggaagtggaggttgcagtgagccgagatcacgccactgcactccagcctggggacagagcaagatcatgtcttaaaaaaaaaaaaaaaaaaaaaaaaaaaatatatatatatatatatatatatatatatatatatatatatatatatataaagtttttgactccccagaaacttaactactaatagcttactcttgactggaagccttattgataacatggtcagttatcacatactttatatattgtatgtattatgtactatattcttacagaaaagtaagcttgagaatagagaatgttattaagaaaatcataaagaatagaaaatatagatactatttgttaagtggaagtggatcattatgaaggtcttcatcctcgtcatcttcatgttgagtaggctgaggaagaggaggggttggtcttgctgtctcaggggcggcagtggcagaagtaaatccgtgtataaatggacccacaccattgaaacccatgttgtccaaaagtcagctgtagtcgaaataaggaaaatacttaagagtactgtgatagagaataagcaggggtttatgactagagtagtcagggtaaggtctgtctgagaagacaagatttgagctgagacttgagggatgcaatacagttggtcattccaagagcatagggcagagcattaaaacacaggtaactatgtgtttagaagtgcttagatgggaaagaccttagcatgttctggggattgaaagatcattgtgtttggagtatagccagagaaaagcaagatgactccaggtaaggctggagaggcaagtggggctggatcatgcaggactttatgggccatggtaaggagtctgttttttatcttgagggtaacagcaagccattgaaaagttttaagtgggattcagacctaaatttacttactgttttttaaaagagatgaggtctcggccgggcacagtggctcacgcctgtgatctcagcactttgggaggccaccctggagttcaaggccagcctggccaacatggtgataccccatctctactaaaaatacaaaacttagccgggcgtggtggcccacgtctacaatcccagctacccgagaggctgaggcaggagacttgcatgaacccgggaggcagaggtttcagtgagccaagatcgcggcactgcactccagcctgggtgatagagcgagactcggtctcaaaaaaaaaaaaaaaaaagagatgtcactaatgttgcccaggctggtctcgaactcctggatgcaagcgatcctcccatctcagcctcccaaagtgctaggattacaggtgtgagcctccatgcccaatcaatatttaaagtataaattttggcagttgtgtggtaaatggtggagcaagcgttaagagaaggcagggagagtagttaggaaattcttgcaggctggtggcttgaagtagtgtggcaacatggaaagagacagatggatttggtattttggaggtcaggtccataggacttactaatcacttaggaaaaaagatactgcggaggttgatgtcgtgtttctgccttgaacaacttaaacgatagggtagtccatgtattgagatgggaaaagccctctaaagagggctgggtagcgggggaatttaaccgttcacgtttggggtttttttgacatgttaaaatttgagatgcctgtgagatatccaagtagagatgtcaagtgggaggttgaatgtaccagtctgaactcagaagactgaggtctgggctggaaatacagacaagggagtcctcagcatacagatggttctgaagtcatgagaatggctgagattttctttttctttttttttttctgctgtagaaattaattttattcttattcagactattttcaaaagaagcagtggtgcgctgtttttctaaaaatacgcctttagagatttttatatatgtatataataaaatccatacatgtatttacatgattgctacatacaaaattacagcactgtggtatgtacacatctacaggtacattctttccacacatccctgctgtgctttccccgtgtgaaggagggagactgaatcagttgtgagcagccaagggctggcccgtcgtcggaacctccgaatgggggctggggtggaggaggtgaggcgattgccgaggcaggagcagcagctgttgcagggctctcctgcaggccagcaggcagcatctggaggctcccggcagcctccccctcccctccaccccgtggtgcccgcgctgccctcaaggtggggtggctgaccacagacccctctggtgccattctgtggcctagacttgcttggctgggccaagaagttgtgtatgtgaggggtggaggagggagctgtgggaggaatagaccctgtccagccccagccctgagcaggggaaagggctggatggctaaagcctgcagatgactggtgagaacactccgcttggcccggcactgctaagggtcagagactagaggctgggagggagagcagtggccgccggctggggaacagggccttcttcctccctggggctcagagggtggcctcagctgagcttgagtaagcccagctcttaggccctgcggccagaggcttggcctcctgccagcagaggtgcatgcacactggggaggggctgccatctccacttcaacccctgggccaggggctggggaagaaatggaggcttaggcctggcctgctgccctgtaggactaggtccccggggctcaggattcctgaggcatgcagagaagggcctgagaatgcctgagattttctagtgaaggggctcttaatctggggtccaggaacctcacagagattcattgatagaattcaggggatctgtgaaccggaataggaaaaacttttcttgttttttctaaccagtgactgaaatttagcatttccttccattttgaatgtaggcctcaaagtacagtagtagtaatatttgtaattttgtcaccagtagaaatcaagatattttcatattgcattacagttgttgctgacatctcaaaatagcatctaaacatcactacttcagaattacagtacagaattattagacctacagctagatcccattatcaaatgcattgataaagaacacattaggccgggcacagtggctcacgcctgtaatcccagcactttgggaggccaaggctggcggatcacgaggtcaggagatcgagaccatcctggctaacatggtgaaaccccatctctactaaaaatacaaaaaataagcctggcatggtggcaggtgcctgtagtcccagctactcagaaggctgaggcaggagaatggcgtgaacccgggaggcggagcttgcagtgagccgagatcgcgccactgcactccagcctgggcaacagagcgagactccatctcaaaaaaaaaaaaaaaaaaaaaaaaaaaagaacacattaatacagaagaatatatcacaatttttaaaatttttgaaaactgtttttccataaaattggggtattcttggtaatcctttgtactttaagttataccttaaaaaaattgttctgaaaagggtccataggcttcaccagatgccagaaggatccatggaacataaaagatcaagtatctttgttaataaggctagggaatgagaagagaaggagcctaggactgagccctgaggttagttaatggagggagagtcaataggggagactttctttgaagggaggttcaagaggcaggaggaaatccaagagagaatggtgttgtgtcatgggagccaaaataaattagtgtttgaaaaaggagagtagccacctatgtcagatgggtgaagacagaagattggcctttgggtttggtaagatgatgtcatgggtgatcttcataagcaatttcgctagaaggattacagagaccctaattagaacgggtagaaaggtgaatggacagtaagaaagtggaggcaaagggtatagacctgaaagtggcaaatttttttctataggggaccagagagtaaaaatttttggttttgtaggctacttgctgtgtctgtgactacctctgctttatagtgtgaaagtagccatagacaacacataaatgaatggatgtgactggttccaatgacactttatttacaagaacagatggctagctggatttggcacaccagctgtagtttgccaaccccggtatagacaactctttggagaagtttagatgggaagggaagtagaaaaatggggaagtagttgatgggggacaaggagcgtgtgaacatgtgtatgtattttaagttaggagattttagagcatgtttttgctgatggaaaaggatcttatggaggaggagaggctaacagtccagaagagagcttagctgtactaataaactcctcagaagtcaagaggggataggattaagagtacatggatgcctaaggaattgttttttatgacacttagtgttattttgagtgacatattagtgttaacagcaagactgatatggggagtttgtccctgtcacttataggaccacttaaaatgatgaactactaggagagttggtgcggatgagatttagcagctcatttacttgatttgtgggatttagagtttaatttggaattttgttgtattggccttacctgaagtaattaatgtagctaccttcacttttcttggagatacctttaaaatcttgattctgattctgattctgtgaacagaaaatcacagcaattgcaaacaaattctagctcactgattctcagtctgttttctgttgtattttacttagtacattcctatcaataacagtggctcagctttggcagttactacaaccgaggagaaaagagaggggagtatacatctgcctcaccactcctctgcctcccctactactgagaatcattgttctagaccttttgtggatactttctttacttcagggttttaaaaggcatgtttgttccttttcctggagcagttcaggcatcttaatgatctcaggcatatttcccccctcagtagcttccctaatgtaggaatgctttgccttttgcagaccccagtatagaagaaagagttcagcatattaaatcagtacatattttcatgatgagcgcagacaataaaccaggcagtggattctttcacagctttttatggtcatcaactaggctgcccagaagggagtgagagtattcaggcaattcctgtgtgctatgtgagcctcctggaacaccaaccctttttctgaaaatgaactgtcacctgtgttgaaaatgtttgctgggattggggtttatagactgaagaaggttccatctgtgatcatgcttaccatgctgagtaacttttaagactggaagaatcgagatgaggatccttaatgcatccatgttaaagaacctttgcttgactttttgaattagttgttttcatacaaaattaacacttattcacgatttaaaaaatttttcaaacactacaagggagatattaaagtgaaaagagaagtctcatctatcagaggtggccactattgtatttctggcatggatgaggtgtgattaagctcataggtgcccccatgtgtccttttccttaaagcatcaatgggatcttaccacgtattctgttctgcgacttgctttcttcacagtagtgtctttccatatcaggacatactgagccatctcattctgcctcagagctattccatctgcctggaacatgaatctggaacagtcccagattcatggctcactcttgtctagtccttactcaaatgcctccttcttaatgatgacttccttagctgctgtatctaaaatttcaaccattcccctatccctttctatcccccttccctattaatgactttcctagcatacttctgtttattgtctgttcccccattgtaatgtatactctatggtggggaggaatatttgactgtgttgttcactgccatatccccaacctttagaataattctggaccctgtagtagatgctcagtaaatattcactgaatgaatgggtgaatgattacattgtcttcacatttgaatgcacattattttttaaacaatcccctattgatggacatttaggggtttgttttttttttttttttcagttttttctactttttaaaacaatgctgtattgaatatttttatacatatatctttgtactgttttataatgatctctaggataaattcctagagatagaattgtgagtttaaaggatatacacattttaagttggatgcggtggctcacgcctgtaatcccagcatttcgggaggctgacgcgggcagatcacctgaggtcaggagttggagaccagcctggtcaacatggcgaaaccccatctctactaaaaatacgcaaattagctgggcgtggtagcaggtgcctctaatcgcagctactcgggaggctgaggcaggagaatcacttgaacctgggaggtagaggttgcagtgagccgagactgccccactgcactccaaccagggcggcagagcaagactctgtctcaaaaaaaaaaaaataaataaatcaaaaaaaaaataaatagtacaaattaaaaataaaggatatacacgttttaaattttgaataattagcttccattttccctcccttaagatgaaaggttatattaatttacaatcttgctaacactgtatgggtatcccatttctctataccaggtatgatcaacctttaagtcccatttctctaccaggtataattaacctttacgcctttgccaatccgatggatgaaaatggtatctcatcctaatttgaatttctttaattatgagtggattcagcattattgcatatattcatcttttgtatttacttttctgcttatgtcttcttttttcattgtttattgggtcattttgcttgtgtttttgcaatcatatctttgtttgctttggtacctttcctctctccaggcttcaaccagatataaccccagagaacagtatacatctgggccaccgctttctatccttagaaagtttctagggatagaactttgaaccatgtaatggagtctagtttataagtaaagaaaaaactcccaaacctgtatatgatgctggtgttagcatcttcatctcttattcttgctcacattttttgtttattagttaaaaaaaatcatagaaacccatagcaaatattgactatgttctagataccgtgtttagcattttattatctctttaagtgtcacagcaagcctgtcagggagtactagtttgtctccatctctacaattttatggacaggatatcagccatgtccaaccctttgaatgcaaggacttttttgcttatctatggtagcagatatcacctttttaaaagttcattagctagttagtgttagtgtattttatgtatggcccaagacagttcttcttccagtgtggcccagggaagctaaaaggttggacacccctgcaaaaaactgagggatggtgagattaagtgacttgcccaaggtcacatagctagtaaatggcaaaaccaggatttgagcccaggcacagtggctccagagccagccctactaaccactaagttcttttacctccagtatgagtaatggggtatgttgcccattgtctgtttcaggagacctttttgcccatctatccccattcagaaaactggctacagttgttgaagcaagggaaagctattcatgtacaggtctgggaggttttttttgtttgttttttgtttttgtttttttacttataaactagatttccattacatggctcaaagtcaaagtaatataaagaggtacttggtgaaaagtttcacacctactcttatctgttctattacccctgccctcatttctgtgtatacttcctgtttctttgtatacttacaaagcaaagtaaataaatacggcaggctaaatacggcaggttgtcaaataatgtcgttttgtccaatgtcgttttgttttaatgttgatgagaaaagaaaaatccattcctgcctggggccactgtctgtgtggagtctgcacattctccccatgtctgtgtgggttttctccgggtattcaagtttcttcccacaccccaaaggtctgcacattaggtgaactggcatgtctgaattgtccccagtctgagtgagtgcaagtgtatgtgtgatgccaatgggatggcatcctctccagggctggttcccaccttggccttgagctgctgggatggactctggccacctgggactgaataggcaggtaaatcatttacttacttgtttttataagtctttcttaaatgtatgtatagctcatatttatttcagtgtttaatattagaagtgttttggtctgtatttagaagtctggtgtttttgtgaccaggatagatcaaaggaacttaactcttgtttatgtcaattagtgcatggtaaagttggttttgttatatgtcattgtgcttaaagtcacaatttccaagaacctatcaacattaaggacttactgtgtatatgtacatacttgtacatatatgtaatgtttactcatcaaatatttattgagtgcctctttatacaaggcactgtgctggcttccaaggagtatacaaagaagcatgaaacacagaaatctctggcctcaggaagctcgcagtgtagttctataataagagcataagtaaaaataaaacatagtgtttatatgacatagtactttcttagctgattcaggcctcaatacaaagcacattcagcctgctaaaggtagtaaatattaatatgtatcttggcttttggggctaagatgagagttctactgaatcatctatcagtctctaaaatataagaaatatgtcttatttatcttaatagattcttcaggactttatggtttgaacaaatgaatctgtatttcttttaaatatagacttcaaggaaactgttttatatctttctttttttttttttttttccaaatagagataggatctccctctgtcacccaggctggagtgcagtggtgtgatcaaagctcactgtaacctcagacttctgggatcgagagatcctcctgcctcagcctcccaagcagctgggactacagatgcataccaccacacccagctaatttttgtgtttttttatgttttgttatatatgtttgtgtatgtatatatatatatgtatatatatatataaattaaaaaatataaatagagacaaggtctcaccctgttacccaggctggtcttgaactcctgggctcaagcagtcttcctgcctcggtctcccaaagtgctgggattacaggcatgagccaccgcacccagcctcttttatatcttcttcatgaacccaaaaggaagctttttaaagaaccatttttattttagagtccatccctgccttgaggagccttatcaagttggatcaaaatgaaacttgtgtgcctaatatagaactgaaggatgaggacttatctttagaaagtttgttttggtggggatcatcttttttctttattgaggattcttcttccaattacttctgccccatgggcagtaagtagaaaagagtttatcccaattacaatataatattttagagctatcagcaagctaccttcaatttatttttttatctcagtttctgtgtattacaacttaattctgttaaaagacatctttgttcagaatccctccagtagttctagacattccagaatccgtatggaagaagtatggtgtagtggttaaaagaataggctctggagccagcctgctcatactgaaattctgaatctgccactttctttctgtgacaggttactggacttttatttattttcactgcccctaagtagatgtcttaaatgttagagatttgtgaattaattaagtttattctccccactgagctttagagccatggacaagaaccaaaagatgaaatctagcatcttatatttacctaagcacttttcatcaaagacagtgcatgctaacatgtaatatgcacatactacatgcatagaacacatgcactaagtatttccatgcatttttgtatgatgcaaagtagtattcttctttgaaggaacacgaatcccaaaggaaaaaagccaaagttaaaggttacataagagctagaaggagtaaggaaacatggttttctcttgcttcctgcccatggctgccaaacggttctctgaagactgctatgtgacagaagccctttcctttgaaaacctgtcacgtcacaacaagaaaaagatctctttctttggaggtacatttttgggcacaagaaaggctttttaaaatttttttggccatctttttcattgtaggagtctggtgcttgctgcctagtttgggagtagaggaaaagactctggctctttagggggatagagatgggaaaggagcatggcccagctgggtgtattagctctccctccgctgcacttctggaacctttcatataagggcttcaggataagggggttgcatagctttagggtcttatggacatttggaccatttgcttcataatcattttgaactgtttccttaggctctttattgagaaactaccaaaacatcgagattacaaatctgctgtcattcctgaaaagaaagacacagtaaaggtgggtcttcactttcattgttgcccatctaaaagcttcagagcagcacagactgacttcaagataaaagtagtagtctctgcatctgagtaccagatcctgcaataggagataaggccatttcaccacaacagttctgaagtagcaggtatggtacagtagggggtattttaaatcattttgggaaatgttgcagtcaccaacttgacttaagtcttcttttggattctgtaattttctggcattgttctaattctattttctgttttgtgtctcagaaattaaaggagattgcatttcccaaagcagaagagctgaaggcagagctgttaaaacgatataccaaagaatatacagaatataatgaagaaaaggtcagtatataacagctaagaagaaaattattttgcttttttaggctgtgccctgggattgtaatatgacatttcaatatatcctgtgcttttaatgtgctgtttcaccttttttgggcaaagaccagaaactcaaaaaagtagaacaccagtggttaggctcagggttgtaacacagatatagcctatttgtcgaagagagtgacttgagggacagaaaatctgtcgcctacctgctatgtctagagtgagaatcataagaacaatgaacattctctccaaaacataggtttttagatcagagaatttgagggttggattcacatttggttatacctgaagctatttataagaattgacttttcaagctattttttttttttttttttgagacagtctcactctgtcgcctaggctggagtgcagtggcacgatctcagctcactgcaacctctgcctccccgactcaagtgattctcctacctcagcctcccgagtgactgggactacaggcatccgccaccatacccggctaatttttgtatttttagtagagatggggtttcaccatgttggccaagatggtctcaaactcctgacctcaagtgatccgcctgcctcggccttccaaagtgctgggattacaggcgtgagccgctgcacccagccatttcaagctattttcaaatgattctttttaggaagtcagttaaaacatgtggagaaactgccagggcgctgtcagtggccagctgtgaatacatactgcagccactcacaggctgttgtgtagctgtctgctggtctctattctggactctgatgttgaaaatcagcagagggatgaacagctatgaggtatatacttctaaagcaccaagtgagtgtaagctttaaggaggaggttattacttagcatttctttctttctttttttttttaatccaaatgcctctcaagtatttcttattagcttaaaatgtcactctgtgttgaacaaatgcacaaaaaccataaaaatttcagaggcctcattttgggttaaaattcagtagaaggcaagacgtggtggctcatgcctgtaatcctagcactttgggagcctgaagtgggtgatcgcttgagcccaggagttcgagaccagcctgggcaacatggtgaaaccccatctctacaaaaaatacaaaaattagctgggtctctacaaaaaatacaaaaattagtgtggtggcacgcacctctggtttcagctactcgggaggctgagatgggaggatcacctgcgcccagggagattgaggctgcagtgagccatgattgaccactacagtccagcctaggtgacagagtgagactctctaagaaaaaaaaaaaaaattcagtagagacccccaagatagcaggtataagtttggatctggttctattttatagccttacttgaaatatagaatatgtacatgacacagagagaagaataaaactgtctgtgatacaggttaggagaacacagatagtaagttgcatcaagatttcaggccagacattgtggctcacacctggaatcccagcgcttcgggaggccgaggtgggcagattgtttgagcccaggagttcaagactagcctgggcaacatggcgaaaccctgtctctacaaaaaatacaaaaattagccaggtgtggtggtgcacacctgtggtcccacctactcaggaggctaaggtgggaggattgcttgagcctgggaggtcaaggctgcagtgagctgtgatcatgccattgcacttcagcctgggaaacagaatgagaccctgtctcaaaaaaaaaaaaaaaaagatttcagtgaagaggaaagtgcattaggtagagtcattgtcgggagggtattgagaggattgggattttaattgtccttggagataggtatactgtggccagatagaaaggggtggtgactacactccgtgggtataaagatactgaggaaagcatgaattctgtgttaggtaatcaggccacagcagaagtacattttggaaatctccatgctaaaaagccttgttctcctgaagtgtgaagtcactgaggtgtgaagtgttagcctaaattttctctctttgtagaagaaggaagcagaggaattggcccggaacatggccatccagcaagagctggaaaaggaaaaacagagggtagcacaacagaagcagcagcaattggaacaggaacagttccatgccttcgaggagatgatccggaaccaggagctagaaaaagagcgactgaaaattgtacaggagtttgggaaggtagaccctggcctaggtggcccgctagtgcctgacttggagaagccctccttagatgtgttccccaccttaacagtctcatccatacagccttcagactgtcacacaactgtaaggccagctaagccacctgtggtggacaggtccttgaaacctggagcactgagcaactcagaaagtagtaagtgcatttgctgatgtcctcttccttctcagttgcagccaaacagtatcattctgacggggtcaacctaagattacctccctgatcccactcattaagctttggtcacagaaacccatctgataagtattgctgtactgtgtcctaatacactggctatgttataaaagtggcctttgctgaaacctagtctggtcgattttctgaagagctaatattattcttgaaagtcagactgtcaactttttagtgaaaggaaaagaatgtgccaaaccgaattcataatcctcagataacatcatcagactgctgtgtgactctgtgtcccctgctctgactttgttacctctctagcaattcagatcttgctgttgaatacgcaaaagcagaacatctttcccctcccactttttttttttaaatatgaaaatatagctgtgagagacacttcctaactttagcttgctggctgtctcacagagtttctccatggtgttcagaaactgggtccattcttggcattttttatgagctgctttgttcatgccttttttgggggactacactgtattttttattttgttgtggtttggcatttaacttcttccagaagagtaagttcagaagtaaataactgcccagattgttttccattctcaagaatatacaccagtgtatttcttttaaagtcatactctgatattcttatctgagataaaagagatttaaaattaaaagttcagatgaatgggcagtgtcttagtccattttgtgctgctataacagaatacctgaggctggataatttataatgaacataaatttatttggttcatagttctggagagtggaaagtccaagacccaggggcctggcaaaggccttcttgctgcgtcatcccacgacagaagggtggaagggcaaacaaagatccctcatagcctcatcacctcttaaagatcctacctctcaataattttgcattaggaattaagtttccaaaacatgaactttgggagacacagtcaaaccacagcagggaggttatttttttaattctttgtattagattctgacagaaaattcccaaatgtttcaagaacttgtgtctttttcccccctaaattttattttttacttttattttttaagtttttgtgggtacatagtaggtgtatgtatttatggggtacatgagatgttttgatacaggcatgcaatatgaaataagcacatcatggagaatagggtatccatcccctcaagtatttatcctttgagttacaaacaatccaattacattcttaaggttatttttaagaaaacttttcttaaggtagtagtttgcccttttcttaacttgaataattaaagcctactattttctcttcttgaagtaatgtgctccttacagctgtggcccaagattggagaagacactttacagccctttttttggtgccattagaatgagatccctactcactgcctgaagttgggggaatcccagtggcttaatgttgctcctccagggctgctggctgtgaggtctgcttgaggaggcagggctcagtggtcgcagactattctcctttctcctttacagttcccacaatcgatggattgcgccatgtggtggtgcctgggcggctgtgcccacagtttctccagttagccagtgccaacactgcccggggagtggagacatgtggaattctctgtggaaaactgg

SEQ ID NO: 14243 - DNA, 845 bp, Homo sapiens
gcctccgagcgtggttggactttgaaggggatcggccgccatgctgcatcccctttttggaattgctcaaccaggtggtaaccggcgccgcttcctggccttgggaggtggttcctttcttaacccacaagaacctctcccaagagaacttggtcctgatgtctgaccatggagatgtgagcctcccgcccgaagaccgggtgagggctctctcccagctgggtagtgcggtagaggtgaatgaagacattccaccccgtcggtacttccgctctggagttgagattatccgaatggcatccatttactctgaggaaggcaacattgaacatgccttcatcctctataacaagtatatcacgctctttattgagaaactaccaaaacatcgagattacaaatctgctgtcattcctgaaaagaaagacacagtaaagaaattaaaggagattgcatttcccaaagcagaagagctgaaggcagagctgttaaaacgatataccaaagaatatacagaatataatgaagaaaagaagaaggaagcagaggaattggcccggaacatggccatccagcaagagctggaaaaggaaaaacagagggtagcacaacagaagcagcagcaattggaacaggaacagttccatgccttcgaggagatgatccggaaccaggagctagaaaaagagcgactgaaaattgtacaggagtttgggaagttcccacaatcgatggattgcgccatgtggtggtgcctgggcggctgtgcccacagtttctccagttagccagtgccaacactgcccggggagtggagacatgtggaattctctgtggaaaactgg

SEQ ID NO: 14244 - DNA, 10764 bp, Homo sapiens
gggacacacccggaagcggcggcggcgcccctcggggaagatggcgccctcggggctgaaggcggtggtgggggaaagtgagtgcctctccggggccgggctctggcgtccggtgtgggacgggggtcggggacgcacgggctctgggatcctgggtttcatggcggctgggagttgggggccgggctgggcgtccgagcacctgaccctcgagggggcgggcggggacgggttcccagctggacgcccctgctctccggtgccagaacagaacaaaattggggggccggactccggggacccaaaggggacgggtagagtgtggcggaggctggggcccggactcctgggcctcctagggtgcctgccgggggaggagggcacagctggatgcccacactctaggatctcttaagccgggcaaagttcaggggctggattcttggggcctcctagggctctggtcagcgaccctaggtgctgtgagcgctcaggggacgtgtccaggccccacaggggtggtgtaggggatgtcttcctccttgccccatttccaggagcgccttgcagctggaggacgcaggcgtccaggcctcaccggccccggttcttgggggaagggtggagggcgcctcttcctccaccccggggagttccggcctcagctgctccttccgccctggccgtcttgataacagtggacatgacacagtggacgtggctgggcggggccaccccgttacttctctccactctctcctctaggcagggcggtctgtagctcaaacccctttaattgggggagattagaaaaaagtgattccattttacagatgaggaaactgagaccggaggtcagtgggatagcctcagctaggcatgcctcagagctgggaaccaggggtcctacattttagaccaggttggggggactggctgaaaccctcacagcaggaatacttgaggtagcaggtggggaagccgagagcctggcgctagaggcagatagagctgtagatgatcccggttctcctcttttcattcacctaaaacatgtttatcgagtggcaccttttgccccagcactctgccacttagacactcaggatgcgtaggtgagttacatgttgcctaagaatctgtttccctgtctgtaaattgggggtgaccccagaagccaatttgcagaactgggggctaaaaataaatgattcctgtgccgtgtctcacacctgtaatcccagcactttgggaggccgaggcaggaggactgcttgaggccaaaagtttgagaccagcttgggcaacatagcgagaccccatctatacagaaataaaaataaattagctgtgggtggtacatgcacctgtagtcccagctactcgggaggctgaggcaagaggatcgctggagcccaggagttggaggccgcagtgagttatgatcacaccactgcactttagcctaggtgacagagtgagatcctcctctcttaaaaaaaaaaaaaaagtaaatgggaattaagatgggggttcagccccaaggctgagaaggcttggggcagtggtgggaccagagaaccagcattctgacccctcccctcccttccctgcagaaattctgagcggagttattcggagtgtcaagaaggatggggagtggaaggtaggggtgaggcagatggctgggtacccagaggcagctcatcatcaggcctatggggaagaccctgaatgtgggacccccaagaactgcctgtccacatgggtggagttgggtgaatgggttctgggtcctcccacccagccagcccttgaaactgcccctcccactgccttggccccttctggggccagctgtggcctcttccgcctgctcctccatccatctgtccatccatctggacaggtgcttatcatggatcacccaagcatgcgcatcttgtcttcctgctgcaaaatgtcagatatcctggctgagggcatcaccagtgagtgaacgcgtccccagtgagatgggacctgagcgtgggaacccctgactgtgcccctctcccagggttcagcccttgagtgtaggatcccctcaaatcgtccagaactcccaagtacgcagctccctgcacggacagcccggatcatgtgaccaaatccattcttaaaccttgcaagctgactgcgggagcccatggattgcaggcctcccctgcagcactccctggctgcagccccttcctgaccgtgcagctccctcgtggagccctgtgtgggactcccagggtggactctggatgtggggtcccaagaatgcagagccttctatgggtgaccccaggtggtgtcccagtcactttgccattgagggataggtgctgagggagcctgtcctctcagaacctcagtctccctgtctgtaaatttggggaacccagttggctgcacaacccctgcagaaccctgtcgtgtggctcttagctggtggtccctaagtgggtttctcctgcagtccctcctaagcatccacccctcctccccaagcctccaaccccccacacctgagactccccacgtggccctgcctggatgccacccacctgtgtcccttcctctgttcctactagttgttgaagacatcaacaaacggcgggaacccattcccagtctggaggccatttatttgctgagccccacggagaaggtgcctacatgagtgagcgtgtgtgtatgcgcgtgcatgcgtgtacatgtgcatgtgtgtgtatgtctgcatgcatgtgattgcatgtgtgcatgtgtatacgtgtgcatgtgtccatgtgtatgtgtgtgcatgtgtgtgcatgtgtgtgtgcatctgtgtatgcatgtgtgtgcgtgtttgcatgtgtgtctatgtatgtgtctgtgtgcatgtgcatgtgtgtgcgtctgtgtgtgcatttgtgtgtatgtgtgtatgcgtgtgtgtctgtgggtctgtgtgtgcatttgtgtctgtgcatgtgtgtatgcgtgtgtatgtatgtgtgtgtgcatctgtgtgcatctgtatgtgtgtgtgtgcgtctgtctgtgtgcatgtgtgtatgcgtgtgtatgtatgtgtctgcgtctgtgtgtgcgtctgtgtgtatctgtgtgtgcatgtgtgtatgcgtgtatatgtatgtgcatctgtgtgcatgtgtctatgtatgtgtgtgcatctgtgtgtgcgtgtgtatgcgtgtgtgtatgcgtctgtgcatgtgtgtatgcgtgtgtgtgcgcatcagtgtctgcatgtgtgtatatgtgtgtatgtatgtgtgcgcgcgcatctgtgtgtgtgcatgtgtgtatgtatgtgtgtgcatctctgtgtgtgcatgtgtgtatgtgtgtgtgcatctgtgtgtgtgtgcatgtgtgcatgcgtgtgtatgtgtgtgtgcgtgcgtgcatctgtgtgtgtgcgcgtgtgcccatgtgggtgcgacactagtgtgcatttgcacatatacatgtccccgtccgtccatgtttgcacatggtggcagatggggggtggctgggaggcctaggcagccaatgagcctaggtgtgcaggctcaggcccagagagtgatccaccttccccagtcggttcaggccctgatcaaagacttccaggggaccccgactttcacctacaaagcggcccatatcttcttcaccgacagtgagtgaggagagcctagggtgttggtgggtggggcaaggaggtgtgggggctgctctggcctgatgccccactcctgcctcaccccagcctgccccgagcccctgttcagtgagctaggccgctctcgtctggcaaaggtggtgaagacgttgaaggagattcaccttgccttcctcccctacgaggcccaggtacggcccgggctcatcctgggcagggggtgggggtttgtgaccaaatgtcccctgttccctcagaaacagacactgaggctgggcgcagtggctcatacctgtaatcccagcgctgtgggaggccagggcaggaggatcacttggggccaggagtttgagaccagcctgggtacagagcaagaccccgtctcttaaaaaaagaaaaagaaagaaattagcttggcgtggtggcgtgcacctgtagtcctagctactcatggggctggggtgggagagtcgcttgagcccgggaggtcgaggctgcagtgagctatgattgcactgctgccctccagcctgggcgacagagcgagatcctgtctcaaaaacatacataaagtaaaattttaaaaaggggaggtacccacagagtccaaggagctcttgccttgagttctatcccactaggcccttgcagggggcagcgtagagcgcaccgcggggttgtccagccagcttaagggacacgggctggggtatttatccactgactcctgcaggcatgggtttagggttgacctgggcctgcctccaattcggcaaagcaggcttcagggaccagggacggctcccaggaggtgcaggtggcggcagcgggaagcggggcaggtgtgcacctgcagcggcaaccctggtgcttctgtcccctcctcgcccaggtgttctccctcgatgctccccacagcacctacaacctctactgccccttccgggcagaggagcgcacgcggcagctcgaggtgctggcccagcagattgccacgctgtgcgccaccctgcaggagtacccggccatccgctaccgcaagtggggaccccacccagccccaccccgatgccgacccccccttaaccgcgtgcaacacctaacctttaacctctcttgtgaccccagccccggccctaccctggcccctgactctcaccttcaaacccatccttgaccccatcccctgatgatgtcccccgtgtctgacctccccgccaggggcccagaggacacagcccagttggcccacgccgtcctggccaagctgaacgccttcaaggcagacactcccagtctgggcgaggtgagggggcgtgcttgggaggtgaggggcagccccaaccggctcagggtcagtgcctcattcctgccctaaaccccaccccagggcccagagaaaacccgctcccagctgctgataatggaccgggcagctgaccccgtgtccccactactgcatgagctcacgttccaggccatggcgtatgatctgctggacatagagcaggacacatacaggtctgcagacttggaacccgtccccacccttgccactgacctggttccccagtcctcagctcccctgacccccaggctccctccttcctccccaggtatgagaccaccgggctgagcgaggcgcgggagaaggccgtcttgctggacgaggacgatgacttgtgggtggagcttcgccacatgcatatcgcagatgtgtccaagtgcgtgcacacggggaccggatcccccccccaccgcccactgtgggcctggtagcggccttgggatccctggctgctgccaagtctttggccctcatgagcacccctcgtgtgactccagactggcctccaatttcaccccacctctccctgtcccccctgagtgggctcacccatggcctgtggctcctctcccctcactctcacccccgcccaccctcatggccaggaaggtcacggagctcctgaggaccttctgtgagagcaagaggctgaccacggacaaggtaggggcggacccaggtcaccaaaggcgctggtggaaggaagcccccctccccatgggcgcagggccacagcctggatttcgagcctggactgagacccaggtgggcactgcctggcttcgccccccaatccctaccctcttccccctacttccccaggcgaacatcaaagacctatcccagatcctgaaaaagatgccgcagtaccagaaggagctgaataaggtgtgctcgggtgggcagggagcggggacacctcggcccctcaaccccatgctctgtctgcgttctgccttgactcagcctttgttatcccccaacccccaccctgcaccctgcagtattctacgcacctgcatctagcagatgattgtatgaagcacttcaagggctcggtggagaagctgtgtagtgtggagcaggtggggcagggcttgcggggggcaggggtgatggtcctgccaaggcggggtattggggaggggctgaactgtagagatggggggttctgggggaggggcagggcttgtggagaggtggaggggccttggagagaggtgggacctggtggggaaggagtgggtcttgtggagaaacggtcctaggatgagggtgtggcctgtgcataggtggatggggcttggagaggtcagacttgggtgaggggcagagccttggacaggtggtcccaggacaggaatgtggcctattcataggtgggtgggaccttggagaggtaggcagggccttggagaggtgcgacctgggagaggaatggagccttggagaggtgggacctgggtgaggggcagagccttggagaggtgggacctgggagaggaatggagccttggagaggtgggccctgggagaggggcggagccttggagaggtgggacctgggtgaggggcggagccttggagaggtgggacctgggtgaggggtggaaccttggagaggtgggacctggatgaggggtggaaccttggaggggtgggacctgggagaggggtggagccttaagagaggtgggacctgggagaggggcggagccttggagaggtgggacctgagtgaggggtggggccttggagaggtaggagctgggagacaggtagagccatggagaggtgggatctgggtgaggcacggggccttggagaggtgggacctgggtgaggggtggaacctcggagaggtgggacctgggtgaggggtggagccttggagaggtgggacctgggtgaggggtggagccttggagagctgggacctgggtgaggggtggagccttggagaggtgggacttgggtgaggggtggagccttggagaggtgggacctgggtgaggggtggagcctcggagaggtgggacctgggtgaggtgtggaacctcggagaggtgggacctgggtgaggggtggaacctcggagaggtgggacctgggtgaggggtggagcctcggagagctgggacctgggtgaggggtggagccttggagagctgggacctgggtgaggggtggagccttggagaggtagtctcaggatagtggtgtgacctgtgtgtaggtgggtggggcactggaaaggtgggacctgggtgaggagcagggcctgtggagagactgtccctggacaggggtgggaccttgagagacctggtgctgagatgaggtaggacccaaatgtcctcttgccgaggatcctggggatgtccttggcccgcctctcccatccccttccctgacacatagcggccggtggacggctgaccccatgcccgcaggacctggccatgggctccgacgcagagggggagaagatcaaggactccatgaagctgatcgttccggtgctgctggacgcggcggtgcccgcctacgacaagatccgggtcctgctgctctacatcctccttcggaatggtgggtgggggctgcagggagttggaacgtccccatttgccagcgtctcccacgatcctgggaactgctgaaccccacagctctccttgggtcatttgcactcaccgggctcaccaacccccacagctacccctctggacccgggaaccctcctccattggcttggggattcctccactgaggtgagggctccctgctaacgtagaaaccctcacatctgtgattcctatagatgtggggctccctcagctcatctggaggagcccctgatctaccccctccaggtttcccactcttgctcacactagcacagggtactgaggccctccccactgcaaggttctctcatcagagtcctgggagctcctcagcccaccccaaactcccctaaacctgggagctcacctggccgccgcctccaccctgcccattcccgtcccccaggtgtgagtgaggagaacctggccaagctgatccagcatgccaatgtacaggcgcacagcagcctcatccgtaacctggagcagctgggaggcactgtcaccaaccccggggtacgccaggagcgggcatggggggaccctgggagagggtgcggatcacagccggggctctgcaaggcagagggccattggtgcacaggcacggtgtggttcctggcgtggtgtggttgctgggaggccaaaagcagtgtttcgggtctggtctggggcccagaggacactggggcctctcccagtcccagcttacacaataggcaggggaagtgagacatggtcgctgccaggctggtcctggcagtggtgcagttgggagcgggtggtctgagtgctagaggcagggagtagggtccccagcatgggggctacaccacattgtctatctgggctcccaggggtctctgagggtcccccgcacccatccagcacccacacacagccatgtgtgtgcttgactcttgggtcagcctctcctgtctctctctggccctgtgcgtccccctccagggtgccctcaccccgtccccatctctcccccatccctcatccatctcgctgtgcactgtttctccatatctctctctctcacccttctctctgccttcccctttctctctgttctctgtcttgctcccctcccctctccgtcccccttctgtccccatcttcctctctctgtttcctgcttcatctcttgtctctctctttgccttcatactttgtctcactgcttcttatctctttgcctatctctgcctctgtctttgtctttctctggctcgctctctctccctttggctttctctctccgtctctctctggctcactgtttctctctctcgctttcttgctgtctctcgctctctctcgctctctgttccacttccccatctttgcctgccatcccccaccctaccagccacaccaggcgcagcccctctgtgaccagcctccttcccctcaatccccctgctgccctccctgccctgcctgtagggctcggggacctccagccggctggagccgagagaacgcatggagcccacctatcagctgtcccgctggaccccggtcatcaaggatgtaatggaggtactgggtggcaggtcagggtgggggccagccctccgcatcggctggcggctcagcctccctcctgctgaggtgctaagcctcagggcttaggggaaaatgctcattgctggcattcccttggcaccgatctgctctgctgaggggggcacgccaagcccgcagctgaggaattggggtgacagcggggcctgtgctggggagcctcacttcctccccacctgccggctgcctccgctatatctctctagtctgttcccctgtcccgcaggagtgcccctgagccccagccctggccttcccaggatcccagggcagcaccatccaatggcaatgggcctggggcggcttcctggcttcctccttgtccctctaagagccccggcccctctttctgcgtgggggccagagacctgggcctcctcatccccatggaccttgaatacctggacttctggggctctgaggggctgagagcccagacactgggttccccaaagggctgggggtattgactgatggtccccaagggcctggaggcccagactactgggttgccgaggaactgtgggtttagacttctgggtacccaaggagttatggaattagattcgtgggtccccagtgagttatggatctagatttctaggtccccaatggactagaggcctagactcctgggtcccccagaggcaggaggtggagatgctggttcctgtctgccaggatcttggcccctgaataccccgtggggggcactcctgaccccggaccccatgcctggggttcctcccctaacctgcctctcggccgccaggacgccgtggaggaccggctggacaggaacctgtggcccttcgtatccgaccccgcccccacggccagctcccaggccgctgtcaggtgaggccccggggccgcccccgcccacgcctgggtctgtgttaggtgggcggcctggcggcggtgagggcctcctgcctggactttctgcccctgccctgcacagtgcccgcttcggtcactggcacaagaacaaggctggcatagaagcccgggcgggcccccggctcatcgtgtatgtcatgggcggtgtggccatgtcagagatgagggccgcctacgaggtgaccagggccaccgagggcaagtgggaggtgctcattggtaagtcaccaggactgggaccctggggtctggggcttgggttcccggggcctgggcttgtaccttctaggtgtctggactccagagtccttggagtcagggacctggtttgctgagggacagggacagccccacaccagccgggaccgggagcctgtcaaagacgaaggcagcgccccccaacatcttccccaaacctctgcccctgcacaggctcctcacacatcctcaccccgacccgcttcctggatgacctgaaggcactggacaagaagctggaggacattgccctgccctgacccctggccccgccccctacccctccctttccagagaaataaactcttcccgtcgctctgcca

SEQ ID NO: 14245 - DNA, 1885 bp, Homo sapiens
gggacacacccggaagcggcggcggcgcccctcggggaagatggcgccctcggggctgaaggcggtggtgggggaaaaaattctgagcggagttattcggagtgtcaagaaggatggggagtggaaggtgcttatcatggatcacccaagcatgcgcatcttgtcttcctgctgcaaaatgtcagatatcctggctgagggcatcaccattgttgaagacatcaacaaacggcgggaacccattcccagtctggaggccatttatttgctgagccccacggagaagtcggttcaggccctgatcaaagacttccaggggaccccgactttcacctacaaagcggcccatatcttcttcaccgacacctgccccgagcccctgttcagtgagctaggccgctctcgtctggcaaaggtggtgaagacgttgaaggagattcaccttgccttcctcccctacgaggcccaggtgttctccctcgatgctccccacagcacctacaacctctactgccccttccgggcagaggagcgcacgcggcagctcgaggtgctggcccagcagattgccacgctgtgcgccaccctgcaggagtacccggccatccgctaccgcaagggcccagaggacacagcccagttggcccacgccgtcctggccaagctgaacgccttcaaggcagacactcccagtctgggcgagggcccagagaaaacccgctcccagctgctgataatggaccgggcagctgaccccgtgtccccactactgcatgagctcacgttccaggccatggcgtatgatctgctggacatagagcaggacacatacaggtatgagaccaccgggctgagcgaggcgcgggagaaggccgtcttgctggacgaggacgatgacttgtgggtggagcttcgccacatgcatatcgcagatgtgtccaagaaggtcacggagctcctgaggaccttctgtgagagcaagaggctgaccacggacaaggcgaacatcaaagacctatcccagatcctgaaaaagatgccgcagtaccagaaggagctgaataagtattctacgcacctgcatctagcagatgattgtatgaagcacttcaagggctcggtggagaagctgtgtagtgtggagcaggacctggccatgggctccgacgcagagggggagaagatcaaggactccatgaagctgatcgttccggtgctgctggacgcggcggtgcccgcctacgacaagatccgggtcctgctgctctacatcctccttcggaatggtgtgagtgaggagaacctggccaagctgatccagcatgccaatgtacaggcgcacagcagcctcatccgtaacctggagcagctgggaggcactgtcaccaaccccgggggctcggggacctccagccggctggagccgagagaacgcatggagcccacctatcagctgtcccgctggaccccggtcatcaaggatgtaatggaggacgccgtggaggaccggctggacaggaacctgtggcccttcgtatccgaccccgcccccacggccagctcccaggccgctgtcagtgcccgcttcggtcactggcacaagaacaaggctggcatagaagcccgggcgggcccccggctcatcgtgtatgtcatgggcggtgtggccatgtcagagatgagggccgcctacgaggtgaccagggccaccgagggcaagtgggaggtgctcattggctcctcacacatcctcaccccgacccgcttcctggatgacctgaaggcactggacaagaagctggaggacattgccctgccctgacccctggccccgccccctacccctccctttccagagaaataaactcttcccgtcgctctgcca

SEQ ID NO: 14246 - DNA, 10747 bp, Homo sapiens
ggcggcggcgcccctcggggaagatggcgccctcggggctgaaggcggtggtgggggaaagtgagtgcctctccggggccgggctctggcgtccggtgtgggacgggggtcggggacgcacgggctctgggatcctgggtttcatggcggctgggagttgggggccgggctgggcgtccgagcacctgaccctcgagggggcgggcggggacgggttcccagctggacgcccctgctctccggtgccagaacagaacaaaattggggggccggactccggggacccaaaggggacgggtagagtgtggcggaggctggggcccggactcctgggcctcctagggtgcctgccgggggaggagggcacagctggatgcccacactctaggatctcttaagccgggcaaagttcaggggctggattcttggggcctcctagggctctggtcagcgaccctaggtgctgtgagcgctcaggggacgtgtccaggccccacaggggtggtgtaggggatgtcttcctccttgccccatttccaggagcgccttgcagctggaggacgcaggcgtccaggcctcaccggccccggttcttgggggaagggtggagggcgcctcttcctccaccccggggagttccggcctcagctgctccttccgccctggccgtcttgataacagtggacatgacacagtggacgtggctgggcggggccaccccgttacttctctccactctctcctctaggcagggcggtctgtagctcaaacccctttaattgggggagattagaaaaaagtgattccattttacagatgaggaaactgagaccggaggtcagtgggatagcctcagctaggcatgcctcagagctgggaaccaggggtcctacattttagaccaggttggggggactggctgaaaccctcacagcaggaatacttgaggtagcaggtggggaagccgagagcctggcgctagaggcagatagagctgtagatgatcccggttctcctcttttcattcacctaaaacatgtttatcgagtggcaccttttgccccagcactctgccacttagacactcaggatgcgtaggtgagttacatgttgcctaagaatctgtttccctgtctgtaaattgggggtgaccccagaagccaatttgcagaactgggggctaaaaataaatgattcctgtgccgtgtctcacacctgtaatcccagcactttgggaggccgaggcaggaggactgcttgaggccaaaagtttgagaccagcttgggcaacatagcgagaccccatctatacagaaataaaaataaattagctgtgggtggtacatgcacctgtagtcccagctactcgggaggctgaggcaagaggatcgctggagcccaggagttggaggccgcagtgagttatgatcacaccactgcactttagcctaggtgacagagtgagatcctcctctcttaaaaaaaaaaaaaaagtaaatgggaattaagatgggggttcagccccaaggctgagaaggcttggggcagtggtgggaccagagaaccagcattctgacccctcccctcccttccctgcagaaattctgagcggagttattcggagtgtcaagaaggatggggagtggaaggtaggggtgaggcagatggctgggtacccagaggcagctcatcatcaggcctatggggaagaccctgaatgtgggacccccaagaactgcctgtccacatgggtggagttgggtgaatgggttctgggtcctcccacccagccagcccttgaaactgcccctcccactgccttggccccttctggggccagctgtggcctcttccgcctgctcctccatccatctgtccatccatctggacaggtgcttatcatggatcacccaagcatgcgcatcttgtcttcctgctgcaaaatgtcagatatcctggctgagggcatcaccagtgagtgaacgcgtccccagtgagatgggacctgagcgtgggaacccctgactgtgcccctctcccagggttcagcccttgagtgtaggatcccctcaaatcgtccagaactcccaagtacgcagctccctgcacggacagcccggatcatgtgaccaaatccattcttaaaccttgcaagctgactgcgggagcccatggattgcaggcctcccctgcagcactccctggctgcagccccttcctgaccgtgcagctccctcgtggagccctgtgtgggactcccagggtggactctggatgtggggtcccaagaatgcagagccttctatgggtgaccccaggtggtgtcccagtcactttgccattgagggataggtgctgagggagcctgtcctctcagaacctcagtctccctgtctgtaaatttggggaacccagttggctgcacaacccctgcagaaccctgtcgtgtggctcttagctggtggtccctaagtgggtttctcctgcagtccctcctaagcatccacccctcctccccaagcctccaaccccccacacctgagactccccacgtggccctgcctggatgccacccacctgtgtcccttcctctgttcctactagttgttgaagacatcaacaaacggcgggaacccattcccagtctggaggccatttatttgctgagccccacggagaaggtgcctacatgagtgagcgtgtgtgtatgcgcgtgcatgcgtgtacatgtgcatgtgtgtgtatgtctgcatgcatgtgattgcatgtgtgcatgtgtatacgtgtgcatgtgtccatgtgtatgtgtgtgcatgtgtgtgcatgtgtgtgtgcatctgtgtatgcatgtgtgtgcgtgtttgcatgtgtgtctatgtatgtgtctgtgtgcatgtgcatgtgtgtgcgtctgtgtgtgcatttgtgtgtatgtgtgtatgcgtgtgtgtctgtgggtctgtgtgtgcatttgtgtctgtgcatgtgtgtatgcgtgtgtatgtatgtgtgtgtgcatctgtgtgcatctgtatgtgtgtgtgtgcgtctgtctgtgtgcatgtgtgtatgcgtgtgtatgtatgtgtctgcgtctgtgtgtgcgtctgtgtgtatctgtgtgtgcatgtgtgtatgcgtgtatatgtatgtgcatctgtgtgcatgtgtctatgtatgtgtgtgcatctgtgtgtgcgtgtgtatgcgtgtgtgtatgcgtctgtgcatgtgtgtatgcgtgtgtgtgcgcatcagtgtctgcatgtgtgtatatgtgtgtatgtatgtgtgcgcgcgcatctgtgtgtgtgcatgtgtgtatgtatgtgtgtgcatctctgtgtgtgcatgtgtgtatgtgtgtgtgcatctgtgtgtgtgtgcatgtgtgcatgcgtgtgtatgtgtgtgtgcgtgcgtgcatctgtgtgtgtgcgcgtgtgcccatgtgggtgcgacactagtgtgcatttgcacatatacatgtccccgtccgtccatgtttgcacatggtggcagatggggggtggctgggaggcctaggcagccaatgagcctaggtgtgcaggctcaggcccagagagtgatccaccttccccagtcggttcaggccctgatcaaagacttccaggggaccccgactttcacctacaaagcggcccatatcttcttcaccgacagtgagtgaggagagcctagggtgttggtgggtggggcaaggaggtgtgggggctgctctggcctgatgccccactcctgcctcaccccagcctgccccgagcccctgttcagtgagctaggccgctctcgtctggcaaaggtggtgaagacgttgaaggagattcaccttgccttcctcccctacgaggcccaggtacggcccgggctcatcctgggcagggggtgggggtttgtgaccaaatgtcccctgttccctcagaaacagacactgaggctgggcgcagtggctcatacctgtaatcccagcgctgtgggaggccagggcaggaggatcacttggggccaggagtttgagaccagcctgggtacagagcaagaccccgtctcttaaaaaaagaaaaagaaagaaattagcttggcgtggtggcgtgcacctgtagtcctagctactcatggggctggggtgggagagtcgcttgagcccgggaggtcgaggctgcagtgagctatgattgcactgctgccctccagcctgggcgacagagcgagatcctgtctcaaaaacatacataaagtaaaattttaaaaaggggaggtacccacagagtccaaggagctcttgccttgagttctatcccactaggcccttgcagggggcagcgtagagcgcaccgcggggttgtccagccagcttaagggacacgggctggggtatttatccactgactcctgcaggcatgggtttagggttgacctgggcctgcctccaattcggcaaagcaggcttcagggaccagggacggctcccaggaggtgcaggtggcggcagcgggaagcggggcaggtgtgcacctgcagcggcaaccctggtgcttctgtcccctcctcgcccaggtgttctccctcgatgctccccacagcacctacaacctctactgccccttccgggcagaggagcgcacgcggcagctcgaggtgctggcccagcagattgccacgctgtgcgccaccctgcaggagtacccggccatccgctaccgcaagtggggaccccacccagccccaccccgatgccgacccccccttaaccgcgtgcaacacctaacctttaacctctcttgtgaccccagccccggccctaccctggcccctgactctcaccttcaaacccatccttgaccccatcccctgatgatgtcccccgtgtctgacctccccgccaggggcccagaggacacagcccagttggcccacgccgtcctggccaagctgaacgccttcaaggcagacactcccagtctgggcgaggtgagggggcgtgcttgggaggtgaggggcagccccaaccggctcagggtcagtgcctcattcctgccctaaaccccaccccagggcccagagaaaacccgctcccagctgctgataatggaccgggcagctgaccccgtgtccccactactgcatgagctcacgttccaggccatggcgtatgatctgctggacatagagcaggacacatacaggtctgcagacttggaacccgtccccacccttgccactgacctggttccccagtcctcagctcccctgacccccaggctccctccttcctccccaggtatgagaccaccgggctgagcgaggcgcgggagaaggccgtcttgctggacgaggacgatgacttgtgggtggagcttcgccacatgcatatcgcagatgtgtccaagtgcgtgcacacggggaccggatcccccccccaccgcccactgtgggcctggtagcggccttgggatccctggctgctgccaagtctttggccctcatgagcacccctcgtgtgactccagactggcctccaatttcaccccacctctccctgtcccccctgagtgggctcacccatggcctgtggctcctctcccctcactctcacccccgcccaccctcatggccaggaaggtcacggagctcctgaggaccttctgtgagagcaagaggctgaccacggacaaggtaggggcggacccaggtcaccaaaggcgctggtggaaggaagcccccctccccatgggcgcagggccacagcctggatttcgagcctggactgagacccaggtgggcactgcctggcttcgccccccaatccctaccctcttccccctacttccccaggcgaacatcaaagacctatcccagatcctgaaaaagatgccgcagtaccagaaggagctgaataaggtgtgctcgggtgggcagggagcggggacacctcggcccctcaaccccatgctctgtctgcgttctgccttgactcagcctttgttatcccccaacccccaccctgcaccctgcagtattctacgcacctgcatctagcagatgattgtatgaagcacttcaagggctcggtggagaagctgtgtagtgtggagcaggtggggcagggcttgcggggggcaggggtgatggtcctgccaaggcggggtattggggaggggctgaactgtagagatggggggttctgggggaggggcagggcttgtggagaggtggaggggccttggagagaggtgggacctggtggggaaggagtgggtcttgtggagaaacggtcctaggatgagggtgtggcctgtgcataggtggatggggcttggagaggtcagacttgggtgaggggcagagccttggacaggtggtcccaggacaggaatgtggcctattcataggtgggtgggaccttggagaggtaggcagggccttggagaggtgcgacctgggagaggaatggagccttggagaggtgggacctgggtgaggggcagagccttggagaggtgggacctgggagaggaatggagccttggagaggtgggccctgggagaggggcggagccttggagaggtgggacctgggtgaggggcggagccttggagaggtgggacctgggtgaggggtggaaccttggagaggtgggacctggatgaggggtggaaccttggaggggtgggacctgggagaggggtggagccttaagagaggtgggacctgggagaggggcggagccttggagaggtgggacctgagtgaggggtggggccttggagaggtaggagctgggagacaggtagagccatggagaggtgggatctgggtgaggcacggggccttggagaggtgggacctgggtgaggggtggaacctcggagaggtgggacctgggtgaggggtggagccttggagaggtgggacctgggtgaggggtggagccttggagagctgggacctgggtgaggggtggagccttggagaggtgggacttgggtgaggggtggagccttggagaggtgggacctgggtgaggggtggagcctcggagaggtgggacctgggtgaggtgtggaacctcggagaggtgggacctgggtgaggggtggaacctcggagaggtgggacctgggtgaggggtggagcctcggagagctgggacctgggtgaggggtggagccttggagagctgggacctgggtgaggggtggagccttggagaggtagtctcaggatagtggtgtgacctgtgtgtaggtgggtggggcactggaaaggtgggacctgggtgaggagcagggcctgtggagagactgtccctggacaggggtgggaccttgagagacctggtgctgagatgaggtaggacccaaatgtcctcttgccgaggatcctggggatgtccttggcccgcctctcccatccccttccctgacacatagcggccggtggacggctgaccccatgcccgcaggacctggccatgggctccgacgcagagggggagaagatcaaggactccatgaagctgatcgttccggtgctgctggacgcggcggtgcccgcctacgacaagatccgggtcctgctgctctacatcctccttcggaatggtgggtgggggctgcagggagttggaacgtccccatttgccagcgtctcccacgatcctgggaactgctgaaccccacagctctccttgggtcatttgcactcaccgggctcaccaacccccacagctacccctctggacccgggaaccctcctccattggcttggggattcctccactgaggtgagggctccctgctaacgtagaaaccctcacatctgtgattcctatagatgtggggctccctcagctcatctggaggagcccctgatctaccccctccaggtttcccactcttgctcacactagcacagggtactgaggccctccccactgcaaggttctctcatcagagtcctgggagctcctcagcccaccccaaactcccctaaacctgggagctcacctggccgccgcctccaccctgcccattcccgtcccccaggtgtgagtgaggagaacctggccaagctgatccagcatgccaatgtacaggcgcacagcagcctcatccgtaacctggagcagctgggaggcactgtcaccaaccccggggtacgccaggagcgggcatggggggaccctgggagagggtgcggatcacagccggggctctgcaaggcagagggccattggtgcacaggcacggtgtggttcctggcgtggtgtggttgctgggaggccaaaagcagtgtttcgggtctggtctggggcccagaggacactggggcctctcccagtcccagcttacacaataggcaggggaagtgagacatggtcgctgccaggctggtcctggcagtggtgcagttgggagcgggtggtctgagtgctagaggcagggagtagggtccccagcatgggggctacaccacattgtctatctgggctcccaggggtctctgagggtcccccgcacccatccagcacccacacacagccatgtgtgtgcttgactcttgggtcagcctctcctgtctctctctggccctgtgcgtccccctccagggtgccctcaccccgtccccatctctcccccatccctcatccatctcgctgtgcactgtttctccatatctctctctctcacccttctctctgccttcccctttctctctgttctctgtcttgctcccctcccctctccgtcccccttctgtccccatcttcctctctctgtttcctgcttcatctcttgtctctctctttgccttcatactttgtctcactgcttcttatctctttgcctatctctgcctctgtctttgtctttctctggctcgctctctctccctttggctttctctctccgtctctctctggctcactgtttctctctctcgctttcttgctgtctctcgctctctctcgctctctgttccacttccccatctttgcctgccatcccccaccctaccagccacaccaggcgcagcccctctgtgaccagcctccttcccctcaatccccctgctgccctccctgccctgcctgtagggctcggggacctccagccggctggagccgagagaacgcatggagcccacctatcagctgtcccgctggaccccggtcatcaaggatgtaatggaggtactgggtggcaggtcagggtgggggccagccctccgcatcggctggcggctcagcctccctcctgctgaggtgctaagcctcagggcttaggggaaaatgctcattgctggcattcccttggcaccgatctgctctgctgaggggggcacgccaagcccgcagctgaggaattggggtgacagcggggcctgtgctggggagcctcacttcctccccacctgccggctgcctccgctatatctctctagtctgttcccctgtcccgcaggagtgcccctgagccccagccctggccttcccaggatcccagggcagcaccatccaatggcaatgggcctggggcggcttcctggcttcctccttgtccctctaagagccccggcccctctttctgcgtgggggccagagacctgggcctcctcatccccatggaccttgaatacctggacttctggggctctgaggggctgagagcccagacactgggttccccaaagggctgggggtattgactgatggtccccaagggcctggaggcccagactactgggttgccgaggaactgtgggtttagacttctgggtacccaaggagttatggaattagattcgtgggtccccagtgagttatggatctagatttctaggtccccaatggactagaggcctagactcctgggtcccccagaggcaggaggtggagatgctggttcctgtctgccaggatcttggcccctgaataccccgtggggggcactcctgaccccggaccccatgcctggggttcctcccctaacctgcctctcggccgccaggacgccgtggaggaccggctggacaggaacctgtggcccttcgtatccgaccccgcccccacggccagctcccaggccgctgtcaggtgaggccccggggccgcccccgcccacgcctgggtctgtgttaggtgggcggcctggcggcggtgagggcctcctgcctggactttctgcccctgccctgcacagtgcccgcttcggtcactggcacaagaacaaggctggcatagaagcccgggcgggcccccggctcatcgtgtatgtcatgggcggtgtggccatgtcagagatgagggccgcctacgaggtgaccagggccaccgagggcaagtgggaggtgctcattggtaagtcaccaggactgggaccctggggtctggggcttgggttcccggggcctgggcttgtaccttctaggtgtctggactccagagtccttggagtcagggacctggtttgctgagggacagggacagccccacaccagccgggaccgggagcctgtcaaagacgaaggcagcgccccccaacatcttccccaaacctctgcccctgcacaggctcctcacacatcctcaccccgacccgcttcctggatgacctgaaggcactggacaagaagctggaggacattgccctgccctgacccctggccccgccccctacccctccctttccagagaaataaactcttcccgtcgctctgcca

SEQ ID NO: 14247 - DNA, 1859 bp, Homo sapiens
ggcggcggcgcccctcggggaagatggcgccctcggggctgaaggcggtggtgggggaaaaaattctgagcggagttattcggagtgtcaagaaggatggggagtggaaggtgcttatcatggatcacccaagcatgcgcatcttgtcttcctgctgcaaaatgtcagatatcctggctgagggcatcaccattgttgaagacatcaacaaacggcgggaacccattcccagtctggaggccatttatttgctgagccccacggagaaggccctgatcaaagacttccaggggaccccgactttcacctacaaagcggcccatatcttcttcaccgacacctgccccgagcccctgttcagtgagctaggccgctctcgtctggcaaaggtggtgaagacgttgaaggagattcaccttgccttcctcccctacgaggcccaggtgttctccctcgatgctccccacagcacctacaacctctactgccccttccgggcagaggagcgcacgcggcagctcgaggtgctggcccagcagattgccacgctgtgcgccaccctgcaggagtacccggccatccgctaccgcaagggcccagaggacacagcccagttggcccacgccgtcctggccaagctgaacgccttcaaggcagacactcccagtctgggcgagggcccagagaaaacccgctcccagctgctgataatggaccgggcagctgaccccgtgtccccactactgcatgagctcacgttccaggccatggcgtatgatctgctggacatagagcaggacacatacaggtatgagaccaccgggctgagcgaggcgcgggagaaggccgtcttgctggacgaggacgatgacttgtgggtggagcttcgccacatgcatatcgcagatgtgtccaagaaggtcacggagctcctgaggaccttctgtgagagcaagaggctgaccacggacaaggcgaacatcaaagacctatcccagatcctgaaaaagatgccgcagtaccagaaggagctgaataagtattctacgcacctgcatctagcagatgattgtatgaagcacttcaagggctcggtggagaagctgtgtagtgtggagcaggacctggccatgggctccgacgcagagggggagaagatcaaggactccatgaagctgatcgttccggtgctgctggacgcggcggtgcccgcctacgacaagatccgggtcctgctgctctacatcctccttcggaatggtgtgagtgaggagaacctggccaagctgatccagcatgccaatgtacaggcgcacagcagcctcatccgtaacctggagcagctgggaggcactgtcaccaaccccgggggctcggggacctccagccggctggagccgagagaacgcatggagcccacctatcagctgtcccgctggaccccggtcatcaaggatgtaatggaggacgccgtggaggaccggctggacaggaacctgtggcccttcgtatccgaccccgcccccacggccagctcccaggccgctgtcagtgcccgcttcggtcactggcacaagaacaaggctggcatagaagcccgggcgggcccccggctcatcgtgtatgtcatgggcggtgtggccatgtcagagatgagggccgcctacgaggtgaccagggccaccgagggcaagtgggaggtgctcattggctcctcacacatcctcaccccgacccgcttcctggatgacctgaaggcactggacaagaagctggaggacattgccctgccctgacccctggccccgccccctacccctccctttccagagaaataaactcttcccgtcgctctgcca

SEQ ID NO: 14248 - DNA, 10760 bp, Homo sapiens
acacacccggaagcggcggcggcgcccctcggggaagatggcgccctcggggctgaaggcggtggtgggggaaagtgagtgcctctccggggccgggctctggcgtccggtgtgggacgggggtcggggacgcacgggctctgggatcctgggtttcatggcggctgggagttgggggccgggctgggcgtccgagcacctgaccctcgagggggcgggcggggacgggttcccagctggacgcccctgctctccggtgccagaacagaacaaaattggggggccggactccggggacccaaaggggacgggtagagtgtggcggaggctggggcccggactcctgggcctcctagggtgcctgccgggggaggagggcacagctggatgcccacactctaggatctcttaagccgggcaaagttcaggggctggattcttggggcctcctagggctctggtcagcgaccctaggtgctgtgagcgctcaggggacgtgtccaggccccacaggggtggtgtaggggatgtcttcctccttgccccatttccaggagcgccttgcagctggaggacgcaggcgtccaggcctcaccggccccggttcttgggggaagggtggagggcgcctcttcctccaccccggggagttccggcctcagctgctccttccgccctggccgtcttgataacagtggacatgacacagtggacgtggctgggcggggccaccccgttacttctctccactctctcctctaggcagggcggtctgtagctcaaacccctttaattgggggagattagaaaaaagtgattccattttacagatgaggaaactgagaccggaggtcagtgggatagcctcagctaggcatgcctcagagctgggaaccaggggtcctacattttagaccaggttggggggactggctgaaaccctcacagcaggaatacttgaggtagcaggtggggaagccgagagcctggcgctagaggcagatagagctgtagatgatcccggttctcctcttttcattcacctaaaacatgtttatcgagtggcaccttttgccccagcactctgccacttagacactcaggatgcgtaggtgagttacatgttgcctaagaatctgtttccctgtctgtaaattgggggtgaccccagaagccaatttgcagaactgggggctaaaaataaatgattcctgtgccgtgtctcacacctgtaatcccagcactttgggaggccgaggcaggaggactgcttgaggccaaaagtttgagaccagcttgggcaacatagcgagaccccatctatacagaaataaaaataaattagctgtgggtggtacatgcacctgtagtcccagctactcgggaggctgaggcaagaggatcgctggagcccaggagttggaggccgcagtgagttatgatcacaccactgcactttagcctaggtgacagagtgagatcctcctctcttaaaaaaaaaaaaaaagtaaatgggaattaagatgggggttcagccccaaggctgagaaggcttggggcagtggtgggaccagagaaccagcattctgacccctcccctcccttccctgcagaaattctgagcggagttattcggagtgtcaagaaggatggggagtggaaggtaggggtgaggcagatggctgggtacccagaggcagctcatcatcaggcctatggggaagaccctgaatgtgggacccccaagaactgcctgtccacatgggtggagttgggtgaatgggttctgggtcctcccacccagccagcccttgaaactgcccctcccactgccttggccccttctggggccagctgtggcctcttccgcctgctcctccatccatctgtccatccatctggacaggtgcttatcatggatcacccaagcatgcgcatcttgtcttcctgctgcaaaatgtcagatatcctggctgagggcatcaccagtgagtgaacgcgtccccagtgagatgggacctgagcgtgggaacccctgactgtgcccctctcccagggttcagcccttgagtgtaggatcccctcaaatcgtccagaactcccaagtacgcagctccctgcacggacagcccggatcatgtgaccaaatccattcttaaaccttgcaagctgactgcgggagcccatggattgcaggcctcccctgcagcactccctggctgcagccccttcctgaccgtgcagctccctcgtggagccctgtgtgggactcccagggtggactctggatgtggggtcccaagaatgcagagccttctatgggtgaccccaggtggtgtcccagtcactttgccattgagggataggtgctgagggagcctgtcctctcagaacctcagtctccctgtctgtaaatttggggaacccagttggctgcacaacccctgcagaaccctgtcgtgtggctcttagctggtggtccctaagtgggtttctcctgcagtccctcctaagcatccacccctcctccccaagcctccaaccccccacacctgagactccccacgtggccctgcctggatgccacccacctgtgtcccttcctctgttcctactagttgttgaagacatcaacaaacggcgggaacccattcccagtctggaggccatttatttgctgagccccacggagaaggtgcctacatgagtgagcgtgtgtgtatgcgcgtgcatgcgtgtacatgtgcatgtgtgtgtatgtctgcatgcatgtgattgcatgtgtgcatgtgtatacgtgtgcatgtgtccatgtgtatgtgtgtgcatgtgtgtgcatgtgtgtgtgcatctgtgtatgcatgtgtgtgcgtgtttgcatgtgtgtctatgtatgtgtctgtgtgcatgtgcatgtgtgtgcgtctgtgtgtgcatttgtgtgtatgtgtgtatgcgtgtgtgtctgtgggtctgtgtgtgcatttgtgtctgtgcatgtgtgtatgcgtgtgtatgtatgtgtgtgtgcatctgtgtgcatctgtatgtgtgtgtgtgcgtctgtctgtgtgcatgtgtgtatgcgtgtgtatgtatgtgtctgcgtctgtgtgtgcgtctgtgtgtatctgtgtgtgcatgtgtgtatgcgtgtatatgtatgtgcatctgtgtgcatgtgtctatgtatgtgtgtgcatctgtgtgtgcgtgtgtatgcgtgtgtgtatgcgtctgtgcatgtgtgtatgcgtgtgtgtgcgcatcagtgtctgcatgtgtgtatatgtgtgtatgtatgtgtgcgcgcgcatctgtgtgtgtgcatgtgtgtatgtatgtgtgtgcatctctgtgtgtgcatgtgtgtatgtgtgtgtgcatctgtgtgtgtgtgcatgtgtgcatgcgtgtgtatgtgtgtgtgcgtgcgtgcatctgtgtgtgtgcgcgtgtgcccatgtgggtgcgacactagtgtgcatttgcacatatacatgtccccgtccgtccatgtttgcacatggtggcagatggggggtggctgggaggcctaggcagccaatgagcctaggtgtgcaggctcaggcccagagagtgatccaccttccccagtcggttcaggccctgatcaaagacttccaggggaccccgactttcacctacaaagcggcccatatcttcttcaccgacagtgagtgaggagagcctagggtgttggtgggtggggcaaggaggtgtgggggctgctctggcctgatgccccactcctgcctcaccccagcctgccccgagcccctgttcagtgagctaggccgctctcgtctggcaaaggtggtgaagacgttgaaggagattcaccttgccttcctcccctacgaggcccaggtacggcccgggctcatcctgggcagggggtgggggtttgtgaccaaatgtcccctgttccctcagaaacagacactgaggctgggcgcagtggctcatacctgtaatcccagcgctgtgggaggccagggcaggaggatcacttggggccaggagtttgagaccagcctgggtacagagcaagaccccgtctcttaaaaaaagaaaaagaaagaaattagcttggcgtggtggcgtgcacctgtagtcctagctactcatggggctggggtgggagagtcgcttgagcccgggaggtcgaggctgcagtgagctatgattgcactgctgccctccagcctgggcgacagagcgagatcctgtctcaaaaacatacataaagtaaaattttaaaaaggggaggtacccacagagtccaaggagctcttgccttgagttctatcccactaggcccttgcagggggcagcgtagagcgcaccgcggggttgtccagccagcttaagggacacgggctggggtatttatccactgactcctgcaggcatgggtttagggttgacctgggcctgcctccaattcggcaaagcaggcttcagggaccagggacggctcccaggaggtgcaggtggcggcagcgggaagcggggcaggtgtgcacctgcagcggcaaccctggtgcttctgtcccctcctcgcccaggtgttctccctcgatgctccccacagcacctacaacctctactgccccttccgggcagaggagcgcacgcggcagctcgaggtgctggcccagcagattgccacgctgtgcgccaccctgcaggagtacccggccatccgctaccgcaagtggggaccccacccagccccaccccgatgccgacccccccttaaccgcgtgcaacacctaacctttaacctctcttgtgaccccagccccggccctaccctggcccctgactctcaccttcaaacccatccttgaccccatcccctgatgatgtcccccgtgtctgacctccccgccaggggcccagaggacacagcccagttggcccacgccgtcctggccaagctgaacgccttcaaggcagacactcccagtctgggcgaggtgagggggcgtgcttgggaggtgaggggcagccccaaccggctcagggtcagtgcctcattcctgccctaaaccccaccccagggcccagagaaaacccgctcccagctgctgataatggaccgggcagctgaccccgtgtccccactactgcatgagctcacgttccaggccatggcgtatgatctgctggacatagagcaggacacatacaggtctgcagacttggaacccgtccccacccttgccactgacctggttccccagtcctcagctcccctgacccccaggctccctccttcctccccaggtatgagaccaccgggctgagcgaggcgcgggagaaggccgtcttgctggacgaggacgatgacttgtgggtggagcttcgccacatgcatatcgcagatgtgtccaagtgcgtgcacacggggaccggatcccccccccaccgcccactgtgggcctggtagcggccttgggatccctggctgctgccaagtctttggccctcatgagcacccctcgtgtgactccagactggcctccaatttcaccccacctctccctgtcccccctgagtgggctcacccatggcctgtggctcctctcccctcactctcacccccgcccaccctcatggccaggaaggtcacggagctcctgaggaccttctgtgagagcaagaggctgaccacggacaaggtaggggcggacccaggtcaccaaaggcgctggtggaaggaagcccccctccccatgggcgcagggccacagcctggatttcgagcctggactgagacccaggtgggcactgcctggcttcgccccccaatccctaccctcttccccctacttccccaggcgaacatcaaagacctatcccagatcctgaaaaagatgccgcagtaccagaaggagctgaataaggtgtgctcgggtgggcagggagcggggacacctcggcccctcaaccccatgctctgtctgcgttctgccttgactcagcctttgttatcccccaacccccaccctgcaccctgcagtattctacgcacctgcatctagcagatgattgtatgaagcacttcaagggctcggtggagaagctgtgtagtgtggagcaggtggggcagggcttgcggggggcaggggtgatggtcctgccaaggcggggtattggggaggggctgaactgtagagatggggggttctgggggaggggcagggcttgtggagaggtggaggggccttggagagaggtgggacctggtggggaaggagtgggtcttgtggagaaacggtcctaggatgagggtgtggcctgtgcataggtggatggggcttggagaggtcagacttgggtgaggggcagagccttggacaggtggtcccaggacaggaatgtggcctattcataggtgggtgggaccttggagaggtaggcagggccttggagaggtgcgacctgggagaggaatggagccttggagaggtgggacctgggtgaggggcagagccttggagaggtgggacctgggagaggaatggagccttggagaggtgggccctgggagaggggcggagccttggagaggtgggacctgggtgaggggcggagccttggagaggtgggacctgggtgaggggtggaaccttggagaggtgggacctggatgaggggtggaaccttggaggggtgggacctgggagaggggtggagccttaagagaggtgggacctgggagaggggcggagccttggagaggtgggacctgagtgaggggtggggccttggagaggtaggagctgggagacaggtagagccatggagaggtgggatctgggtgaggcacggggccttggagaggtgggacctgggtgaggggtggaacctcggagaggtgggacctgggtgaggggtggagccttggagaggtgggacctgggtgaggggtggagccttggagagctgggacctgggtgaggggtggagccttggagaggtgggacttgggtgaggggtggagccttggagaggtgggacctgggtgaggggtggagcctcggagaggtgggacctgggtgaggtgtggaacctcggagaggtgggacctgggtgaggggtggaacctcggagaggtgggacctgggtgaggggtggagcctcggagagctgggacctgggtgaggggtggagccttggagagctgggacctgggtgaggggtggagccttggagaggtagtctcaggatagtggtgtgacctgtgtgtaggtgggtggggcactggaaaggtgggacctgggtgaggagcagggcctgtggagagactgtccctggacaggggtgggaccttgagagacctggtgctgagatgaggtaggacccaaatgtcctcttgccgaggatcctggggatgtccttggcccgcctctcccatccccttccctgacacatagcggccggtggacggctgaccccatgcccgcaggacctggccatgggctccgacgcagagggggagaagatcaaggactccatgaagctgatcgttccggtgctgctggacgcggcggtgcccgcctacgacaagatccgggtcctgctgctctacatcctccttcggaatggtgggtgggggctgcagggagttggaacgtccccatttgccagcgtctcccacgatcctgggaactgctgaaccccacagctctccttgggtcatttgcactcaccgggctcaccaacccccacagctacccctctggacccgggaaccctcctccattggcttggggattcctccactgaggtgagggctccctgctaacgtagaaaccctcacatctgtgattcctatagatgtggggctccctcagctcatctggaggagcccctgatctaccccctccaggtttcccactcttgctcacactagcacagggtactgaggccctccccactgcaaggttctctcatcagagtcctgggagctcctcagcccaccccaaactcccctaaacctgggagctcacctggccgccgcctccaccctgcccattcccgtcccccaggtgtgagtgaggagaacctggccaagctgatccagcatgccaatgtacaggcgcacagcagcctcatccgtaacctggagcagctgggaggcactgtcaccaaccccggggtacgccaggagcgggcatggggggaccctgggagagggtgcggatcacagccggggctctgcaaggcagagggccattggtgcacaggcacggtgtggttcctggcgtggtgtggttgctgggaggccaaaagcagtgtttcgggtctggtctggggcccagaggacactggggcctctcccagtcccagcttacacaataggcaggggaagtgagacatggtcgctgccaggctggtcctggcagtggtgcagttgggagcgggtggtctgagtgctagaggcagggagtagggtccccagcatgggggctacaccacattgtctatctgggctcccaggggtctctgagggtcccccgcacccatccagcacccacacacagccatgtgtgtgcttgactcttgggtcagcctctcctgtctctctctggccctgtgcgtccccctccagggtgccctcaccccgtccccatctctcccccatccctcatccatctcgctgtgcactgtttctccatatctctctctctcacccttctctctgccttcccctttctctctgttctctgtcttgctcccctcccctctccgtcccccttctgtccccatcttcctctctctgtttcctgcttcatctcttgtctctctctttgccttcatactttgtctcactgcttcttatctctttgcctatctctgcctctgtctttgtctttctctggctcgctctctctccctttggctttctctctccgtctctctctggctcactgtttctctctctcgctttcttgctgtctctcgctctctctcgctctctgttccacttccccatctttgcctgccatcccccaccctaccagccacaccaggcgcagcccctctgtgaccagcctccttcccctcaatccccctgctgccctccctgccctgcctgtagggctcggggacctccagccggctggagccgagagaacgcatggagcccacctatcagctgtcccgctggaccccggtcatcaaggatgtaatggaggtactgggtggcaggtcagggtgggggccagccctccgcatcggctggcggctcagcctccctcctgctgaggtgctaagcctcagggcttaggggaaaatgctcattgctggcattcccttggcaccgatctgctctgctgaggggggcacgccaagcccgcagctgaggaattggggtgacagcggggcctgtgctggggagcctcacttcctccccacctgccggctgcctccgctatatctctctagtctgttcccctgtcccgcaggagtgcccctgagccccagccctggccttcccaggatcccagggcagcaccatccaatggcaatgggcctggggcggcttcctggcttcctccttgtccctctaagagccccggcccctctttctgcgtgggggccagagacctgggcctcctcatccccatggaccttgaatacctggacttctggggctctgaggggctgagagcccagacactgggttccccaaagggctgggggtattgactgatggtccccaagggcctggaggcccagactactgggttgccgaggaactgtgggtttagacttctgggtacccaaggagttatggaattagattcgtgggtccccagtgagttatggatctagatttctaggtccccaatggactagaggcctagactcctgggtcccccagaggcaggaggtggagatgctggttcctgtctgccaggatcttggcccctgaataccccgtggggggcactcctgaccccggaccccatgcctggggttcctcccctaacctgcctctcggccgccaggacgccgtggaggaccggctggacaggaacctgtggcccttcgtatccgaccccgcccccacggccagctcccaggccgctgtcaggtgaggccccggggccgcccccgcccacgcctgggtctgtgttaggtgggcggcctggcggcggtgagggcctcctgcctggactttctgcccctgccctgcacagtgcccgcttcggtcactggcacaagaacaaggctggcatagaagcccgggcgggcccccggctcatcgtgtatgtcatgggcggtgtggccatgtcagagatgagggccgcctacgaggtgaccagggccaccgagggcaagtgggaggtgctcattggtaagtcaccaggactgggaccctggggtctggggcttgggttcccggggcctgggcttgtaccttctaggtgtctggactccagagtccttggagtcagggacctggtttgctgagggacagggacagccccacaccagccgggaccgggagcctgtcaaagacgaaggcagcgccccccaacatcttccccaaacctctgcccctgcacaggctcctcacacatcctcaccccgacccgcttcctggatgacctgaaggcactggacaagaagctggaggacattgccctgccctgacccctggccccgccccctacccctccctttccagagaaataaactcttcccgtcgctctgcc

SEQ ID NO: 14249 - DNA, 1914 bp, Homo sapiens
acacacccggaagcggcggcggcgcccctcggggaagatggcgccctcggggctgaaggcggtggtgggggaaaaaattctgagcggagttattcggagtgtcaagaaggatggggagtggaaggtgcttatcatggatcacccaagcatgcgcatcttgtcttcctgctgcaaaatgtcagatatcctggctgagggcatcaccattgttgaagacatcaacaaacggcgggaacccattcccagtctggaggccatttatttgctgagccccacggagaaggctcaggcccagagagtgatccaccttccccagtcggttcaggccctgatcaaagacttccaggggaccccgactttcacctacaaagcggcccatatcttcttcaccgacacctgccccgagcccctgttcagtgagctaggccgctctcgtctggcaaaggtggtgaagacgttgaaggagattcaccttgccttcctcccctacgaggcccaggtgttctccctcgatgctccccacagcacctacaacctctactgccccttccgggcagaggagcgcacgcggcagctcgaggtgctggcccagcagattgccacgctgtgcgccaccctgcaggagtacccggccatccgctaccgcaagggcccagaggacacagcccagttggcccacgccgtcctggccaagctgaacgccttcaaggcagacactcccagtctgggcgagggcccagagaaaacccgctcccagctgctgataatggaccgggcagctgaccccgtgtccccactactgcatgagctcacgttccaggccatggcgtatgatctgctggacatagagcaggacacatacaggtatgagaccaccgggctgagcgaggcgcgggagaaggccgtcttgctggacgaggacgatgacttgtgggtggagcttcgccacatgcatatcgcagatgtgtccaagaaggtcacggagctcctgaggaccttctgtgagagcaagaggctgaccacggacaaggcgaacatcaaagacctatcccagatcctgaaaaagatgccgcagtaccagaaggagctgaataagtattctacgcacctgcatctagcagatgattgtatgaagcacttcaagggctcggtggagaagctgtgtagtgtggagcaggacctggccatgggctccgacgcagagggggagaagatcaaggactccatgaagctgatcgttccggtgctgctggacgcggcggtgcccgcctacgacaagatccgggtcctgctgctctacatcctccttcggaatggtgtgagtgaggagaacctggccaagctgatccagcatgccaatgtacaggcgcacagcagcctcatccgtaacctggagcagctgggaggcactgtcaccaaccccgggggctcggggacctccagccggctggagccgagagaacgcatggagcccacctatcagctgtcccgctggaccccggtcatcaaggatgtaatggaggacgccgtggaggaccggctggacaggaacctgtggcccttcgtatccgaccccgcccccacggccagctcccaggccgctgtcagtgcccgcttcggtcactggcacaagaacaaggctggcatagaagcccgggcgggcccccggctcatcgtgtatgtcatgggcggtgtggccatgtcagagatgagggccgcctacgaggtgaccagggccaccgagggcaagtgggaggtgctcattggctcctcacacatcctcaccccgacccgcttcctggatgacctgaaggcactggacaagaagctggaggacattgccctgccctgacccctggccccgccccctacccctccctttccagagaaataaactcttcccgtcgctctgcc

SEQ ID NO: 14250 - DNA, 4125 bp, Homo sapiens
gaagtgtgtgtctgaactcccatctgtgagcgtgtcgtcgaggtgtgcacctccagcgacttcgtgctcggcagcgcggacgcacctgcccgtcctccccgccagggactcaacttcctgggcctgggcgagaaccgacggcggggaggggccaggtgcgcagggggcggggacagggcccgcggggcggggtccacgtgggtgacgcgcggggccacgcccccaccttgggacacacccggaagcggcggcggcgcccctcggggaagatggcgccctcggggctgaaggcggtggtgggggaaagtgagtgcctctccggggccgggctctggcgtccggtgtgggacgggggtcggggacgcacgggctctgggatcctgggtttcatggcggctgggagttgggggccgggctgggcgtccgagcacctgaccctcgagggggcgggcggggacgggttcccagctggacgcccctgctctccggtgccagaacagaacaaaattggggggccggactccggggacccaaaggggacgggtagagtgtggcggaggctggggcccggactcctgggcctcctagggtgcctgccgggggaggagggcacagctggatgcccacactctaggatctcttaagccgggcaaagttcaggggctggattcttggggcctcctagggctctggtcagcgaccctaggtgctgtgagcgctcaggggacgtgtccaggccccacaggggtggtgtaggggatgtcttcctccttgccccatttccaggagcgccttgcagctggaggacgcaggcgtccaggcctcaccggccccggttcttgggggaagggtggagggcgcctcttcctccaccccggggagttccggcctcagctgctccttccgccctggccgtcttgataacagtggacatgacacagtggacgtggctgggcggggccaccccgttacttctctccactctctcctctaggcagggcggtctgtagctcaaacccctttaattgggggagattagaaaaaagtgattccattttacagatgaggaaactgagaccggaggtcagtgggatagcctcagctaggcatgcctcagagctgggaaccaggggtcctacattttagaccaggttggggggactggctgaaaccctcacagcaggaatacttgaggtagcaggtggggaagccgagagcctggcgctagaggcagatagagctgtagatgatcccggttctcctcttttcattcacctaaaacatgtttatcgagtggcaccttttgccccagcactctgccacttagacactcaggatgcgtaggtgagttacatgttgcctaagaatctgtttccctgtctgtaaattgggggtgaccccagaagccaatttgcagaactgggggctaaaaataaatgattcctgtgccgtgtctcacacctgtaatcccagcactttgggaggccgaggcaggaggactgcttgaggccaaaagtttgagaccagcttgggcaacatagcgagaccccatctatacagaaataaaaataaattagctgtgggtggtacatgcacctgtagtcccagctactcgggaggctgaggcaagaggatcgctggagcccaggagttggaggccgcagtgagttatgatcacaccactgcactttagcctaggtgacagagtgagatcctcctctcttaaaaaaaaaaaaaaagtaaatgggaattaagatgggggttcagccccaaggctgagaaggcttggggcagtggtgggaccagagaaccagcattctgacccctcccctcccttccctgcagaaattctgagcggagttattcggagtgtcaagaaggatggggagtggaaggtaggggtgaggcagatggctgggtacccagaggcagctcatcatcaggcctatggggaagaccctgaatgtgggacccccaagaactgcctgtccacatgggtggagttgggtgaatgggttctgggtcctcccacccagccagcccttgaaactgcccctcccactgccttggccccttctggggccagctgtggcctcttccgcctgctcctccatccatctgtccatccatctggacaggtgcttatcatggatcacccaagcatgcgcatcttgtcttcctgctgcaaaatgtcagatatcctggctgagggcatcaccagtgagtgaacgcgtccccagtgagatgggacctgagcgtgggaacccctgactgtgcccctctcccagggttcagcccttgagtgtaggatcccctcaaatcgtccagaactcccaagtacgcagctccctgcacggacagcccggatcatgtgaccaaatccattcttaaaccttgcaagctgactgcgggagcccatggattgcaggcctcccctgcagcactccctggctgcagccccttcctgaccgtgcagctccctcgtggagccctgtgtgggactcccagggtggactctggatgtggggtcccaagaatgcagagccttctatgggtgaccccaggtggtgtcccagtcactttgccattgagggataggtgctgagggagcctgtcctctcagaacctcagtctccctgtctgtaaatttggggaacccagttggctgcacaacccctgcagaaccctgtcgtgtggctcttagctggtggtccctaagtgggtttctcctgcagtccctcctaagcatccacccctcctccccaagcctccaaccccccacacctgagactccccacgtggccctgcctggatgccacccacctgtgtcccttcctctgttcctactagttgttgaagacatcaacaaacggcgggaacccattcccagtctggaggccatttatttgctgagccccacggagaaggtgcctacatgagtgagcgtgtgtgtatgcgcgtgcatgcgtgtacatgtgcatgtgtgtgtatgtctgcatgcatgtgattgcatgtgtgcatgtgtatacgtgtgcatgtgtccatgtgtatgtgtgtgcatgtgtgtgcatgtgtgtgtgcatctgtgtatgcatgtgtgtgcgtgtttgcatgtgtgtctatgtatgtgtctgtgtgcatgtgcatgtgtgtgcgtctgtgtgtgcatttgtgtgtatgtgtgtatgcgtgtgtgtctgtgggtctgtgtgtgcatttgtgtctgtgcatgtgtgtatgcgtgtgtatgtatgtgtgtgtgcatctgtgtgcatctgtatgtgtgtgtgtgcgtctgtctgtgtgcatgtgtgtatgcgtgtgtatgtatgtgtctgcgtctgtgtgtgcgtctgtgtgtatctgtgtgtgcatgtgtgtatgcgtgtatatgtatgtgcatctgtgtgcatgtgtctatgtatgtgtgtgcatctgtgtgtgcgtgtgtatgcgtgtgtgtatgcgtctgtgcatgtgtgtatgcgtgtgtgtgcgcatcagtgtctgcatgtgtgtatatgtgtgtatgtatgtgtgcgcgcgcatctgtgtgtgtgcatgtgtgtatgtatgtgtgtgcatctctgtgtgtgcatgtgtgtatgtgtgtgtgcatctgtgtgtgtgtgcatgtgtgcatgcgtgtgtatgtgtgtgtgcgtgcgtgcatctgtgtgtgtgcgcgtgtgcccatgtgggtgcgacactagtgtgcatttgcacatatacatgtccccgtccgtccatgtttgcacatggtggcagatggggggtggctgggaggcctaggcagccaatgagcctaggtgtgcaggctcaggcccagagagtgatccaccttccccagtcggttcaggccctgatcaaagacttccaggggaccccgactttcacctacaaagcggcccatatcttcttcaccgacagtgagtgaggagagcctagggtgttggtgggtggggcaaggaggtgtgggggctgctctggcctgatgccccactcctgcctcaccccagcctgccccgagcccctgttcagtgagctaggccgctctcgtctggcaaaggtggtgaagacgttgaaggagattcaccttgccttcctcccctacgaggcccaggt

SEQ ID NO: 14251 - DNA, 549 bp, Homo sapiens
gaagtgtgtgtctgaactcccatctgtgagcgtgtcgtcgaggtgtgcacctccagcgacttcgtgctcggcagcgcggacgcacctgcccgtcctccccgccagggactcaacttcctgggcctgggcgagaaccgacggcggggaggggccagaaattctgagcggagttattcggagtgtcaagaaggatggggagtggaaggtgcttatcatggatcacccaagcatgcgcatcttgtcttcctgctgcaaaatgtcagatatcctggctgagggcatcaccattgttgaagacatcaacaaacggcgggaacccattcccagtctggaggccatttatttgctgagccccacggagaagtcggttcaggccctgatcaaagacttccaggggaccccgactttcacctacaaagcggcccatatcttcttcaccgacacctgccccgagcccctgttcagtgagctaggccgctctcgtctggcaaaggtggtgaagacgttgaaggagattcaccttgccttcctcccctacgaggcccaggt

SEQ ID NO: 14252 - DNA, 2090 bp, Homo sapiens
ggagccttggagaggtagtctcaggatagtggtgtgacctgtgtgtaggtgggtggggcactggaaaggtgggacctgggtgaggagcagggcctgtggagagactgtccctggacaggggtgggaccttgagagacctggtgctgagatgaggtaggacccaaatgtcctcttgccgaggatcctggggatgtccttggcccgcctctcccatccccttccctgacacatagcggccggtggacggctgaccccatgcccgcaggacctggccatgggctccgacgcagagggggagaagatcaaggactccatgaagctgatcgttccggtgctgctggacgcggcggtgcccgcctacgacaagatccgggtcctgctgctctacatcctccttcggaatggtgggtgggggctgcagggagttggaacgtccccatttgccagcgtctcccacgatcctgggaactgctgaaccccacagctctccttgggtcatttgcactcaccgggctcaccaacccccacagctacccctctggacccgggaaccctcctccattggcttggggattcctccactgaggtgagggctccctgctaacgtagaaaccctcacatctgtgattcctatagatgtggggctccctcagctcatctggaggagcccctgatctaccccctccaggtttcccactcttgctcacactagcacagggtactgaggccctccccactgcaaggttctctcatcagagtcctgggagctcctcagcccaccccaaactcccctaaacctgggagctcacctggccgccgcctccaccctgcccattcccgtcccccaggtgtgagtgaggagaacctggccaagctgatccagcatgccaatgtacaggcgcacagcagcctcatccgtaacctggagcagctgggaggcactgtcaccaaccccggggtacgccaggagcgggcatggggggaccctgggagagggtgcggatcacagccggggctctgcaaggcagagggccattggtgcacaggcacggtgtggttcctggcgtggtgtggttgctgggaggccaaaagcagtgtttcgggtctggtctggggcccagaggacactggggcctctcccagtcccagcttacacaataggcaggggaagtgagacatggtcgctgccaggctggtcctggcagtggtgcagttgggagcgggtggtctgagtgctagaggcagggagtagggtccccagcatgggggctacaccacattgtctatctgggctcccaggggtctctgagggtcccccgcacccatccagcacccacacacagccatgtgtgtgcttgactcttgggtcagcctctcctgtctctctctggccctgtgcgtccccctccagggtgccctcaccccgtccccatctctcccccatccctcatccatctcgctgtgcactgtttctccatatctctctctctcacccttctctctgccttcccctttctctctgttctctgtcttgctcccctcccctctccgtcccccttctgtccccatcttcctctctctgtttcctgcttcatctcttgtctctctctttgccttcatactttgtctcactgcttcttatctctttgcctatctctgcctctgtctttgtctttctctggctcgctctctctccctttggctttctctctccgtctctctctggctcactgtttctctctctcgctttcttgctgtctctcgctctctctcgctctctgttccacttccccatctttgcctgccatcccccaccctaccagccacaccaggcgcagcccctctgtgaccagcctccttcccctcaatccccctgctgccctccctgccctgcctgtagggctcggggacctccagccggctggagccgagagaacgcatggagcccacctatcagctgtcccgctggaccccggtcatcaaggatgtaatggaggtactgggtggcaggtcagggtgggggccagccctccgcatcggctggcggctcagcctccctcctgctgaggtgctaagcctcagggcttagg

SEQ ID NO: 14253 - DNA, 704 bp, Homo sapiens
ggagccttggagaggtagtctcaggatagtggtgtgacctgtgtgtaggtgggtggggcactggaaaggtgggacctgggtgaggagcagggcctgtggagagactgtccctggacaggggtgggaccttgagagacctggtgctgagatgaggtaggacccaaatgtcctcttgccgaggatcctggggatgtccttggcccgcctctcccatccccttccctgacacatagcggccggtggacggctgaccccatgcccgcaggacctggccatgggctccgacgcagagggggagaagatcaaggactccatgaagctgatcgttccggtgctgctggacgcggcggtgcccgcctacgacaagatccgggtcctgctgctctacatcctccttcggaatggtgtgagtgaggagaacctggccaagctgatccagcatgccaatgtacaggcgcacagcagcctcatccgtaacctggagcagctgggaggcactgtcaccaaccccgggggctcggggacctccagccggctggagccgagagaacgcatggagcccacctatcagctgtcccgctggaccccggtcatcaaggatgtaatggaggtactgggtggcaggtcagggtgggggccagccctccgcatcggctggcggctcagcctccctcctgctgaggtgctaagcctcagggcttagg

SEQ ID NO: 14254 - DNA, 1381 bp, Homo sapiens
gtacccggccatccgctaccgcaagtggggaccccacccagccccaccccgatgccgacccccccttaaccgcgtgcaacacctaacctttaacctctcttgtgaccccagccccggccctaccctggcccctgactctcaccttcaaacccatccttgaccccatcccctgatgatgtcccccgtgtctgacctccccgccaggggcccagaggacacagcccagttggcccacgccgtcctggccaagctgaacgccttcaaggcagacactcccagtctgggcgaggtgagggggcgtgcttgggaggtgaggggcagccccaaccggctcagggtcagtgcctcattcctgccctaaaccccaccccagggcccagagaaaacccgctcccagctgctgataatggaccgggcagctgaccccgtgtccccactactgcatgagctcacgttccaggccatggcgtatgatctgctggacatagagcaggacacatacaggtctgcagacttggaacccgtccccacccttgccactgacctggttccccagtcctcagctcccctgacccccaggctccctccttcctccccaggtatgagaccaccgggctgagcgaggcgcgggagaaggccgtcttgctggacgaggacgatgacttgtgggtggagcttcgccacatgcatatcgcagatgtgtccaagtgcgtgcacacggggaccggatcccccccccaccgcccactgtgggcctggtagcggccttgggatccctggctgctgccaagtctttggccctcatgagcacccctcgtgtgactccagactggcctccaatttcaccccacctctccctgtcccccctgagtgggctcacccatggcctgtggctcctctcccctcactctcacccccgcccaccctcatggccaggaaggtcacggagctcctgaggaccttctgtgagagcaagaggctgaccacggacaaggtaggggcggacccaggtcaccaaaggcgctggtggaaggaagcccccctccccatgggcgcagggccacagcctggatttcgagcctggactgagacccaggtgggcactgcctggcttcgccccccaatccctaccctcttccccctacttccccaggcgaacatcaaagacctatcccagatcctgaaaaagatgccgcagtaccagaaggagctgaataaggtgtgctcgggtgggcagggagcggggacacctcggcccctcaaccccatgctctgtctgcgttctgccttgactcagcctttgttatcccccaacccccaccctgcaccctgcagtattctacgcacctgcatctagcagatgattgtatgaagcacttca

SEQ ID NO: 14255 - DNA, 747 bp, Homo sapiens
gtacccggccatccgctaccgcaagggcccagaggacacagcccagttggcccacgccgtcctggccaagctgaacgccttcaaggcagacactcccagtctgggcgagggcccagagaaaacccgctcccagctgctgataatggaccgggcagctgaccccgtgtccccactactgcatgagctcacgttccaggccatggcgtatgatctgctggacatagagcaggacacatacaggtatgagaccaccgggctgagcgaggcgcgggagaaggccgtcttgctggacgaggacgatgacttgtgggtggagcttcgccacatgcatatcgcagatgtgtccaagtgcgtgcacacggggaccggatcccccccccaccgcccactgtgggcctggtagcggccttgggatccctggctgctgccaagtctttggccctcatgagcacccctcgtgtgactccagactggcctccaatttcaccccacctctccctgtcccccctgagtgggctcacccatggcctgtggctcctctcccctcactctcacccccgcccaccctcatggccaggaaggtcacggagctcctgaggaccttctgtgagagcaagaggctgaccacggacaaggcgaacatcaaagacctatcccagatcctgaaaaagatgccgcagtaccagaaggagctgaataagtattctacgcacctgcatctagcagatgattgtatgaagcacttca

SEQ ID NO: 14256 - DNA, 3044 bp, Homo sapiens
acacacccggaagcggcggcggcgcccctcggggaagatggcgccctcggggctgaaggcggtggtgggggaaagtgagtgcctctccggggccgggctctggcgtccggtgtgggacgggggtcggggacgcacgggctctgggatcctgggtttcatggcggctgggagttgggggccgggctgggcgtccgagcacctgaccctcgagggggcgggcggggacgggttcccagctggacgcccctgctctccggtgccagaacagaacaaaattggggggccggactccggggacccaaaggggacgggtagagtgtggcggaggctggggcccggactcctgggcctcctagggtgcctgccgggggaggagggcacagctggatgcccacactctaggatctcttaagccgggcaaagttcaggggctggattcttggggcctcctagggctctggtcagcgaccctaggtgctgtgagcgctcaggggacgtgtccaggccccacaggggtggtgtaggggatgtcttcctccttgccccatttccaggagcgccttgcagctggaggacgcaggcgtccaggcctcaccggccccggttcttgggggaagggtggagggcgcctcttcctccaccccggggagttccggcctcagctgctccttccgccctggccgtcttgataacagtggacatgacacagtggacgtggctgggcggggccaccccgttacttctctccactctctcctctaggcagggcggtctgtagctcaaacccctttaattgggggagattagaaaaaagtgattccattttacagatgaggaaactgagaccggaggtcagtgggatagcctcagctaggcatgcctcagagctgggaaccaggggtcctacattttagaccaggttggggggactggctgaaaccctcacagcaggaatacttgaggtagcaggtggggaagccgagagcctggcgctagaggcagatagagctgtagatgatcccggttctcctcttttcattcacctaaaacatgtttatcgagtggcaccttttgccccagcactctgccacttagacactcaggatgcgtaggtgagttacatgttgcctaagaatctgtttccctgtctgtaaattgggggtgaccccagaagccaatttgcagaactgggggctaaaaataaatgattcctgtgccgtgtctcacacctgtaatcccagcactttgggaggccgaggcaggaggactgcttgaggccaaaagtttgagaccagcttgggcaacatagcgagaccccatctatacagaaataaaaataaattagctgtgggtggtacatgcacctgtagtcccagctactcgggaggctgaggcaagaggatcgctggagcccaggagttggaggccgcagtgagttatgatcacaccactgcactttagcctaggtgacagagtgagatcctcctctcttaaaaaaaaaaaaaaagtaaatgggaattaagatgggggttcagccccaaggctgagaaggcttggggcagtggtgggaccagagaaccagcattctgacccctcccctcccttccctgcagaaattctgagcggagttattcggagtgtcaagaaggatggggagtggaaggtaggggtgaggcagatggctgggtacccagaggcagctcatcatcaggcctatggggaagaccctgaatgtgggacccccaagaactgcctgtccacatgggtggagttgggtgaatgggttctgggtcctcccacccagccagcccttgaaactgcccctcccactgccttggccccttctggggccagctgtggcctcttccgcctgctcctccatccatctgtccatccatctggacaggtgcttatcatggatcacccaagcatgcgcatcttgtcttcctgctgcaaaatgtcagatatcctggctgagggcatcaccagtgagtgaacgcgtccccagtgagatgggacctgagcgtgggaacccctgactgtgcccctctcccagggttcagcccttgagtgtaggatcccctcaaatcgtccagaactcccaagtacgcagctccctgcacggacagcccggatcatgtgaccaaatccattcttaaaccttgcaagctgactgcgggagcccatggattgcaggcctcccctgcagcactccctggctgcagccccttcctgaccgtgcagctccctcgtggagccctgtgtgggactcccagggtggactctggatgtggggtcccaagaatgcagagccttctatgggtgaccccaggtggtgtcccagtcactttgccattgagggataggtgctgagggagcctgtcctctcagaacctcagtctccctgtctgtaaatttggggaacccagttggctgcacaacccctgcagaaccctgtcgtgtggctcttagctggtggtccctaagtgggtttctcctgcagtccctcctaagcatccacccctcctccccaagcctccaaccccccacacctgagactccccacgtggccctgcctggatgccacccacctgtgtcccttcctctgttcctactagttgttgaagacatcaacaaacggcgggaacccattcccagtctggaggccatttatttgctgagccccacggagaaggtgcctacatgagtgagcgtgtgtgtatgcgcgtgcatgcgtgtacatgtgcatgtgtgtgtatgtctgcatgcatgtgattgcatgtgtgcatgtgtatacgtgtgcatgtgtccatgtgtatgtgtgtgcatgtgtgtgcatgtgtgtgtgcatctgtgtatgcatgtgtgtgcgtgtttgcatgtgtgtctatgtatgtgtctgtgtgcatgtgcatgtgtgtgcgtctgtgtgtgcatttgtgtgtatgtgtgtatgcgtgtgtgtctgtgggtctgtgtgtgcatttgtgtctgtgcatgtgtgtatgcgtgtgtatgtatgtgtgtgtgcatctgtgtgcatc

SEQ ID NO: 14257 - DNA, 632 bp, Homo sapiens
acacacccggaagcggcggcggcgcccctcggggaagatggcgccctcggggctgaaggcggtggtgggggaaaaaattctgagcggagttattcggagtgtcaagaaggatggggagtggaaggtgcttatcatggatcacccaagcatgcgcatcttgtcttcctgctgcaaaatgtcagatatcctggctgagggcatcaccattgttgaagacatcaacaaacggcgggaacccattcccagtctggaggccatttatttgctgagccccacggagaaggtgcctacatgagtgagcgtgtgtgtatgcgcgtgcatgcgtgtacatgtgcatgtgtgtgtatgtctgcatgcatgtgattgcatgtgtgcatgtgtatacgtgtgcatgtgtccatgtgtatgtgtgtgcatgtgtgtgcatgtgtgtgtgcatctgtgtatgcatgtgtgtgcgtgtttgcatgtgtgtctatgtatgtgtctgtgtgcatgtgcatgtgtgtgcgtctgtgtgtgcatttgtgtgtatgtgtgtatgcgtgtgtgtctgtgggtctgtgtgtgcatttgtgtctgtgcatgtgtgtatgcgtgtgtatgtatgtgtgtgtgcatctgtgtgcatc

SEQ ID NO: 14258 - DNA, 3360 bp, Homo sapiens
atgtcctcttgccgaggatcctggggatgtccttggcccgcctctcccatccccttccctgacacatagcggccggtggacggctgaccccatgcccgcaggacctggccatgggctccgacgcagagggggagaagatcaaggactccatgaagctgatcgttccggtgctgctggacgcggcggtgcccgcctacgacaagatccgggtcctgctgctctacatcctccttcggaatggtgggtgggggctgcagggagttggaacgtccccatttgccagcgtctcccacgatcctgggaactgctgaaccccacagctctccttgggtcatttgcactcaccgggctcaccaacccccacagctacccctctggacccgggaaccctcctccattggcttggggattcctccactgaggtgagggctccctgctaacgtagaaaccctcacatctgtgattcctatagatgtggggctccctcagctcatctggaggagcccctgatctaccccctccaggtttcccactcttgctcacactagcacagggtactgaggccctccccactgcaaggttctctcatcagagtcctgggagctcctcagcccaccccaaactcccctaaacctgggagctcacctggccgccgcctccaccctgcccattcccgtcccccaggtgtgagtgaggagaacctggccaagctgatccagcatgccaatgtacaggcgcacagcagcctcatccgtaacctggagcagctgggaggcactgtcaccaaccccggggtacgccaggagcgggcatggggggaccctgggagagggtgcggatcacagccggggctctgcaaggcagagggccattggtgcacaggcacggtgtggttcctggcgtggtgtggttgctgggaggccaaaagcagtgtttcgggtctggtctggggcccagaggacactggggcctctcccagtcccagcttacacaataggcaggggaagtgagacatggtcgctgccaggctggtcctggcagtggtgcagttgggagcgggtggtctgagtgctagaggcagggagtagggtccccagcatgggggctacaccacattgtctatctgggctcccaggggtctctgagggtcccccgcacccatccagcacccacacacagccatgtgtgtgcttgactcttgggtcagcctctcctgtctctctctggccctgtgcgtccccctccagggtgccctcaccccgtccccatctctcccccatccctcatccatctcgctgtgcactgtttctccatatctctctctctcacccttctctctgccttcccctttctctctgttctctgtcttgctcccctcccctctccgtcccccttctgtccccatcttcctctctctgtttcctgcttcatctcttgtctctctctttgccttcatactttgtctcactgcttcttatctctttgcctatctctgcctctgtctttgtctttctctggctcgctctctctccctttggctttctctctccgtctctctctggctcactgtttctctctctcgctttcttgctgtctctcgctctctctcgctctctgttccacttccccatctttgcctgccatcccccaccctaccagccacaccaggcgcagcccctctgtgaccagcctccttcccctcaatccccctgctgccctccctgccctgcctgtagggctcggggacctccagccggctggagccgagagaacgcatggagcccacctatcagctgtcccgctggaccccggtcatcaaggatgtaatggaggtactgggtggcaggtcagggtgggggccagccctccgcatcggctggcggctcagcctccctcctgctgaggtgctaagcctcagggcttaggggaaaatgctcattgctggcattcccttggcaccgatctgctctgctgaggggggcacgccaagcccgcagctgaggaattggggtgacagcggggcctgtgctggggagcctcacttcctccccacctgccggctgcctccgctatatctctctagtctgttcccctgtcccgcaggagtgcccctgagccccagccctggccttcccaggatcccagggcagcaccatccaatggcaatgggcctggggcggcttcctggcttcctccttgtccctctaagagccccggcccctctttctgcgtgggggccagagacctgggcctcctcatccccatggaccttgaatacctggacttctggggctctgaggggctgagagcccagacactgggttccccaaagggctgggggtattgactgatggtccccaagggcctggaggcccagactactgggttgccgaggaactgtgggtttagacttctgggtacccaaggagttatggaattagattcgtgggtccccagtgagttatggatctagatttctaggtccccaatggactagaggcctagactcctgggtcccccagaggcaggaggtggagatgctggttcctgtctgccaggatcttggcccctgaataccccgtggggggcactcctgaccccggaccccatgcctggggttcctcccctaacctgcctctcggccgccaggacgccgtggaggaccggctggacaggaacctgtggcccttcgtatccgaccccgcccccacggccagctcccaggccgctgtcaggtgaggccccggggccgcccccgcccacgcctgggtctgtgttaggtgggcggcctggcggcggtgagggcctcctgcctggactttctgcccctgccctgcacagtgcccgcttcggtcactggcacaagaacaaggctggcatagaagcccgggcgggcccccggctcatcgtgtatgtcatgggcggtgtggccatgtcagagatgagggccgcctacgaggtgaccagggccaccgagggcaagtgggaggtgctcattggtaagtcaccaggactgggaccctggggtctggggcttgggttcccggggcctgggcttgtaccttctaggtgtctggactccagagtccttggagtcagggacctggtttgctgagggacagggacagccccacaccagccgggaccgggagcctgtcaaagacgaaggcagcgccccccaacatcttccccaaacctctgcccctgcacaggctcctcacacatcctcaccccgacccgcttcctggatgacctgaaggcactggacaagaagctggaggacattgccctgccctgacccctggccccgccccctacccctccctttccagagaaataaactcttcccgtcgctctgcc

SEQ ID NO: 14259 - DNA, 1974 bp, Homo sapiens
atgtcctcttgccgaggatcctggggatgtccttggcccgcctctcccatccccttccctgacacatagcggccggtggacggctgaccccatgcccgcaggacctggccatgggctccgacgcagagggggagaagatcaaggactccatgaagctgatcgttccggtgctgctggacgcggcggtgcccgcctacgacaagatccgggtcctgctgctctacatcctccttcggaatggtgtgagtgaggagaacctggccaagctgatccagcatgccaatgtacaggcgcacagcagcctcatccgtaacctggagcagctgggaggcactgtcaccaaccccgggggctcggggacctccagccggctggagccgagagaacgcatggagcccacctatcagctgtcccgctggaccccggtcatcaaggatgtaatggaggtactgggtggcaggtcagggtgggggccagccctccgcatcggctggcggctcagcctccctcctgctgaggtgctaagcctcagggcttaggggaaaatgctcattgctggcattcccttggcaccgatctgctctgctgaggggggcacgccaagcccgcagctgaggaattggggtgacagcggggcctgtgctggggagcctcacttcctccccacctgccggctgcctccgctatatctctctagtctgttcccctgtcccgcaggagtgcccctgagccccagccctggccttcccaggatcccagggcagcaccatccaatggcaatgggcctggggcggcttcctggcttcctccttgtccctctaagagccccggcccctctttctgcgtgggggccagagacctgggcctcctcatccccatggaccttgaatacctggacttctggggctctgaggggctgagagcccagacactgggttccccaaagggctgggggtattgactgatggtccccaagggcctggaggcccagactactgggttgccgaggaactgtgggtttagacttctgggtacccaaggagttatggaattagattcgtgggtccccagtgagttatggatctagatttctaggtccccaatggactagaggcctagactcctgggtcccccagaggcaggaggtggagatgctggttcctgtctgccaggatcttggcccctgaataccccgtggggggcactcctgaccccggaccccatgcctggggttcctcccctaacctgcctctcggccgccaggacgccgtggaggaccggctggacaggaacctgtggcccttcgtatccgaccccgcccccacggccagctcccaggccgctgtcaggtgaggccccggggccgcccccgcccacgcctgggtctgtgttaggtgggcggcctggcggcggtgagggcctcctgcctggactttctgcccctgccctgcacagtgcccgcttcggtcactggcacaagaacaaggctggcatagaagcccgggcgggcccccggctcatcgtgtatgtcatgggcggtgtggccatgtcagagatgagggccgcctacgaggtgaccagggccaccgagggcaagtgggaggtgctcattggtaagtcaccaggactgggaccctggggtctggggcttgggttcccggggcctgggcttgtaccttctaggtgtctggactccagagtccttggagtcagggacctggtttgctgagggacagggacagccccacaccagccgggaccgggagcctgtcaaagacgaaggcagcgccccccaacatcttccccaaacctctgcccctgcacaggctcctcacacatcctcaccccgacccgcttcctggatgacctgaaggcactggacaagaagctggaggacattgccctgccctgacccctggccccgccccctacccctccctttccagagaaataaactcttcccgtcgctctgcc

SEQ ID NO: 14260 - DNA, 1029 bp, Homo sapiens
cagctgaccccgtgtccccactactgcatgagctcacgttccaggccatggcgtatgatctgctggacatagagcaggacacatacaggtctgcagacttggaacccgtccccacccttgccactgacctggttccccagtcctcagctcccctgacccccaggctccctccttcctccccaggtatgagaccaccgggctgagcgaggcgcgggagaaggccgtcttgctggacgaggacgatgacttgtgggtggagcttcgccacatgcatatcgcagatgtgtccaagtgcgtgcacacggggaccggatcccccccccaccgcccactgtgggcctggtagcggccttgggatccctggctgctgccaagtctttggccctcatgagcacccctcgtgtgactccagactggcctccaatttcaccccacctctccctgtcccccctgagtgggctcacccatggcctgtggctcctctcccctcactctcacccccgcccaccctcatggccaggaaggtcacggagctcctgaggaccttctgtgagagcaagaggctgaccacggacaaggtaggggcggacccaggtcaccaaaggcgctggtggaaggaagcccccctccccatgggcgcagggccacagcctggatttcgagcctggactgagacccaggtgggcactgcctggcttcgccccccaatccctaccctcttccccctacttccccaggcgaacatcaaagacctatcccagatcctgaaaaagatgccgcagtaccagaaggagctgaataaggtgtgctcgggtgggcagggagcggggacacctcggcccctcaaccccatgctctgtctgcgttctgccttgactcagcctttgttatcccccaacccccaccctgcaccctgcagtattctacgcacctgcatctagcagatgattgtatgaagcacttcaagggctcggtggagaagctgtgtagtgtggagcaggtggggcagggcttgcggggggcaggggt

SEQ ID NO: 14261 - DNA, 430 bp, Homo sapiens
cagctgaccccgtgtccccactactgcatgagctcacgttccaggccatggcgtatgatctgctggacatagagcaggacacatacaggtatgagaccaccgggctgagcgaggcgcgggagaaggccgtcttgctggacgaggacgatgacttgtgggtggagcttcgccacatgcatatcgcagatgtgtccaagaaggtcacggagctcctgaggaccttctgtgagagcaagaggctgaccacggacaaggcgaacatcaaagacctatcccagatcctgaaaaagatgccgcagtaccagaaggagctgaataagtattctacgcacctgcatctagcagatgattgtatgaagcacttcaagggctcggtggagaagctgtgtagtgtggagcaggtggggcagggcttgcggggggcaggggt

SEQ ID NO: 14262 - DNA, 5014 bp, Homo sapiens
accttgggacacacccggaagcggcggcggcgcccctcggggaagatggcgccctcggggctgaaggcggtggtgggggaaagtgagtgcctctccggggccgggctctggcgtccggtgtgggacgggggtcggggacgcacgggctctgggatcctgggtttcatggcggctgggagttgggggccgggctgggcgtccgagcacctgaccctcgagggggcgggcggggacgggttcccagctggacgcccctgctctccggtgccagaacagaacaaaattggggggccggactccggggacccaaaggggacgggtagagtgtggcggaggctggggcccggactcctgggcctcctagggtgcctgccgggggaggagggcacagctggatgcccacactctaggatctcttaagccgggcaaagttcaggggctggattcttggggcctcctagggctctggtcagcgaccctaggtgctgtgagcgctcaggggacgtgtccaggccccacaggggtggtgtaggggatgtcttcctccttgccccatttccaggagcgccttgcagctggaggacgcaggcgtccaggcctcaccggccccggttcttgggggaagggtggagggcgcctcttcctccaccccggggagttccggcctcagctgctccttccgccctggccgtcttgataacagtggacatgacacagtggacgtggctgggcggggccaccccgttacttctctccactctctcctctaggcagggcggtctgtagctcaaacccctttaattgggggagattagaaaaaagtgattccattttacagatgaggaaactgagaccggaggtcagtgggatagcctcagctaggcatgcctcagagctgggaaccaggggtcctacattttagaccaggttggggggactggctgaaaccctcacagcaggaatacttgaggtagcaggtggggaagccgagagcctggcgctagaggcagatagagctgtagatgatcccggttctcctcttttcattcacctaaaacatgtttatcgagtggcaccttttgccccagcactctgccacttagacactcaggatgcgtaggtgagttacatgttgcctaagaatctgtttccctgtctgtaaattgggggtgaccccagaagccaatttgcagaactgggggctaaaaataaatgattcctgtgccgtgtctcacacctgtaatcccagcactttgggaggccgaggcaggaggactgcttgaggccaaaagtttgagaccagcttgggcaacatagcgagaccccatctatacagaaataaaaataaattagctgtgggtggtacatgcacctgtagtcccagctactcgggaggctgaggcaagaggatcgctggagcccaggagttggaggccgcagtgagttatgatcacaccactgcactttagcctaggtgacagagtgagatcctcctctcttaaaaaaaaaaaaaaagtaaatgggaattaagatgggggttcagccccaaggctgagaaggcttggggcagtggtgggaccagagaaccagcattctgacccctcccctcccttccctgcagaaattctgagcggagttattcggagtgtcaagaaggatggggagtggaaggtaggggtgaggcagatggctgggtacccagaggcagctcatcatcaggcctatggggaagaccctgaatgtgggacccccaagaactgcctgtccacatgggtggagttgggtgaatgggttctgggtcctcccacccagccagcccttgaaactgcccctcccactgccttggccccttctggggccagctgtggcctcttccgcctgctcctccatccatctgtccatccatctggacaggtgcttatcatggatcacccaagcatgcgcatcttgtcttcctgctgcaaaatgtcagatatcctggctgagggcatcaccagtgagtgaacgcgtccccagtgagatgggacctgagcgtgggaacccctgactgtgcccctctcccagggttcagcccttgagtgtaggatcccctcaaatcgtccagaactcccaagtacgcagctccctgcacggacagcccggatcatgtgaccaaatccattcttaaaccttgcaagctgactgcgggagcccatggattgcaggcctcccctgcagcactccctggctgcagccccttcctgaccgtgcagctccctcgtggagccctgtgtgggactcccagggtggactctggatgtggggtcccaagaatgcagagccttctatgggtgaccccaggtggtgtcccagtcactttgccattgagggataggtgctgagggagcctgtcctctcagaacctcagtctccctgtctgtaaatttggggaacccagttggctgcacaacccctgcagaaccctgtcgtgtggctcttagctggtggtccctaagtgggtttctcctgcagtccctcctaagcatccacccctcctccccaagcctccaaccccccacacctgagactccccacgtggccctgcctggatgccacccacctgtgtcccttcctctgttcctactagttgttgaagacatcaacaaacggcgggaacccattcccagtctggaggccatttatttgctgagccccacggagaaggtgcctacatgagtgagcgtgtgtgtatgcgcgtgcatgcgtgtacatgtgcatgtgtgtgtatgtctgcatgcatgtgattgcatgtgtgcatgtgtatacgtgtgcatgtgtccatgtgtatgtgtgtgcatgtgtgtgcatgtgtgtgtgcatctgtgtatgcatgtgtgtgcgtgtttgcatgtgtgtctatgtatgtgtctgtgtgcatgtgcatgtgtgtgcgtctgtgtgtgcatttgtgtgtatgtgtgtatgcgtgtgtgtctgtgggtctgtgtgtgcatttgtgtctgtgcatgtgtgtatgcgtgtgtatgtatgtgtgtgtgcatctgtgtgcatctgtatgtgtgtgtgtgcgtctgtctgtgtgcatgtgtgtatgcgtgtgtatgtatgtgtctgcgtctgtgtgtgcgtctgtgtgtatctgtgtgtgcatgtgtgtatgcgtgtatatgtatgtgcatctgtgtgcatgtgtctatgtatgtgtgtgcatctgtgtgtgcgtgtgtatgcgtgtgtgtatgcgtctgtgcatgtgtgtatgcgtgtgtgtgcgcatcagtgtctgcatgtgtgtatatgtgtgtatgtatgtgtgcgcgcgcatctgtgtgtgtgcatgtgtgtatgtatgtgtgtgcatctctgtgtgtgcatgtgtgtatgtgtgtgtgcatctgtgtgtgtgtgcatgtgtgcatgcgtgtgtatgtgtgtgtgcgtgcgtgcatctgtgtgtgtgcgcgtgtgcccatgtgggtgcgacactagtgtgcatttgcacatatacatgtccccgtccgtccatgtttgcacatggtggcagatggggggtggctgggaggcctaggcagccaatgagcctaggtgtgcaggctcaggcccagagagtgatccaccttccccagtcggttcaggccctgatcaaagacttccaggggaccccgactttcacctacaaagcggcccatatcttcttcaccgacagtgagtgaggagagcctagggtgttggtgggtggggcaaggaggtgtgggggctgctctggcctgatgccccactcctgcctcaccccagcctgccccgagcccctgttcagtgagctaggccgctctcgtctggcaaaggtggtgaagacgttgaaggagattcaccttgccttcctcccctacgaggcccaggtacggcccgggctcatcctgggcagggggtgggggtttgtgaccaaatgtcccctgttccctcagaaacagacactgaggctgggcgcagtggctcatacctgtaatcccagcgctgtgggaggccagggcaggaggatcacttggggccaggagtttgagaccagcctgggtacagagcaagaccccgtctcttaaaaaaagaaaaagaaagaaattagcttggcgtggtggcgtgcacctgtagtcctagctactcatggggctggggtgggagagtcgcttgagcccgggaggtcgaggctgcagtgagctatgattgcactgctgccctccagcctgggcgacagagcgagatcctgtctcaaaaacatacataaagtaaaattttaaaaaggggaggtacccacagagtccaaggagctcttgccttgagttctatcccactaggcccttgcagggggcagcgtagagcgcaccgcggggttgtccagccagcttaagggacacgggctggggtatttatccactgactcctgcaggcatgggtttagggttgacctgggcctgcctccaattcggcaaagcaggcttcagggaccagggacggctcccaggaggtgcaggtggcggcagcgggaagcggggcaggtgtgcacctgcagcggcaaccctggtgcttctgtcccctcctcgcccaggtgttctccctcgatgctccccacagcacctacaacctctactgccccttccgggcagaggagcgcacgcggcagctcgaggtgctggcccagcagattgccacgctgtgcgccaccctgcaggagtacccggccatccgctaccgcaagtggggaccccacccagccccaccccgatgccgacccccccttaaccgcgtgcaacacctaacctttaacctctcttgtgaccccagccccggccctaccctggcccctgactctcaccttcaaacccatccttgaccccatcccctgatgatgtcccccgtgtctgacctccccgccaggggcccagaggacacagcccagttggcccacgccgtcctggccaagctgaacgccttcaaggcagacactcccagtctgggcgag

SEQ ID NO: 14263 - DNA, 552 bp, Homo sapiens
accttgggacacacccggaagcggcggcggcgcccctcggggaagatggcgccctcggggctgaaggcggtggtgggggaaaaaattctgagcggagttattcggagtgtcaagaaggatggggagtggaaggtgcttatcatggatcacccaagcatgcgcatcttgtcttcctgctgcaaaatgtcagatatcctggctgagggcatcaccacctgccccgagcccctgttcagtgagctaggccgctctcgtctggcaaaggtggtgaagacgttgaaggagattcaccttgccttcctcccctacgaggcccaggtgttctccctcgatgctccccacagcacctacaacctctactgccccttccgggcagaggagcgcacgcggcagctcgaggtgctggcccagcagattgccacgctgtgcgccaccctgcaggagtacccggccatccgctaccgcaagggcccagaggacacagcccagttggcccacgccgtcctggccaagctgaacgccttcaaggcagacactcccagtctgggcgag

SEQ ID NO: 14264 - DNA, 10689 bp, Homo sapiens
gaagcggcggcggcgcccctcggggaagatggcgccctcggggctgaaggcggtggtgggggaaagtgagtgcctctccggggccgggctctggcgtccggtgtgggacgggggtcggggacgcacgggctctgggatcctgggtttcatggcggctgggagttgggggccgggctgggcgtccgagcacctgaccctcgagggggcgggcggggacgggttcccagctggacgcccctgctctccggtgccagaacagaacaaaattggggggccggactccggggacccaaaggggacgggtagagtgtggcggaggctggggcccggactcctgggcctcctagggtgcctgccgggggaggagggcacagctggatgcccacactctaggatctcttaagccgggcaaagttcaggggctggattcttggggcctcctagggctctggtcagcgaccctaggtgctgtgagcgctcaggggacgtgtccaggccccacaggggtggtgtaggggatgtcttcctccttgccccatttccaggagcgccttgcagctggaggacgcaggcgtccaggcctcaccggccccggttcttgggggaagggtggagggcgcctcttcctccaccccggggagttccggcctcagctgctccttccgccctggccgtcttgataacagtggacatgacacagtggacgtggctgggcggggccaccccgttacttctctccactctctcctctaggcagggcggtctgtagctcaaacccctttaattgggggagattagaaaaaagtgattccattttacagatgaggaaactgagaccggaggtcagtgggatagcctcagctaggcatgcctcagagctgggaaccaggggtcctacattttagaccaggttggggggactggctgaaaccctcacagcaggaatacttgaggtagcaggtggggaagccgagagcctggcgctagaggcagatagagctgtagatgatcccggttctcctcttttcattcacctaaaacatgtttatcgagtggcaccttttgccccagcactctgccacttagacactcaggatgcgtaggtgagttacatgttgcctaagaatctgtttccctgtctgtaaattgggggtgaccccagaagccaatttgcagaactgggggctaaaaataaatgattcctgtgccgtgtctcacacctgtaatcccagcactttgggaggccgaggcaggaggactgcttgaggccaaaagtttgagaccagcttgggcaacatagcgagaccccatctatacagaaataaaaataaattagctgtgggtggtacatgcacctgtagtcccagctactcgggaggctgaggcaagaggatcgctggagcccaggagttggaggccgcagtgagttatgatcacaccactgcactttagcctaggtgacagagtgagatcctcctctcttaaaaaaaaaaaaaaagtaaatgggaattaagatgggggttcagccccaaggctgagaaggcttggggcagtggtgggaccagagaaccagcattctgacccctcccctcccttccctgcagaaattctgagcggagttattcggagtgtcaagaaggatggggagtggaaggtaggggtgaggcagatggctgggtacccagaggcagctcatcatcaggcctatggggaagaccctgaatgtgggacccccaagaactgcctgtccacatgggtggagttgggtgaatgggttctgggtcctcccacccagccagcccttgaaactgcccctcccactgccttggccccttctggggccagctgtggcctcttccgcctgctcctccatccatctgtccatccatctggacaggtgcttatcatggatcacccaagcatgcgcatcttgtcttcctgctgcaaaatgtcagatatcctggctgagggcatcaccagtgagtgaacgcgtccccagtgagatgggacctgagcgtgggaacccctgactgtgcccctctcccagggttcagcccttgagtgtaggatcccctcaaatcgtccagaactcccaagtacgcagctccctgcacggacagcccggatcatgtgaccaaatccattcttaaaccttgcaagctgactgcgggagcccatggattgcaggcctcccctgcagcactccctggctgcagccccttcctgaccgtgcagctccctcgtggagccctgtgtgggactcccagggtggactctggatgtggggtcccaagaatgcagagccttctatgggtgaccccaggtggtgtcccagtcactttgccattgagggataggtgctgagggagcctgtcctctcagaacctcagtctccctgtctgtaaatttggggaacccagttggctgcacaacccctgcagaaccctgtcgtgtggctcttagctggtggtccctaagtgggtttctcctgcagtccctcctaagcatccacccctcctccccaagcctccaaccccccacacctgagactccccacgtggccctgcctggatgccacccacctgtgtcccttcctctgttcctactagttgttgaagacatcaacaaacggcgggaacccattcccagtctggaggccatttatttgctgagccccacggagaaggtgcctacatgagtgagcgtgtgtgtatgcgcgtgcatgcgtgtacatgtgcatgtgtgtgtatgtctgcatgcatgtgattgcatgtgtgcatgtgtatacgtgtgcatgtgtccatgtgtatgtgtgtgcatgtgtgtgcatgtgtgtgtgcatctgtgtatgcatgtgtgtgcgtgtttgcatgtgtgtctatgtatgtgtctgtgtgcatgtgcatgtgtgtgcgtctgtgtgtgcatttgtgtgtatgtgtgtatgcgtgtgtgtctgtgggtctgtgtgtgcatttgtgtctgtgcatgtgtgtatgcgtgtgtatgtatgtgtgtgtgcatctgtgtgcatctgtatgtgtgtgtgtgcgtctgtctgtgtgcatgtgtgtatgcgtgtgtatgtatgtgtctgcgtctgtgtgtgcgtctgtgtgtatctgtgtgtgcatgtgtgtatgcgtgtatatgtatgtgcatctgtgtgcatgtgtctatgtatgtgtgtgcatctgtgtgtgcgtgtgtatgcgtgtgtgtatgcgtctgtgcatgtgtgtatgcgtgtgtgtgcgcatcagtgtctgcatgtgtgtatatgtgtgtatgtatgtgtgcgcgcgcatctgtgtgtgtgcatgtgtgtatgtatgtgtgtgcatctctgtgtgtgcatgtgtgtatgtgtgtgtgcatctgtgtgtgtgtgcatgtgtgcatgcgtgtgtatgtgtgtgtgcgtgcgtgcatctgtgtgtgtgcgcgtgtgcccatgtgggtgcgacactagtgtgcatttgcacatatacatgtccccgtccgtccatgtttgcacatggtggcagatggggggtggctgggaggcctaggcagccaatgagcctaggtgtgcaggctcaggcccagagagtgatccaccttccccagtcggttcaggccctgatcaaagacttccaggggaccccgactttcacctacaaagcggcccatatcttcttcaccgacagtgagtgaggagagcctagggtgttggtgggtggggcaaggaggtgtgggggctgctctggcctgatgccccactcctgcctcaccccagcctgccccgagcccctgttcagtgagctaggccgctctcgtctggcaaaggtggtgaagacgttgaaggagattcaccttgccttcctcccctacgaggcccaggtacggcccgggctcatcctgggcagggggtgggggtttgtgaccaaatgtcccctgttccctcagaaacagacactgaggctgggcgcagtggctcatacctgtaatcccagcgctgtgggaggccagggcaggaggatcacttggggccaggagtttgagaccagcctgggtacagagcaagaccccgtctcttaaaaaaagaaaaagaaagaaattagcttggcgtggtggcgtgcacctgtagtcctagctactcatggggctggggtgggagagtcgcttgagcccgggaggtcgaggctgcagtgagctatgattgcactgctgccctccagcctgggcgacagagcgagatcctgtctcaaaaacatacataaagtaaaattttaaaaaggggaggtacccacagagtccaaggagctcttgccttgagttctatcccactaggcccttgcagggggcagcgtagagcgcaccgcggggttgtccagccagcttaagggacacgggctggggtatttatccactgactcctgcaggcatgggtttagggttgacctgggcctgcctccaattcggcaaagcaggcttcagggaccagggacggctcccaggaggtgcaggtggcggcagcgggaagcggggcaggtgtgcacctgcagcggcaaccctggtgcttctgtcccctcctcgcccaggtgttctccctcgatgctccccacagcacctacaacctctactgccccttccgggcagaggagcgcacgcggcagctcgaggtgctggcccagcagattgccacgctgtgcgccaccctgcaggagtacccggccatccgctaccgcaagtggggaccccacccagccccaccccgatgccgacccccccttaaccgcgtgcaacacctaacctttaacctctcttgtgaccccagccccggccctaccctggcccctgactctcaccttcaaacccatccttgaccccatcccctgatgatgtcccccgtgtctgacctccccgccaggggcccagaggacacagcccagttggcccacgccgtcctggccaagctgaacgccttcaaggcagacactcccagtctgggcgaggtgagggggcgtgcttgggaggtgaggggcagccccaaccggctcagggtcagtgcctcattcctgccctaaaccccaccccagggcccagagaaaacccgctcccagctgctgataatggaccgggcagctgaccccgtgtccccactactgcatgagctcacgttccaggccatggcgtatgatctgctggacatagagcaggacacatacaggtctgcagacttggaacccgtccccacccttgccactgacctggttccccagtcctcagctcccctgacccccaggctccctccttcctccccaggtatgagaccaccgggctgagcgaggcgcgggagaaggccgtcttgctggacgaggacgatgacttgtgggtggagcttcgccacatgcatatcgcagatgtgtccaagtgcgtgcacacggggaccggatcccccccccaccgcccactgtgggcctggtagcggccttgggatccctggctgctgccaagtctttggccctcatgagcacccctcgtgtgactccagactggcctccaatttcaccccacctctccctgtcccccctgagtgggctcacccatggcctgtggctcctctcccctcactctcacccccgcccaccctcatggccaggaaggtcacggagctcctgaggaccttctgtgagagcaagaggctgaccacggacaaggtaggggcggacccaggtcaccaaaggcgctggtggaaggaagcccccctccccatgggcgcagggccacagcctggatttcgagcctggactgagacccaggtgggcactgcctggcttcgccccccaatccctaccctcttccccctacttccccaggcgaacatcaaagacctatcccagatcctgaaaaagatgccgcagtaccagaaggagctgaataaggtgtgctcgggtgggcagggagcggggacacctcggcccctcaaccccatgctctgtctgcgttctgccttgactcagcctttgttatcccccaacccccaccctgcaccctgcagtattctacgcacctgcatctagcagatgattgtatgaagcacttcaagggctcggtggagaagctgtgtagtgtggagcaggtggggcagggcttgcggggggcaggggtgatggtcctgccaaggcggggtattggggaggggctgaactgtagagatggggggttctgggggaggggcagggcttgtggagaggtggaggggccttggagagaggtgggacctggtggggaaggagtgggtcttgtggagaaacggtcctaggatgagggtgtggcctgtgcataggtggatggggcttggagaggtcagacttgggtgaggggcagagccttggacaggtggtcccaggacaggaatgtggcctattcataggtgggtgggaccttggagaggtaggcagggccttggagaggtgcgacctgggagaggaatggagccttggagaggtgggacctgggtgaggggcagagccttggagaggtgggacctgggagaggaatggagccttggagaggtgggccctgggagaggggcggagccttggagaggtgggacctgggtgaggggcggagccttggagaggtgggacctgggtgaggggtggaaccttggagaggtgggacctggatgaggggtggaaccttggaggggtgggacctgggagaggggtggagccttaagagaggtgggacctgggagaggggcggagccttggagaggtgggacctgagtgaggggtggggccttggagaggtaggagctgggagacaggtagagccatggagaggtgggatctgggtgaggcacggggccttggagaggtgggacctgggtgaggggtggaacctcggagaggtgggacctgggtgaggggtggagccttggagaggtgggacctgggtgaggggtggagccttggagagctgggacctgggtgaggggtggagccttggagaggtgggacttgggtgaggggtggagccttggagaggtgggacctgggtgaggggtggagcctcggagaggtgggacctgggtgaggtgtggaacctcggagaggtgggacctgggtgaggggtggaacctcggagaggtgggacctgggtgaggggtggagcctcggagagctgggacctgggtgaggggtggagccttggagagctgggacctgggtgaggggtggagccttggagaggtagtctcaggatagtggtgtgacctgtgtgtaggtgggtggggcactggaaaggtgggacctgggtgaggagcagggcctgtggagagactgtccctggacaggggtgggaccttgagagacctggtgctgagatgaggtaggacccaaatgtcctcttgccgaggatcctggggatgtccttggcccgcctctcccatccccttccctgacacatagcggccggtggacggctgaccccatgcccgcaggacctggccatgggctccgacgcagagggggagaagatcaaggactccatgaagctgatcgttccggtgctgctggacgcggcggtgcccgcctacgacaagatccgggtcctgctgctctacatcctccttcggaatggtgggtgggggctgcagggagttggaacgtccccatttgccagcgtctcccacgatcctgggaactgctgaaccccacagctctccttgggtcatttgcactcaccgggctcaccaacccccacagctacccctctggacccgggaaccctcctccattggcttggggattcctccactgaggtgagggctccctgctaacgtagaaaccctcacatctgtgattcctatagatgtggggctccctcagctcatctggaggagcccctgatctaccccctccaggtttcccactcttgctcacactagcacagggtactgaggccctccccactgcaaggttctctcatcagagtcctgggagctcctcagcccaccccaaactcccctaaacctgggagctcacctggccgccgcctccaccctgcccattcccgtcccccaggtgtgagtgaggagaacctggccaagctgatccagcatgccaatgtacaggcgcacagcagcctcatccgtaacctggagcagctgggaggcactgtcaccaaccccggggtacgccaggagcgggcatggggggaccctgggagagggtgcggatcacagccggggctctgcaaggcagagggccattggtgcacaggcacggtgtggttcctggcgtggtgtggttgctgggaggccaaaagcagtgtttcgggtctggtctggggcccagaggacactggggcctctcccagtcccagcttacacaataggcaggggaagtgagacatggtcgctgccaggctggtcctggcagtggtgcagttgggagcgggtggtctgagtgctagaggcagggagtagggtccccagcatgggggctacaccacattgtctatctgggctcccaggggtctctgagggtcccccgcacccatccagcacccacacacagccatgtgtgtgcttgactcttgggtcagcctctcctgtctctctctggccctgtgcgtccccctccagggtgccctcaccccgtccccatctctcccccatccctcatccatctcgctgtgcactgtttctccatatctctctctctcacccttctctctgccttcccctttctctctgttctctgtcttgctcccctcccctctccgtcccccttctgtccccatcttcctctctctgtttcctgcttcatctcttgtctctctctttgccttcatactttgtctcactgcttcttatctctttgcctatctctgcctctgtctttgtctttctctggctcgctctctctccctttggctttctctctccgtctctctctggctcactgtttctctctctcgctttcttgctgtctctcgctctctctcgctctctgttccacttccccatctttgcctgccatcccccaccctaccagccacaccaggcgcagcccctctgtgaccagcctccttcccctcaatccccctgctgccctccctgccctgcctgtagggctcggggacctccagccggctggagccgagagaacgcatggagcccacctatcagctgtcccgctggaccccggtcatcaaggatgtaatggaggtactgggtggcaggtcagggtgggggccagccctccgcatcggctggcggctcagcctccctcctgctgaggtgctaagcctcagggcttaggggaaaatgctcattgctggcattcccttggcaccgatctgctctgctgaggggggcacgccaagcccgcagctgaggaattggggtgacagcggggcctgtgctggggagcctcacttcctccccacctgccggctgcctccgctatatctctctagtctgttcccctgtcccgcaggagtgcccctgagccccagccctggccttcccaggatcccagggcagcaccatccaatggcaatgggcctggggcggcttcctggcttcctccttgtccctctaagagccccggcccctctttctgcgtgggggccagagacctgggcctcctcatccccatggaccttgaatacctggacttctggggctctgaggggctgagagcccagacactgggttccccaaagggctgggggtattgactgatggtccccaagggcctggaggcccagactactgggttgccgaggaactgtgggtttagacttctgggtacccaaggagttatggaattagattcgtgggtccccagtgagttatggatctagatttctaggtccccaatggactagaggcctagactcctgggtcccccagaggcaggaggtggagatgctggttcctgtctgccaggatcttggcccctgaataccccgtggggggcactcctgaccccggaccccatgcctggggttcctcccctaacctgcctctcggccgccaggacgccgtggaggaccggctggacaggaacctgtggcccttcgtatccgaccccgcccccacggccagctcccaggccgctgtcaggtgaggccccggggccgcccccgcccacgcctgggtctgtgttaggtgggcggcctggcggcggtgagggcctcctgcctggactttctgcccctgccctgcacagtgcccgcttcggtcactggcacaagaacaaggctggcatagaagcccgggcgggcccccggctcatcgtgtatgtcatgggcggtgtggccatgtcagagatgagggccgcctacgaggtgaccagggccaccgagggcaagtgggaggtgctcattggtaagtcaccaggactgggaccctggggtctggggcttgggttcccggggcctgggcttgtaccttctaggtgtctggactccagagtccttggagtcagggacctggtttgctgagggacagggacagccccacaccagccgggaccgggagcctgtcaaagacgaaggcagcgccccccaacatcttccccaaacctctgcccctgcacaggctcctcacacatcctcaccccgacccgcttcctggatgacctgaaggcactggacaagaagctggaggacattgccctgccctga

SEQ ID NO: 14265 - DNA, 1785 bp, Homo sapiens
gaagcggcggcggcgcccctcggggaagatggcgccctcggggctgaaggcggtggtgggggaaaaaattctgagcggagttattcggagtgtcaagaaggatggggagtggaaggtgcttatcatggatcacccaagcatgcgcatcttgtcttcctgctgcaaaatgtcagatatcctggctgagggcatcaccattgttgaagacatcaacaaacggcgggaacccattcccagtctggaggccatttatttgctgagccccacggagaagtcggttcaggccctgatcaaagacttccaggggaccccgactttcacctacaaagcggcccatatcttcttcaccgacacctgccccgagcccctgttcagtgagctaggccgctctcgtctggcaaaggtggtgaagacgttgaaggagattcaccttgccttcctcccctacgaggcccaggtgttctccctcgatgctccccacagcacctacaacctctactgccccttccgggcagaggagcgcacgcggcagctcgaggtgctggcccagcagattgccacgctgtgcgccaccctgcaggagtacccggccatccgctaccgcaagggcccagaggacacagcccagttggcccacgccgtcctggccaagctgaacgccttcaaggcagacactcccagtctgggcgagggcccagagaaaacccgctcccagctgctgataatggaccgggcagctgaccccgtgtccccactactgcatgagctcacgttccaggccatggcgtatgatctgctggacatagagcaggacacatacaggtatgagaccaccgggctgagcgaggcgcgggagaaggccgtcttgctggacgaggacgatgacttgtgggtggagcttcgccacatgcatatcgcagatgtgtccaagaaggtcacggagctcctgaggaccttctgtgagagcaagaggctgaccacggacaaggcgaacatcaaagacctatcccagatcctgaaaaagatgccgcagtaccagaaggagctgaataaggacctggccatgggctccgacgcagagggggagaagatcaaggactccatgaagctgatcgttccggtgctgctggacgcggcggtgcccgcctacgacaagatccgggtcctgctgctctacatcctccttcggaatgctacccctctggacccgggaaccctcctccattggcttggggattcctccactgaggtgtgagtgaggagaacctggccaagctgatccagcatgccaatgtacaggcgcacagcagcctcatccgtaacctggagcagctgggaggcactgtcaccaaccccgggggctcggggacctccagccggctggagccgagagaacgcatggagcccacctatcagctgtcccgctggaccccggtcatcaaggatgtaatggaggacgccgtggaggaccggctggacaggaacctgtggcccttcgtatccgaccccgcccccacggccagctcccaggccgctgtcagtgcccgcttcggtcactggcacaagaacaaggctggcatagaagcccgggcgggcccccggctcatcgtgtatgtcatgggcggtgtggccatgtcagagatgagggccgcctacgaggtgaccagggccaccgagggcaagtgggaggtgctcattggctcctcacacatcctcaccccgacccgcttcctggatgacctgaaggcactggacaagaagctggaggacattgccctgccctga

SEQ ID NO: 14266 - DNA, 2360 bp, Homo sapiens
accttgggacacacccggaagcggcggcggcgcccctcggggaagatggcgccctcggggctgaaggcggtggtgggggaaagtgagtgcctctccggggccgggctctggcgtccggtgtgggacgggggtcggggacgcacgggctctgggatcctgggtttcatggcggctgggagttgggggccgggctgggcgtccgagcacctgaccctcgagggggcgggcggggacgggttcccagctggacgcccctgctctccggtgccagaacagaacaaaattggggggccggactccggggacccaaaggggacgggtagagtgtggcggaggctggggcccggactcctgggcctcctagggtgcctgccgggggaggagggcacagctggatgcccacactctaggatctcttaagccgggcaaagttcaggggctggattcttggggcctcctagggctctggtcagcgaccctaggtgctgtgagcgctcaggggacgtgtccaggccccacaggggtggtgtaggggatgtcttcctccttgccccatttccaggagcgccttgcagctggaggacgcaggcgtccaggcctcaccggccccggttcttgggggaagggtggagggcgcctcttcctccaccccggggagttccggcctcagctgctccttccgccctggccgtcttgataacagtggacatgacacagtggacgtggctgggcggggccaccccgttacttctctccactctctcctctaggcagggcggtctgtagctcaaacccctttaattgggggagattagaaaaaagtgattccattttacagatgaggaaactgagaccggaggtcagtgggatagcctcagctaggcatgcctcagagctgggaaccaggggtcctacattttagaccaggttggggggactggctgaaaccctcacagcaggaatacttgaggtagcaggtggggaagccgagagcctggcgctagaggcagatagagctgtagatgatcccggttctcctcttttcattcacctaaaacatgtttatcgagtggcaccttttgccccagcactctgccacttagacactcaggatgcgtaggtgagttacatgttgcctaagaatctgtttccctgtctgtaaattgggggtgaccccagaagccaatttgcagaactgggggctaaaaataaatgattcctgtgccgtgtctcacacctgtaatcccagcactttgggaggccgaggcaggaggactgcttgaggccaaaagtttgagaccagcttgggcaacatagcgagaccccatctatacagaaataaaaataaattagctgtgggtggtacatgcacctgtagtcccagctactcgggaggctgaggcaagaggatcgctggagcccaggagttggaggccgcagtgagttatgatcacaccactgcactttagcctaggtgacagagtgagatcctcctctcttaaaaaaaaaaaaaaagtaaatgggaattaagatgggggttcagccccaaggctgagaaggcttggggcagtggtgggaccagagaaccagcattctgacccctcccctcccttccctgcagaaattctgagcggagttattcggagtgtcaagaaggatggggagtggaaggtaggggtgaggcagatggctgggtacccagaggcagctcatcatcaggcctatggggaagaccctgaatgtgggacccccaagaactgcctgtccacatgggtggagttgggtgaatgggttctgggtcctcccacccagccagcccttgaaactgcccctcccactgccttggccccttctggggccagctgtggcctcttccgcctgctcctccatccatctgtccatccatctggacaggtgcttatcatggatcacccaagcatgcgcatcttgtcttcctgctgcaaaatgtcagatatcctggctgagggcatcaccagtgagtgaacgcgtccccagtgagatgggacctgagcgtgggaacccctgactgtgcccctctcccagggttcagcccttgagtgtaggatcccctcaaatcgtccagaactcccaagtacgcagctccctgcacggacagcccggatcatgtgaccaaatccattcttaaaccttgcaagctgactgcgggagcccatggattgcaggcctcccctgcagcactccctggctgcagccccttcctgaccgtgcagctccctcgtggagccctgtgtgggactcccagggtggactctggatgtggggtcccaagaatgcagagccttctatgggtgaccccaggtggtgtcccagtcactttg

SEQ ID NO: 14267 - DNA, 821 bp, Homo sapiens
accttgggacacacccggaagcggcggcggcgcccctcggggaagatggcgccctcggggctgaaggcggtggtgggggaaaaaattctgagcggagttattcggagtgtcaagaaggatggggagtggaaggtaggggtgaggcagatggctgggtacccagaggcagctcatcatcaggcctatggggaagaccctgaatgtgggacccccaagaactgcctgtccacatgggtggagttgggtgaatgggttctgggtcctcccacccagccagcccttgaaactgcccctcccactgccttggccccttctggggccagctgtggcctcttccgcctgctcctccatccatctgtccatccatctggacaggtgcttatcatggatcacccaagcatgcgcatcttgtcttcctgctgcaaaatgtcagatatcctggctgagggcatcaccagtgagtgaacgcgtccccagtgagatgggacctgagcgtgggaacccctgactgtgcccctctcccagggttcagcccttgagtgtaggatcccctcaaatcgtccagaactcccaagtacgcagctccctgcacggacagcccggatcatgtgaccaaatccattcttaaaccttgcaagctgactgcgggagcccatggattgcaggcctcccctgcagcactccctggctgcagccccttcctgaccgtgcagctccctcgtggagccctgtgtgggactcccagggtggactctggatgtggggtcccaagaatgcagagccttctatgggtgaccccaggtggtgtcccagtcactttg

SEQ ID NO: 14268 - DNA, 401 bp, Homo sapiens
ggttcctgtctgccaggatcttggcccctgaataccccgtggggggcactcctgaccccggaccccatgcctggggttcctcccctaacctgcctctcggccgccaggacgccgtggaggaccggctggacaggaacctgtggcccttcgtatccgaccccgcccccacggccagctcccaggccgctgtcaggtgaggccccggggccgcccccgcccacgcctgggtctgtgttaggtgggcggcctggcggcggtgagggcctcctgcctggactttctgcccctgccctgcacagtgcccgcttcggtcactggcacaagaacaaggctggcatagaagcccgggcgggcccccggctcatcgtgtatgtcatgggcggtgtggccatgtcagagat

SEQ ID NO: 14269 - DNA, 295 bp, Homo sapiens
ggttcctgtctgccaggatcttggcccctgaataccccgtggggggcactcctgaccccggaccccatgcctggggttcctcccctaacctgcctctcggccgccaggacgccgtggaggaccggctggacaggaacctgtggcccttcgtatccgaccccgcccccacggccagctcccaggccgctgtcagtgcccgcttcggtcactggcacaagaacaaggctggcatagaagcccgggcgggcccccggctcatcgtgtatgtcatgggcggtgtggccatgtcagagat

SEQ ID NO: 14270 - DNA, 4624 bp, Homo sapiens
ctcggtggagaagctgtgtagtgtggagcaggtggggcagggcttgcggggggcaggggtgatggtcctgccaaggcggggtattggggaggggctgaactgtagagatggggggttctgggggaggggcagggcttgtggagaggtggaggggccttggagagaggtgggacctggtggggaaggagtgggtcttgtggagaaacggtcctaggatgagggtgtggcctgtgcataggtggatggggcttggagaggtcagacttgggtgaggggcagagccttggacaggtggtcccaggacaggaatgtggcctattcataggtgggtgggaccttggagaggtaggcagggccttggagaggtgcgacctgggagaggaatggagccttggagaggtgggacctgggtgaggggcagagccttggagaggtgggacctgggagaggaatggagccttggagaggtgggccctgggagaggggcggagccttggagaggtgggacctgggtgaggggcggagccttggagaggtgggacctgggtgaggggtggaaccttggagaggtgggacctggatgaggggtggaaccttggaggggtgggacctgggagaggggtggagccttaagagaggtgggacctgggagaggggcggagccttggagaggtgggacctgagtgaggggtggggccttggagaggtaggagctgggagacaggtagagccatggagaggtgggatctgggtgaggcacggggccttggagaggtgggacctgggtgaggggtggaacctcggagaggtgggacctgggtgaggggtggagccttggagaggtgggacctgggtgaggggtggagccttggagagctgggacctgggtgaggggtggagccttggagaggtgggacttgggtgaggggtggagccttggagaggtgggacctgggtgaggggtggagcctcggagaggtgggacctgggtgaggtgtggaacctcggagaggtgggacctgggtgaggggtggaacctcggagaggtgggacctgggtgaggggtggagcctcggagagctgggacctgggtgaggggtggagccttggagagctgggacctgggtgaggggtggagccttggagaggtagtctcaggatagtggtgtgacctgtgtgtaggtgggtggggcactggaaaggtgggacctgggtgaggagcagggcctgtggagagactgtccctggacaggggtgggaccttgagagacctggtgctgagatgaggtaggacccaaatgtcctcttgccgaggatcctggggatgtccttggcccgcctctcccatccccttccctgacacatagcggccggtggacggctgaccccatgcccgcaggacctggccatgggctccgacgcagagggggagaagatcaaggactccatgaagctgatcgttccggtgctgctggacgcggcggtgcccgcctacgacaagatccgggtcctgctgctctacatcctccttcggaatggtgggtgggggctgcagggagttggaacgtccccatttgccagcgtctcccacgatcctgggaactgctgaaccccacagctctccttgggtcatttgcactcaccgggctcaccaacccccacagctacccctctggacccgggaaccctcctccattggcttggggattcctccactgaggtgagggctccctgctaacgtagaaaccctcacatctgtgattcctatagatgtggggctccctcagctcatctggaggagcccctgatctaccccctccaggtttcccactcttgctcacactagcacagggtactgaggccctccccactgcaaggttctctcatcagagtcctgggagctcctcagcccaccccaaactcccctaaacctgggagctcacctggccgccgcctccaccctgcccattcccgtcccccaggtgtgagtgaggagaacctggccaagctgatccagcatgccaatgtacaggcgcacagcagcctcatccgtaacctggagcagctgggaggcactgtcaccaaccccggggtacgccaggagcgggcatggggggaccctgggagagggtgcggatcacagccggggctctgcaaggcagagggccattggtgcacaggcacggtgtggttcctggcgtggtgtggttgctgggaggccaaaagcagtgtttcgggtctggtctggggcccagaggacactggggcctctcccagtcccagcttacacaataggcaggggaagtgagacatggtcgctgccaggctggtcctggcagtggtgcagttgggagcgggtggtctgagtgctagaggcagggagtagggtccccagcatgggggctacaccacattgtctatctgggctcccaggggtctctgagggtcccccgcacccatccagcacccacacacagccatgtgtgtgcttgactcttgggtcagcctctcctgtctctctctggccctgtgcgtccccctccagggtgccctcaccccgtccccatctctcccccatccctcatccatctcgctgtgcactgtttctccatatctctctctctcacccttctctctgccttcccctttctctctgttctctgtcttgctcccctcccctctccgtcccccttctgtccccatcttcctctctctgtttcctgcttcatctcttgtctctctctttgccttcatactttgtctcactgcttcttatctctttgcctatctctgcctctgtctttgtctttctctggctcgctctctctccctttggctttctctctccgtctctctctggctcactgtttctctctctcgctttcttgctgtctctcgctctctctcgctctctgttccacttccccatctttgcctgccatcccccaccctaccagccacaccaggcgcagcccctctgtgaccagcctccttcccctcaatccccctgctgccctccctgccctgcctgtagggctcggggacctccagccggctggagccgagagaacgcatggagcccacctatcagctgtcccgctggaccccggtcatcaaggatgtaatggaggtactgggtggcaggtcagggtgggggccagccctccgcatcggctggcggctcagcctccctcctgctgaggtgctaagcctcagggcttaggggaaaatgctcattgctggcattcccttggcaccgatctgctctgctgaggggggcacgccaagcccgcagctgaggaattggggtgacagcggggcctgtgctggggagcctcacttcctccccacctgccggctgcctccgctatatctctctagtctgttcccctgtcccgcaggagtgcccctgagccccagccctggccttcccaggatcccagggcagcaccatccaatggcaatgggcctggggcggcttcctggcttcctccttgtccctctaagagccccggcccctctttctgcgtgggggccagagacctgggcctcctcatccccatggaccttgaatacctggacttctggggctctgaggggctgagagcccagacactgggttccccaaagggctgggggtattgactgatggtccccaagggcctggaggcccagactactgggttgccgaggaactgtgggtttagacttctgggtacccaaggagttatggaattagattcgtgggtccccagtgagttatggatctagatttctaggtccccaatggactagaggcctagactcctgggtcccccagaggcaggaggtggagatgctggttcctgtctgccaggatcttggcccctgaataccccgtggggggcactcctgaccccggaccccatgcctggggttcctcccctaacctgcctctcggccgccaggacgccgtggaggaccggctggacaggaacctgtggcccttcgtatccgaccccgcccccacggccagctcccaggccgctgtcaggtgaggccccggggccgcccccgcccacgcctgggtctgtgttaggtgggcggcctggcggcggtgagggcctcctgcctggactttctgcccctgccctgcacagtgcccgcttcggtcactggcacaagaacaaggctggcatagaagcccgggcgggcccccggctcatcgtgtatgtcatgggcggtgtggccatgtcagagatgagggccgcctacgaggtgaccagggccaccgagggcaagtgggaggtgctcattggtaagtcaccaggactgggaccctggggtctggggcttgggttcccggggcctgggcttgtaccttctaggtgtctggactccagagtccttggagtcagggacctggtttgctgagggacagggacagccccacaccagccgggaccgggagcctgtcaaagacgaaggcagcgccccccaacatcttccccaaacctctgcccctgcacaggctcctcacacatcctcaccccgacccgcttcctggatgacctgaaggcactggacaagaagctggaggacattgccctgccctgacccctggccccgccccctacccctccct

SEQ ID NO: 14271 - DNA, 811 bp, Homo sapiens
ctcggtggagaagctgtgtagtgtggagcaggacctggccatgggctccgacgcagagggggagaagatcaaggactccatgaagctgatcgttccggtgctgctggacgcggcggtgcccgcctacgacaagatccgggtcctgctgctctacatcctccttcggaatggtgtgagtgaggagaacctggccaagctgatccagcatgccaatgtacaggcgcacagcagcctcatccgtaacctggagcagctgggaggcactgtcaccaaccccgggccacaccaggcgcagcccctctgtgaccagcctccttcccctcaatccccctgctgccctccctgccctgcctgtagggctcggggacctccagccggctggagccgagagaacgcatggagcccacctatcagctgtcccgctggaccccggtcatcaaggatgtaatggaggacgccgtggaggaccggctggacaggaacctgtggcccttcgtatccgaccccgcccccacggccagctcccaggccgctgtcagtgcccgcttcggtcactggcacaagaacaaggctggcatagaagcccgggcgggcccccggctcatcgtgtatgtcatgggcggtgtggccatgtcagagatgagggccgcctacgaggtgaccagggccaccgagggcaagtgggaggtgctcattggctcctcacacatcctcaccccgacccgcttcctggatgacctgaaggcactggacaagaagctggaggacattgccctgccctgacccctggccccgccccctacccctccct

SEQ ID NO: 14272 - DNA, 829 bp, Homo sapiens
cttccctgacacatagcggccggtggacggctgaccccatgcccgcaggacctggccatgggctccgacgcagagggggagaagatcaaggactccatgaagctgatcgttccggtgctgctggacgcggcggtgcccgcctacgacaagatccgggtcctgctgctctacatcctccttcggaatggtgggtgggggctgcagggagttggaacgtccccatttgccagcgtctcccacgatcctgggaactgctgaaccccacagctctccttgggtcatttgcactcaccgggctcaccaacccccacagctacccctctggacccgggaaccctcctccattggcttggggattcctccactgaggtgagggctccctgctaacgtagaaaccctcacatctgtgattcctatagatgtggggctccctcagctcatctggaggagcccctgatctaccccctccaggtttcccactcttgctcacactagcacagggtactgaggccctccccactgcaaggttctctcatcagagtcctgggagctcctcagcccaccccaaactcccctaaacctgggagctcacctggccgccgcctccaccctgcccattcccgtcccccaggtgtgagtgaggagaacctggccaagctgatccagcatgccaatgtacaggcgcacagcagcctcatccgtaacctggagcagctgggaggcactgtcaccaaccccggggtacgccaggagcgggcatggggggaccctgggagagggtgcggatcacagccggggctctgcaaggcagagggccattggtgcacag

SEQ ID NO: 14273 - DNA, 385 bp, Homo sapiens
cttccctgacacatagcggccggtggacggctgaccccatgcccgcaggacctggccatgggctccgacgcagagggggagaagatcaaggactccatgaagctgatcgttccggtgctgctggacgcggcggtgcccgcctacgacaagatccgggtcctgctgctctacatcctccttcggaatggtgtgagtgaggagaacctggccaagctgatccagcatgccaatgtacaggcgcacagcagcctcatccgtaacctggagcagctgggaggcactgtcaccaaccccggggtacgccaggagcgggcatggggggaccctgggagagggtgcggatcacagccggggctctgcaaggcagagggccattggtgcacag

SEQ ID NO: 14274 - DNA, 1173 bp, Homo sapiens
ccctgatcaaagacttccaggggaccccgactttcacctacaaagcggcccatatcttcttcaccgacagtgagtgaggagagcctagggtgttggtgggtggggcaaggaggtgtgggggctgctctggcctgatgccccactcctgcctcaccccagcctgccccgagcccctgttcagtgagctaggccgctctcgtctggcaaaggtggtgaagacgttgaaggagattcaccttgccttcctcccctacgaggcccaggtacggcccgggctcatcctgggcagggggtgggggtttgtgaccaaatgtcccctgttccctcagaaacagacactgaggctgggcgcagtggctcatacctgtaatcccagcgctgtgggaggccagggcaggaggatcacttggggccaggagtttgagaccagcctgggtacagagcaagaccccgtctcttaaaaaaagaaaaagaaagaaattagcttggcgtggtggcgtgcacctgtagtcctagctactcatggggctggggtgggagagtcgcttgagcccgggaggtcgaggctgcagtgagctatgattgcactgctgccctccagcctgggcgacagagcgagatcctgtctcaaaaacatacataaagtaaaattttaaaaaggggaggtacccacagagtccaaggagctcttgccttgagttctatcccactaggcccttgcagggggcagcgtagagcgcaccgcggggttgtccagccagcttaagggacacgggctggggtatttatccactgactcctgcaggcatgggtttagggttgacctgggcctgcctccaattcggcaaagcaggcttcagggaccagggacggctcccaggaggtgcaggtggcggcagcgggaagcggggcaggtgtgcacctgcagcggcaaccctggtgcttctgtcccctcctcgcccaggtgttctccctcgatgctccccacagcacctacaacctctactgccccttccgggcagaggagcgcacgcggcagctcgaggtgctggcccagcagattgccacgctgtgcgccaccctgcaggagtacccggccatccgctaccgcaagtggggaccccacccagccccaccccgatgccgacccccccttaaccgcgtgcaacacct

SEQ ID NO: 14275 - DNA, 472 bp, Homo sapiens
ccctgatcaaagacttccaggggaccccgactttcacctacaaagcggcccatatcttcttcaccgacagtgagtgaggagagcctagggtgttggtgggtggggcaaggaggtgtgggggctgctctggcctgatgccccactcctgcctcaccccagcctgccccgagcccctgttcagtgagctaggccgctctcgtctggcaaaggtggtgaagacgttgaaggagattcaccttgccttcctcccctacgaggcccaggtgttctccctcgatgctccccacagcacctacaacctctactgccccttccgggcagaggagcgcacgcggcagctcgaggtgctggcccagcagattgccacgctgtgcgccaccctgcaggagtacccggccatccgctaccgcaagtggggaccccacccagccccaccccgatgccgacccccccttaaccgcgtgcaacacct

SEQ ID NO: 14276 - DNA, 9108 bp, Homo sapiens
ggagttattcggagtgtcaagaaggatggggagtggaaggtaggggtgaggcagatggctgggtacccagaggcagctcatcatcaggcctatggggaagaccctgaatgtgggacccccaagaactgcctgtccacatgggtggagttgggtgaatgggttctgggtcctcccacccagccagcccttgaaactgcccctcccactgccttggccccttctggggccagctgtggcctcttccgcctgctcctccatccatctgtccatccatctggacaggtgcttatcatggatcacccaagcatgcgcatcttgtcttcctgctgcaaaatgtcagatatcctggctgagggcatcaccagtgagtgaacgcgtccccagtgagatgggacctgagcgtgggaacccctgactgtgcccctctcccagggttcagcccttgagtgtaggatcccctcaaatcgtccagaactcccaagtacgcagctccctgcacggacagcccggatcatgtgaccaaatccattcttaaaccttgcaagctgactgcgggagcccatggattgcaggcctcccctgcagcactccctggctgcagccccttcctgaccgtgcagctccctcgtggagccctgtgtgggactcccagggtggactctggatgtggggtcccaagaatgcagagccttctatgggtgaccccaggtggtgtcccagtcactttgccattgagggataggtgctgagggagcctgtcctctcagaacctcagtctccctgtctgtaaatttggggaacccagttggctgcacaacccctgcagaaccctgtcgtgtggctcttagctggtggtccctaagtgggtttctcctgcagtccctcctaagcatccacccctcctccccaagcctccaaccccccacacctgagactccccacgtggccctgcctggatgccacccacctgtgtcccttcctctgttcctactagttgttgaagacatcaacaaacggcgggaacccattcccagtctggaggccatttatttgctgagccccacggagaaggtgcctacatgagtgagcgtgtgtgtatgcgcgtgcatgcgtgtacatgtgcatgtgtgtgtatgtctgcatgcatgtgattgcatgtgtgcatgtgtatacgtgtgcatgtgtccatgtgtatgtgtgtgcatgtgtgtgcatgtgtgtgtgcatctgtgtatgcatgtgtgtgcgtgtttgcatgtgtgtctatgtatgtgtctgtgtgcatgtgcatgtgtgtgcgtctgtgtgtgcatttgtgtgtatgtgtgtatgcgtgtgtgtctgtgggtctgtgtgtgcatttgtgtctgtgcatgtgtgtatgcgtgtgtatgtatgtgtgtgtgcatctgtgtgcatctgtatgtgtgtgtgtgcgtctgtctgtgtgcatgtgtgtatgcgtgtgtatgtatgtgtctgcgtctgtgtgtgcgtctgtgtgtatctgtgtgtgcatgtgtgtatgcgtgtatatgtatgtgcatctgtgtgcatgtgtctatgtatgtgtgtgcatctgtgtgtgcgtgtgtatgcgtgtgtgtatgcgtctgtgcatgtgtgtatgcgtgtgtgtgcgcatcagtgtctgcatgtgtgtatatgtgtgtatgtatgtgtgcgcgcgcatctgtgtgtgtgcatgtgtgtatgtatgtgtgtgcatctctgtgtgtgcatgtgtgtatgtgtgtgtgcatctgtgtgtgtgtgcatgtgtgcatgcgtgtgtatgtgtgtgtgcgtgcgtgcatctgtgtgtgtgcgcgtgtgcccatgtgggtgcgacactagtgtgcatttgcacatatacatgtccccgtccgtccatgtttgcacatggtggcagatggggggtggctgggaggcctaggcagccaatgagcctaggtgtgcaggctcaggcccagagagtgatccaccttccccagtcggttcaggccctgatcaaagacttccaggggaccccgactttcacctacaaagcggcccatatcttcttcaccgacagtgagtgaggagagcctagggtgttggtgggtggggcaaggaggtgtgggggctgctctggcctgatgccccactcctgcctcaccccagcctgccccgagcccctgttcagtgagctaggccgctctcgtctggcaaaggtggtgaagacgttgaaggagattcaccttgccttcctcccctacgaggcccaggtacggcccgggctcatcctgggcagggggtgggggtttgtgaccaaatgtcccctgttccctcagaaacagacactgaggctgggcgcagtggctcatacctgtaatcccagcgctgtgggaggccagggcaggaggatcacttggggccaggagtttgagaccagcctgggtacagagcaagaccccgtctcttaaaaaaagaaaaagaaagaaattagcttggcgtggtggcgtgcacctgtagtcctagctactcatggggctggggtgggagagtcgcttgagcccgggaggtcgaggctgcagtgagctatgattgcactgctgccctccagcctgggcgacagagcgagatcctgtctcaaaaacatacataaagtaaaattttaaaaaggggaggtacccacagagtccaaggagctcttgccttgagttctatcccactaggcccttgcagggggcagcgtagagcgcaccgcggggttgtccagccagcttaagggacacgggctggggtatttatccactgactcctgcaggcatgggtttagggttgacctgggcctgcctccaattcggcaaagcaggcttcagggaccagggacggctcccaggaggtgcaggtggcggcagcgggaagcggggcaggtgtgcacctgcagcggcaaccctggtgcttctgtcccctcctcgcccaggtgttctccctcgatgctccccacagcacctacaacctctactgccccttccgggcagaggagcgcacgcggcagctcgaggtgctggcccagcagattgccacgctgtgcgccaccctgcaggagtacccggccatccgctaccgcaagtggggaccccacccagccccaccccgatgccgacccccccttaaccgcgtgcaacacctaacctttaacctctcttgtgaccccagccccggccctaccctggcccctgactctcaccttcaaacccatccttgaccccatcccctgatgatgtcccccgtgtctgacctccccgccaggggcccagaggacacagcccagttggcccacgccgtcctggccaagctgaacgccttcaaggcagacactcccagtctgggcgaggtgagggggcgtgcttgggaggtgaggggcagccccaaccggctcagggtcagtgcctcattcctgccctaaaccccaccccagggcccagagaaaacccgctcccagctgctgataatggaccgggcagctgaccccgtgtccccactactgcatgagctcacgttccaggccatggcgtatgatctgctggacatagagcaggacacatacaggtctgcagacttggaacccgtccccacccttgccactgacctggttccccagtcctcagctcccctgacccccaggctccctccttcctccccaggtatgagaccaccgggctgagcgaggcgcgggagaaggccgtcttgctggacgaggacgatgacttgtgggtggagcttcgccacatgcatatcgcagatgtgtccaagtgcgtgcacacggggaccggatcccccccccaccgcccactgtgggcctggtagcggccttgggatccctggctgctgccaagtctttggccctcatgagcacccctcgtgtgactccagactggcctccaatttcaccccacctctccctgtcccccctgagtgggctcacccatggcctgtggctcctctcccctcactctcacccccgcccaccctcatggccaggaaggtcacggagctcctgaggaccttctgtgagagcaagaggctgaccacggacaaggtaggggcggacccaggtcaccaaaggcgctggtggaaggaagcccccctccccatgggcgcagggccacagcctggatttcgagcctggactgagacccaggtgggcactgcctggcttcgccccccaatccctaccctcttccccctacttccccaggcgaacatcaaagacctatcccagatcctgaaaaagatgccgcagtaccagaaggagctgaataaggtgtgctcgggtgggcagggagcggggacacctcggcccctcaaccccatgctctgtctgcgttctgccttgactcagcctttgttatcccccaacccccaccctgcaccctgcagtattctacgcacctgcatctagcagatgattgtatgaagcacttcaagggctcggtggagaagctgtgtagtgtggagcaggtggggcagggcttgcggggggcaggggtgatggtcctgccaaggcggggtattggggaggggctgaactgtagagatggggggttctgggggaggggcagggcttgtggagaggtggaggggccttggagagaggtgggacctggtggggaaggagtgggtcttgtggagaaacggtcctaggatgagggtgtggcctgtgcataggtggatggggcttggagaggtcagacttgggtgaggggcagagccttggacaggtggtcccaggacaggaatgtggcctattcataggtgggtgggaccttggagaggtaggcagggccttggagaggtgcgacctgggagaggaatggagccttggagaggtgggacctgggtgaggggcagagccttggagaggtgggacctgggagaggaatggagccttggagaggtgggccctgggagaggggcggagccttggagaggtgggacctgggtgaggggcggagccttggagaggtgggacctgggtgaggggtggaaccttggagaggtgggacctggatgaggggtggaaccttggaggggtgggacctgggagaggggtggagccttaagagaggtgggacctgggagaggggcggagccttggagaggtgggacctgagtgaggggtggggccttggagaggtaggagctgggagacaggtagagccatggagaggtgggatctgggtgaggcacggggccttggagaggtgggacctgggtgaggggtggaacctcggagaggtgggacctgggtgaggggtggagccttggagaggtgggacctgggtgaggggtggagccttggagagctgggacctgggtgaggggtggagccttggagaggtgggacttgggtgaggggtggagccttggagaggtgggacctgggtgaggggtggagcctcggagaggtgggacctgggtgaggtgtggaacctcggagaggtgggacctgggtgaggggtggaacctcggagaggtgggacctgggtgaggggtggagcctcggagagctgggacctgggtgaggggtggagccttggagagctgggacctgggtgaggggtggagccttggagaggtagtctcaggatagtggtgtgacctgtgtgtaggtgggtggggcactggaaaggtgggacctgggtgaggagcagggcctgtggagagactgtccctggacaggggtgggaccttgagagacctggtgctgagatgaggtaggacccaaatgtcctcttgccgaggatcctggggatgtccttggcccgcctctcccatccccttccctgacacatagcggccggtggacggctgaccccatgcccgcaggacctggccatgggctccgacgcagagggggagaagatcaaggactccatgaagctgatcgttccggtgctgctggacgcggcggtgcccgcctacgacaagatccgggtcctgctgctctacatcctccttcggaatggtgggtgggggctgcagggagttggaacgtccccatttgccagcgtctcccacgatcctgggaactgctgaaccccacagctctccttgggtcatttgcactcaccgggctcaccaacccccacagctacccctctggacccgggaaccctcctccattggcttggggattcctccactgaggtgagggctccctgctaacgtagaaaccctcacatctgtgattcctatagatgtggggctccctcagctcatctggaggagcccctgatctaccccctccaggtttcccactcttgctcacactagcacagggtactgaggccctccccactgcaaggttctctcatcagagtcctgggagctcctcagcccaccccaaactcccctaaacctgggagctcacctggccgccgcctccaccctgcccattcccgtcccccaggtgtgagtgaggagaacctggccaagctgatccagcatgccaatgtacaggcgcacagcagcctcatccgtaacctggagcagctgggaggcactgtcaccaaccccggggtacgccaggagcgggcatggggggaccctgggagagggtgcggatcacagccggggctctgcaaggcagagggccattggtgcacaggcacggtgtggttcctggcgtggtgtggttgctgggaggccaaaagcagtgtttcgggtctggtctggggcccagaggacactggggcctctcccagtcccagcttacacaataggcaggggaagtgagacatggtcgctgccaggctggtcctggcagtggtgcagttgggagcgggtggtctgagtgctagaggcagggagtagggtccccagcatgggggctacaccacattgtctatctgggctcccaggggtctctgagggtcccccgcacccatccagcacccacacacagccatgtgtgtgcttgactcttgggtcagcctctcctgtctctctctggccctgtgcgtccccctccagggtgccctcaccccgtccccatctctcccccatccctcatccatctcgctgtgcactgtttctccatatctctctctctcacccttctctctgccttcccctttctctctgttctctgtcttgctcccctcccctctccgtcccccttctgtccccatcttcctctctctgtttcctgcttcatctcttgtctctctctttgccttcatactttgtctcactgcttcttatctctttgcctatctctgcctctgtctttgtctttctctggctcgctctctctccctttggctttctctctccgtctctctctggctcactgtttctctctctcgctttcttgctgtctctcgctctctctcgctctctgttccacttccccatctttgcctgccatcccccaccctaccagccacaccaggcgcagcccctctgtgaccagcctccttcccctcaatccccctgctgccctccctgccctgcctgtagggctcggggacctccagccggctggagccgagagaacgcatggagcccacctatcagctgtcccgctggaccccggtcatcaaggatgtaatggaggtactgggtggcaggtcagggtgggggccagccctccgcatcggctggcggctcagcctccctcctgctgaggtgctaagcctcagggcttaggggaaaatgctcattgctggcattcccttggcaccgatctgctctgctgaggggggcacgccaagcccgcagctgaggaattggggtgacagcggggcctgtgctggggagcctcacttcctccccacctgccggctgcctccgctatatctctctagtctgttcccctgtcccgcaggagtgcccctgagccccagccctggccttcccaggatcccagggcagcaccatccaatggcaatgggcctggggcggcttcctggcttcctccttgtccctctaagagccccggcccctctttctgcgtgggggccagagacctgggcctcctcatccccatggaccttgaatacctggacttctggggctctgaggggctgagagcccagacactgggttccccaaagggctgggggtattgactgatggtccccaagggcctggaggcccagactactgggttgccgaggaactgtgggtttagacttctgggtacccaaggagttatggaattagattcgtgggtccccagtgagttatggatctagatttctaggtccccaatggactagaggcctagactcctgggtcccccagaggcaggaggtggagatgctggttcctgtctgccaggatcttggcccctgaataccccgtggggggcactcctgaccccggaccccatgcctggggttcctcccctaacctgcctctcggccgccaggacgccgtggaggaccggctggacaggaacctgtggcccttcgtatccgaccccgcccccacggccagctcccaggccgctgtcaggtgaggccccggggccgcccccgcccacgcctgggtctgtgttaggtgggcggcctggcggcggtgagggcctcctgcctggactttctgcccctgccctgcacagtgcccgcttcggtcactggcacaagaacaaggctggcatagaagcccgggcgggcccccggctcatcgtgtatgtcatgggcggtgtggccatgtcagagatgagggccgcctacgaggtgaccagggccaccgagggcaagtgggaggtgctcattggtaagtcaccaggactgggaccctggggtctggggcttgggttcccggggcctgggcttgtaccttctaggtgtctggactccagagtccttggagtcagggacctggtttgctgagggacagggacagccccacaccagccgggaccgggagcctgtcaaagacgaaggcagcgccccccaacatcttccccaaacctctgcccctgcacaggctcctcacacatcctcaccccgacccgcttcctggatgacctgaaggcactggacaagaagctggaggacattgccctgccctgacccctggccccgccccctacccctccctttccag

SEQ ID NO: 14277 - DNA, 1523 bp, Homo sapiens
ggagttattcggagtgtcaagaaggatggggagtggaaggtgcttatcatggatcacccaagcatgcgcatcttgtcttcctgctgcaaaatgtcagatatcctggctgagggcatcaccattgttgaagacatcaacaaacggcgggaacccattcccagtctggaggccatttatttgctgagccccacggagaagtcggttcaggccctgatcaaagacttccaggggaccccgactttcacctacaaagcggcccatatcttcttcaccgacacctgccccgagcccctgttcagtgagctaggccgctctcgtctggcaaaggtggtgaagacgttgaaggagattcaccttgccttcctcccctacgaggcccaggggcccagaggacacagcccagttggcccacgccgtcctggccaagctgaacgccttcaaggcagacactcccagtctgggcgagggcccagagaaaacccgctcccagctgctgataatggaccgggcagctgaccccgtgtccccactactgcatgagctcacgttccaggccatggcgtatgatctgctggacatagagcaggacacatacaggtatgagaccaccgggctgagcgaggcgcgggagaaggccgtcttgctggacgaggacgatgacttgtgggtggagcttcgccacatgcatatcgcagatgtgtccaagaaggtcacggagctcctgaggaccttctgtgagagcaagaggctgaccacggacaaggcgaacatcaaagacctatcccagatcctgaaaaagatgccgcagtaccagaaggagctgaataagtattctacgcacctgcatctagcagatgattgtatgaagcacttcaagggctcggtggagaagctgtgtagtgtggagcaggacctggccatgggctccgacgcagagggggagaagatcaaggactccatgaagctgatcgttccggtgctgctggacgcggcggtgcccgcctacgacaagatccgggtcctgctgctctacatcctccttcggaatggtgtgagtgaggagaacctggccaagctgatccagcatgccaatgtacaggcgcacagcagcctcatccgtaacctggagcagctgggaggcactgtcaccaaccccggggacgccgtggaggaccggctggacaggaacctgtggcccttcgtatccgaccccgcccccacggccagctcccaggccgctgtcagtgcccgcttcggtcactggcacaagaacaaggctggcatagaagcccgggcgggcccccggctcatcgtgtatgtcatgggcggtgtggccatgtcagagatgagggccgcctacgaggtgaccagggccaccgagggcaagtgggaggtgctcattggctcctcacacatcctcaccccgacccgcttcctggatgacctgaaggcactggacaagaagctggaggacattgccctgccctgacccctggccccgccccctacccctccctttccag

SEQ ID NO: 14278 - DNA, 2371 bp, Homo sapiens
acacccggaagcggcggcggcgcccctcggggaagatggcgccctcggggctgaaggcggtggtgggggaaagtgagtgcctctccggggccgggctctggcgtccggtgtgggacgggggtcggggacgcacgggctctgggatcctgggtttcatggcggctgggagttgggggccgggctgggcgtccgagcacctgaccctcgagggggcgggcggggacgggttcccagctggacgcccctgctctccggtgccagaacagaacaaaattggggggccggactccggggacccaaaggggacgggtagagtgtggcggaggctggggcccggactcctgggcctcctagggtgcctgccgggggaggagggcacagctggatgcccacactctaggatctcttaagccgggcaaagttcaggggctggattcttggggcctcctagggctctggtcagcgaccctaggtgctgtgagcgctcaggggacgtgtccaggccccacaggggtggtgtaggggatgtcttcctccttgccccatttccaggagcgccttgcagctggaggacgcaggcgtccaggcctcaccggccccggttcttgggggaagggtggagggcgcctcttcctccaccccggggagttccggcctcagctgctccttccgccctggccgtcttgataacagtggacatgacacagtggacgtggctgggcggggccaccccgttacttctctccactctctcctctaggcagggcggtctgtagctcaaacccctttaattgggggagattagaaaaaagtgattccattttacagatgaggaaactgagaccggaggtcagtgggatagcctcagctaggcatgcctcagagctgggaaccaggggtcctacattttagaccaggttggggggactggctgaaaccctcacagcaggaatacttgaggtagcaggtggggaagccgagagcctggcgctagaggcagatagagctgtagatgatcccggttctcctcttttcattcacctaaaacatgtttatcgagtggcaccttttgccccagcactctgccacttagacactcaggatgcgtaggtgagttacatgttgcctaagaatctgtttccctgtctgtaaattgggggtgaccccagaagccaatttgcagaactgggggctaaaaataaatgattcctgtgccgtgtctcacacctgtaatcccagcactttgggaggccgaggcaggaggactgcttgaggccaaaagtttgagaccagcttgggcaacatagcgagaccccatctatacagaaataaaaataaattagctgtgggtggtacatgcacctgtagtcccagctactcgggaggctgaggcaagaggatcgctggagcccaggagttggaggccgcagtgagttatgatcacaccactgcactttagcctaggtgacagagtgagatcctcctctcttaaaaaaaaaaaaaaagtaaatgggaattaagatgggggttcagccccaaggctgagaaggcttggggcagtggtgggaccagagaaccagcattctgacccctcccctcccttccctgcagaaattctgagcggagttattcggagtgtcaagaaggatggggagtggaaggtaggggtgaggcagatggctgggtacccagaggcagctcatcatcaggcctatggggaagaccctgaatgtgggacccccaagaactgcctgtccacatgggtggagttgggtgaatgggttctgggtcctcccacccagccagcccttgaaactgcccctcccactgccttggccccttctggggccagctgtggcctcttccgcctgctcctccatccatctgtccatccatctggacaggtgcttatcatggatcacccaagcatgcgcatcttgtcttcctgctgcaaaatgtcagatatcctggctgagggcatcaccagtgagtgaacgcgtccccagtgagatgggacctgagcgtgggaacccctgactgtgcccctctcccagggttcagcccttgagtgtaggatcccctcaaatcgtccagaactcccaagtacgcagctccctgcacggacagcccggatcatgtgaccaaatccattcttaaaccttgcaagctgactgcgggagcccatggattgcaggcctcccctgcagcactccctggctgcagccccttcctgaccgtgcagctccctcgtggagccctgtgtgggactcccagggtggactctggatgtggggtcccaagaatgcagagccttctatgggtgaccccaggtggtgtcccagtcactttgccattgagggataggtgctga

SEQ ID NO: 14279 - DNA, 589 bp, Homo sapiens
acacccggaagcggcggcggcgcccctcggggaagatggcgccctcggggctgaaggcggtggtgggggaaaaaattctgagcggagttattcggagtgtcaagaaggatggggagtggaaggtgcttatcatggatcacccaagcatgcgcatcttgtcttcctgctgcaaaatgtcagatatcctggctgagggcatcaccagtgagtgaacgcgtccccagtgagatgggacctgagcgtgggaacccctgactgtgcccctctcccagggttcagcccttgagtgtaggatcccctcaaatcgtccagaactcccaagtacgcagctccctgcacggacagcccggatcatgtgaccaaatccattcttaaaccttgcaagctgactgcgggagcccatggattgcaggcctcccctgcagcactccctggctgcagccccttcctgaccgtgcagctccctcgtggagccctgtgtgggactcccagggtggactctggatgtggggtcccaagaatgcagagccttctatgggtgaccccaggtggtgtcccagtcactttgccattgagggataggtgctga

SEQ ID NO: 14280 - DNA, 5093 bp, Homo sapiens
cctgaggaccttctgtgagagcaagaggctgaccacggacaaggtaggggcggacccaggtcaccaaaggcgctggtggaaggaagcccccctccccatgggcgcagggccacagcctggatttcgagcctggactgagacccaggtgggcactgcctggcttcgccccccaatccctaccctcttccccctacttccccaggcgaacatcaaagacctatcccagatcctgaaaaagatgccgcagtaccagaaggagctgaataaggtgtgctcgggtgggcagggagcggggacacctcggcccctcaaccccatgctctgtctgcgttctgccttgactcagcctttgttatcccccaacccccaccctgcaccctgcagtattctacgcacctgcatctagcagatgattgtatgaagcacttcaagggctcggtggagaagctgtgtagtgtggagcaggtggggcagggcttgcggggggcaggggtgatggtcctgccaaggcggggtattggggaggggctgaactgtagagatggggggttctgggggaggggcagggcttgtggagaggtggaggggccttggagagaggtgggacctggtggggaaggagtgggtcttgtggagaaacggtcctaggatgagggtgtggcctgtgcataggtggatggggcttggagaggtcagacttgggtgaggggcagagccttggacaggtggtcccaggacaggaatgtggcctattcataggtgggtgggaccttggagaggtaggcagggccttggagaggtgcgacctgggagaggaatggagccttggagaggtgggacctgggtgaggggcagagccttggagaggtgggacctgggagaggaatggagccttggagaggtgggccctgggagaggggcggagccttggagaggtgggacctgggtgaggggcggagccttggagaggtgggacctgggtgaggggtggaaccttggagaggtgggacctggatgaggggtggaaccttggaggggtgggacctgggagaggggtggagccttaagagaggtgggacctgggagaggggcggagccttggagaggtgggacctgagtgaggggtggggccttggagaggtaggagctgggagacaggtagagccatggagaggtgggatctgggtgaggcacggggccttggagaggtgggacctgggtgaggggtggaacctcggagaggtgggacctgggtgaggggtggagccttggagaggtgggacctgggtgaggggtggagccttggagagctgggacctgggtgaggggtggagccttggagaggtgggacttgggtgaggggtggagccttggagaggtgggacctgggtgaggggtggagcctcggagaggtgggacctgggtgaggtgtggaacctcggagaggtgggacctgggtgaggggtggaacctcggagaggtgggacctgggtgaggggtggagcctcggagagctgggacctgggtgaggggtggagccttggagagctgggacctgggtgaggggtggagccttggagaggtagtctcaggatagtggtgtgacctgtgtgtaggtgggtggggcactggaaaggtgggacctgggtgaggagcagggcctgtggagagactgtccctggacaggggtgggaccttgagagacctggtgctgagatgaggtaggacccaaatgtcctcttgccgaggatcctggggatgtccttggcccgcctctcccatccccttccctgacacatagcggccggtggacggctgaccccatgcccgcaggacctggccatgggctccgacgcagagggggagaagatcaaggactccatgaagctgatcgttccggtgctgctggacgcggcggtgcccgcctacgacaagatccgggtcctgctgctctacatcctccttcggaatggtgggtgggggctgcagggagttggaacgtccccatttgccagcgtctcccacgatcctgggaactgctgaaccccacagctctccttgggtcatttgcactcaccgggctcaccaacccccacagctacccctctggacccgggaaccctcctccattggcttggggattcctccactgaggtgagggctccctgctaacgtagaaaccctcacatctgtgattcctatagatgtggggctccctcagctcatctggaggagcccctgatctaccccctccaggtttcccactcttgctcacactagcacagggtactgaggccctccccactgcaaggttctctcatcagagtcctgggagctcctcagcccaccccaaactcccctaaacctgggagctcacctggccgccgcctccaccctgcccattcccgtcccccaggtgtgagtgaggagaacctggccaagctgatccagcatgccaatgtacaggcgcacagcagcctcatccgtaacctggagcagctgggaggcactgtcaccaaccccggggtacgccaggagcgggcatggggggaccctgggagagggtgcggatcacagccggggctctgcaaggcagagggccattggtgcacaggcacggtgtggttcctggcgtggtgtggttgctgggaggccaaaagcagtgtttcgggtctggtctggggcccagaggacactggggcctctcccagtcccagcttacacaataggcaggggaagtgagacatggtcgctgccaggctggtcctggcagtggtgcagttgggagcgggtggtctgagtgctagaggcagggagtagggtccccagcatgggggctacaccacattgtctatctgggctcccaggggtctctgagggtcccccgcacccatccagcacccacacacagccatgtgtgtgcttgactcttgggtcagcctctcctgtctctctctggccctgtgcgtccccctccagggtgccctcaccccgtccccatctctcccccatccctcatccatctcgctgtgcactgtttctccatatctctctctctcacccttctctctgccttcccctttctctctgttctctgtcttgctcccctcccctctccgtcccccttctgtccccatcttcctctctctgtttcctgcttcatctcttgtctctctctttgccttcatactttgtctcactgcttcttatctctttgcctatctctgcctctgtctttgtctttctctggctcgctctctctccctttggctttctctctccgtctctctctggctcactgtttctctctctcgctttcttgctgtctctcgctctctctcgctctctgttccacttccccatctttgcctgccatcccccaccctaccagccacaccaggcgcagcccctctgtgaccagcctccttcccctcaatccccctgctgccctccctgccctgcctgtagggctcggggacctccagccggctggagccgagagaacgcatggagcccacctatcagctgtcccgctggaccccggtcatcaaggatgtaatggaggtactgggtggcaggtcagggtgggggccagccctccgcatcggctggcggctcagcctccctcctgctgaggtgctaagcctcagggcttaggggaaaatgctcattgctggcattcccttggcaccgatctgctctgctgaggggggcacgccaagcccgcagctgaggaattggggtgacagcggggcctgtgctggggagcctcacttcctccccacctgccggctgcctccgctatatctctctagtctgttcccctgtcccgcaggagtgcccctgagccccagccctggccttcccaggatcccagggcagcaccatccaatggcaatgggcctggggcggcttcctggcttcctccttgtccctctaagagccccggcccctctttctgcgtgggggccagagacctgggcctcctcatccccatggaccttgaatacctggacttctggggctctgaggggctgagagcccagacactgggttccccaaagggctgggggtattgactgatggtccccaagggcctggaggcccagactactgggttgccgaggaactgtgggtttagacttctgggtacccaaggagttatggaattagattcgtgggtccccagtgagttatggatctagatttctaggtccccaatggactagaggcctagactcctgggtcccccagaggcaggaggtggagatgctggttcctgtctgccaggatcttggcccctgaataccccgtggggggcactcctgaccccggaccccatgcctggggttcctcccctaacctgcctctcggccgccaggacgccgtggaggaccggctggacaggaacctgtggcccttcgtatccgaccccgcccccacggccagctcccaggccgctgtcaggtgaggccccggggccgcccccgcccacgcctgggtctgtgttaggtgggcggcctggcggcggtgagggcctcctgcctggactttctgcccctgccctgcacagtgcccgcttcggtcactggcacaagaacaaggctggcatagaagcccgggcgggcccccggctcatcgtgtatgtcatgggcggtgtggccatgtcagagatgagggccgcctacgaggtgaccagggccaccgagggcaagtgggaggtgctcattggtaagtcaccaggactgggaccctggggtctggggcttgggttcccggggcctgggcttgtaccttctaggtgtctggactccagagtccttggagtcagggacctggtttgctgagggacagggacagccccacaccagccgggaccgggagcctgtcaaagacgaaggcagcgccccccaacatcttccccaaacctctgcccctgcacaggctcctcacacatcctcaccccgacccgcttcctggatgacctgaaggcactggacaagaagctggaggacattgccctgccctgacccctggccccgccccctacccctccctttccagagaaataaactcttcccgtcgctctgcca

SEQ ID NO: 14281 - DNA, 770 bp, Homo sapiens
cctgaggaccttctgtgagagcaagaggctgaccacggacaaggcgaacatcaaagacctatcccagatcctgaaaaagatgccgcagtaccagaaggagctgaataagtattctacgcacctgcatctagcagatgattgtatgaagcacttcaagggctcggtggagaagctgtgtagtgtggagcaggacctggccatgggctccgacgcagagggggagaagatcaaggactccatgaagctgatcgttccggtgctgctggacgcggcggtgcccgcctacgacaagatccgggtcctgctgctctacatcctccttcggaatggtgtgagtgaggagaacctggccaagctgatccagcatgccaatgtacaggcgcacagcagcctcatccgtaacctggagcagctgggaggcactgtcaccaaccccgggggctcggggacctccagccggctggagccgagagaacgcatggagcccacctatcagctgtcccgctggaccccggtcatcaaggatgtaatggaggacgccgtggaggaccggctggacaggaacctgtggcccttcgtatccgaccccgcccccacggccagctcccaggccgctgtcaggctcctcacacatcctcaccccgacccgcttcctggatgacctgaaggcactggacaagaagctggaggacattgccctgccctgacccctggccccgccccctacccctccctttccagagaaataaactcttcccgtcgctctgcca

SEQ ID NO: 14282 - DNA, 2678 bp, Homo sapiens
ggtgtgagtgaggagaacctggccaagctgatccagcatgccaatgtacaggcgcacagcagcctcatccgtaacctggagcagctgggaggcactgtcaccaaccccggggtacgccaggagcgggcatggggggaccctgggagagggtgcggatcacagccggggctctgcaaggcagagggccattggtgcacaggcacggtgtggttcctggcgtggtgtggttgctgggaggccaaaagcagtgtttcgggtctggtctggggcccagaggacactggggcctctcccagtcccagcttacacaataggcaggggaagtgagacatggtcgctgccaggctggtcctggcagtggtgcagttgggagcgggtggtctgagtgctagaggcagggagtagggtccccagcatgggggctacaccacattgtctatctgggctcccaggggtctctgagggtcccccgcacccatccagcacccacacacagccatgtgtgtgcttgactcttgggtcagcctctcctgtctctctctggccctgtgcgtccccctccagggtgccctcaccccgtccccatctctcccccatccctcatccatctcgctgtgcactgtttctccatatctctctctctcacccttctctctgccttcccctttctctctgttctctgtcttgctcccctcccctctccgtcccccttctgtccccatcttcctctctctgtttcctgcttcatctcttgtctctctctttgccttcatactttgtctcactgcttcttatctctttgcctatctctgcctctgtctttgtctttctctggctcgctctctctccctttggctttctctctccgtctctctctggctcactgtttctctctctcgctttcttgctgtctctcgctctctctcgctctctgttccacttccccatctttgcctgccatcccccaccctaccagccacaccaggcgcagcccctctgtgaccagcctccttcccctcaatccccctgctgccctccctgccctgcctgtagggctcggggacctccagccggctggagccgagagaacgcatggagcccacctatcagctgtcccgctggaccccggtcatcaaggatgtaatggaggtactgggtggcaggtcagggtgggggccagccctccgcatcggctggcggctcagcctccctcctgctgaggtgctaagcctcagggcttaggggaaaatgctcattgctggcattcccttggcaccgatctgctctgctgaggggggcacgccaagcccgcagctgaggaattggggtgacagcggggcctgtgctggggagcctcacttcctccccacctgccggctgcctccgctatatctctctagtctgttcccctgtcccgcaggagtgcccctgagccccagccctggccttcccaggatcccagggcagcaccatccaatggcaatgggcctggggcggcttcctggcttcctccttgtccctctaagagccccggcccctctttctgcgtgggggccagagacctgggcctcctcatccccatggaccttgaatacctggacttctggggctctgaggggctgagagcccagacactgggttccccaaagggctgggggtattgactgatggtccccaagggcctggaggcccagactactgggttgccgaggaactgtgggtttagacttctgggtacccaaggagttatggaattagattcgtgggtccccagtgagttatggatctagatttctaggtccccaatggactagaggcctagactcctgggtcccccagaggcaggaggtggagatgctggttcctgtctgccaggatcttggcccctgaataccccgtggggggcactcctgaccccggaccccatgcctggggttcctcccctaacctgcctctcggccgccaggacgccgtggaggaccggctggacaggaacctgtggcccttcgtatccgaccccgcccccacggccagctcccaggccgctgtcaggtgaggccccggggccgcccccgcccacgcctgggtctgtgttaggtgggcggcctggcggcggtgagggcctcctgcctggactttctgcccctgccctgcacagtgcccgcttcggtcactggcacaagaacaaggctggcatagaagcccgggcgggcccccggctcatcgtgtatgtcatgggcggtgtggccatgtcagagatgagggccgcctacgaggtgaccagggccaccgagggcaagtgggaggtgctcattggtaagtcaccaggactgggaccctggggtctggggcttgggttcccggggcctgggcttgtaccttctaggtgtctggactccagagtccttggagtcagggacctggtttgctgagggacagggacagccccacaccagccgggaccgggagcctgtcaaagacgaaggcagcgccccccaacatcttccccaaacctctgcccctgcacaggctcctcacacatcctcaccccgacccgcttcctggatgacctgaaggcactggacaagaagctggaggacattgccctgccctgacccctggccccgccccctacccctccctttccagagaaataaactcttcccgtcgctctgcca

SEQ ID NO: 14283 - DNA, 706 bp, Homo sapiens
ggtgtgagtgaggagaacctggccaagctgatccagcatgccaatgtacaggcgcacagcagcctcatccgtaacctggagcagctgggaggcactgtcaccaaccccgggggctcggggacctccagccggctggagccgagagaacgcatggagcccacctatcagctgtcccgctggaccccggtcatcaaggatgtaatggaggacgccgtggaggaccggctggacaggaacctgtggcccttcgtatccgaccccgcccccacggccagctcccaggccgctgtcaggtgaggccccggggccgcccccgcccacgcctgggtctgtgttaggtgggcggcctggcggcggtgagggcctcctgcctggactttctgcccctgccctgcacagtgcccgcttcggtcactggcacaagaacaaggctggcatagaagcccgggcgggcccccggctcatcgtgtatgtcatgggcggtgtggccatgtcagagatgagggccgcctacgaggtgaccagggccaccgagggcaagtgggaggtgctcattggctcctcacacatcctcaccccgacccgcttcctggatgacctgaaggcactggacaagaagctggaggacattgccctgccctgacccctggccccgccccctacccctccctttccagagaaataaactcttcccgtcgctctgcca

SEQ ID NO: 14284 - DNA, 1852 bp, Homo sapiens
ttgccttcatactttgtctcactgcttcttatctctttgcctatctctgcctctgtctttgtctttctctggctcgctctctctccctttggctttctctctccgtctctctctggctcactgtttctctctctcgctttcttgctgtctctcgctctctctcgctctctgttccacttccccatctttgcctgccatcccccaccctaccagccacaccaggcgcagcccctctgtgaccagcctccttcccctcaatccccctgctgccctccctgccctgcctgtagggctcggggacctccagccggctggagccgagagaacgcatggagcccacctatcagctgtcccgctggaccccggtcatcaaggatgtaatggaggtactgggtggcaggtcagggtgggggccagccctccgcatcggctggcggctcagcctccctcctgctgaggtgctaagcctcagggcttaggggaaaatgctcattgctggcattcccttggcaccgatctgctctgctgaggggggcacgccaagcccgcagctgaggaattggggtgacagcggggcctgtgctggggagcctcacttcctccccacctgccggctgcctccgctatatctctctagtctgttcccctgtcccgcaggagtgcccctgagccccagccctggccttcccaggatcccagggcagcaccatccaatggcaatgggcctggggcggcttcctggcttcctccttgtccctctaagagccccggcccctctttctgcgtgggggccagagacctgggcctcctcatccccatggaccttgaatacctggacttctggggctctgaggggctgagagcccagacactgggttccccaaagggctgggggtattgactgatggtccccaagggcctggaggcccagactactgggttgccgaggaactgtgggtttagacttctgggtacccaaggagttatggaattagattcgtgggtccccagtgagttatggatctagatttctaggtccccaatggactagaggcctagactcctgggtcccccagaggcaggaggtggagatgctggttcctgtctgccaggatcttggcccctgaataccccgtggggggcactcctgaccccggaccccatgcctggggttcctcccctaacctgcctctcggccgccaggacgccgtggaggaccggctggacaggaacctgtggcccttcgtatccgaccccgcccccacggccagctcccaggccgctgtcaggtgaggccccggggccgcccccgcccacgcctgggtctgtgttaggtgggcggcctggcggcggtgagggcctcctgcctggactttctgcccctgccctgcacagtgcccgcttcggtcactggcacaagaacaaggctggcatagaagcccgggcgggcccccggctcatcgtgtatgtcatgggcggtgtggccatgtcagagatgagggccgcctacgaggtgaccagggccaccgagggcaagtgggaggtgctcattggtaagtcaccaggactgggaccctggggtctggggcttgggttcccggggcctgggcttgtaccttctaggtgtctggactccagagtccttggagtcagggacctggtttgctgagggacagggacagccccacaccagccgggaccgggagcctgtcaaagacgaaggcagcgccccccaacatcttccccaaacctctgcccctgcacaggctcctcacacatcctcaccccgacccgcttcctggatgacctgaaggcactggacaagaagctggaggacattgccctgccctga

SEQ ID NO: 14285 - DNA, 716 bp, Homo sapiens
ttgccttcatactttgtctcactgcttcttatctctttgcctatctctgcctctgtctttgtctttctctggctcgctctctctccctttggctttctctctccgtctctctctggctcactgtttctctctctcgctttcttgctgtctctcgctctctctcgctctctgttccacttccccatctttgcctgccatcccccaccctaccagccacaccaggcgcagcccctctgtgaccagcctccttcccctcaatccccctgctgccctccctgccctgcctgtagggctcggggacctccagccggctggagccgagagaacgcatggagcccacctatcagctgtcccgctggaccccggtcatcaaggatgtaatggaggacgccgtggaggaccggctggacaggaacctgtggcccttcgtatccgaccccgcccccacggccagctcccaggccgctgtcagtgcccgcttcggtcactggcacaagaacaaggctggcatagaagcccgggcgggcccccggctcatcgtgtatgtcatgggcggtgtggccatgtcagagatgagggccgcctacgaggtgaccagggccaccgagggcaagtgggaggtgctcattggctcctcacacatcctcaccccgacccgcttcctggatgacctgaaggcactggacaagaagctggaggacattgccctgccctga

SEQ ID NO: 14286 - DNA, 1361 bp, Homo sapiens
tgcatgcgtgtacatgtgcatgtgtgtgtatgtctgcatgcatgtgattgcatgtgtgcatgtgtatacgtgtgcatgtgtccatgtgtatgtgtgtgcatgtgtgtgcatgtgtgtgtgcatctgtgtatgcatgtgtgtgcgtgtttgcatgtgtgtctatgtatgtgtctgtgtgcatgtgcatgtgtgtgcgtctgtgtgtgcatttgtgtgtatgtgtgtatgcgtgtgtgtctgtgggtctgtgtgtgcatttgtgtctgtgcatgtgtgtatgcgtgtgtatgtatgtgtgtgtgcatctgtgtgcatctgtatgtgtgtgtgtgcgtctgtctgtgtgcatgtgtgtatgcgtgtgtatgtatgtgtctgcgtctgtgtgtgcgtctgtgtgtatctgtgtgtgcatgtgtgtatgcgtgtatatgtatgtgcatctgtgtgcatgtgtctatgtatgtgtgtgcatctgtgtgtgcgtgtgtatgcgtgtgtgtatgcgtctgtgcatgtgtgtatgcgtgtgtgtgcgcatcagtgtctgcatgtgtgtatatgtgtgtatgtatgtgtgcgcgcgcatctgtgtgtgtgcatgtgtgtatgtatgtgtgtgcatctctgtgtgtgcatgtgtgtatgtgtgtgtgcatctgtgtgtgtgtgcatgtgtgcatgcgtgtgtatgtgtgtgtgcgtgcgtgcatctgtgtgtgtgcgcgtgtgcccatgtgggtgcgacactagtgtgcatttgcacatatacatgtccccgtccgtccatgtttgcacatggtggcagatggggggtggctgggaggcctaggcagccaatgagcctaggtgtgcaggctcaggcccagagagtgatccaccttccccagtcggttcaggccctgatcaaagacttccaggggaccccgactttcacctacaaagcggcccatatcttcttcaccgacagtgagtgaggagagcctagggtgttggtgggtggggcaaggaggtgtgggggctgctctggcctgatgccccactcctgcctcaccccagcctgccccgagcccctgttcagtgagctaggccgctctcgtctggcaaaggtggtgaagacgttgaaggagattcaccttgccttcctcccctacgaggcccaggtacggcccgggctcatcctgggcagggggtgggggtttgtgaccaaatgtcccctgttccctcagaaacagacactgaggctgggcgcagtggctcatacctgtaatcccagcgctgtgggaggccagggcaggaggatcacttggggccaggagtttgagaccagcctgggtacagagcaagaccccgtctcttaa

SEQ ID NO: 14287 - DNA, 1188 bp, Homo sapiens
tgcatgcgtgtacatgtgcatgtgtgcatgtgtgtgcatgtgtgtgtgcatctgtgtatgcatgtgtgtgcgtgcatgtgtgtctatgtatgtgtctgtgtgcatgtgcatgtgtgtgcgtctgtgtgtgcatttgtgtgtatgtgtgtatgcgtgtgtgtctgtgggtctgtgtgtgcatttgtgtctgtgcatgtgtgtatgcgtgtgtattgtgtgtgcatctgtgtgcatctgtatgtgtgtgtgtgcgtctgtctgtgtgcatgtgtgtatgcgtgtgtatgtatgtgtctgcgtctgtgtgtgcgtctgtgtgtatctgtgtgtgcatgtgtgtatgcgtgtatatgtatgtgcatctgtgtgcatgtgtctatgtatgtgtgtgcatctgtgtgtgcgtgtgtatgcgtgtgtgtatgcgtctgtcatgtgtgtatgcgtgtgtgtgcgcatcagtgtctgcatgtgtgtatatgtgtgtatgtatgttgcgcgcgcatctgtgtgtgtgcatgtgtgtatgtatgtgtgtgcatctctgtgtgtgcatgtgtgtatgtgtgtgtgcatctgtgtgtgtgtgcatgtgtgcatgcgtgtgtatgtgtgtgtgcgtgcgtgcatctgtgtgtgtgcgcgtgtgcccatgtgggtgcgacactagtgtgcatttgcacatatacatgtccccgtccgtccatgtttgcacatggtggcagatggggggtggctgggaggcctaggcagccaatgagcctaggtgtgcaggctcaggcccagagagtgatccaccttccccagtcggttcaggccctgatcaaagacttccaggggaccccgactttcacctacaaagcggcccatatcttcttcaccgacacctgccccgagcccctgttcagtgagctaggccgctctcgtctggcaaaggtggtgaagacgttgaaggagattcaccttgccttcctcccctacgaggcccaggtacggcccgggctcatcctgggcagggggtgggggtttgtgaccaaatgtcccctgttccctcagaaacagacactgaggctgggcgcagtggctcatacctgtaatcccagcgctgtgggaggccagggcaggaggatcacttggggccaggagtttgagaccagcctgggtacagagcaagaccccgtctcttaa

SEQ ID NO: 14288 - DNA, 4915 bp, Homo sapiens
cacttgagccgaagttaatttctcggggagttctcgggcgcgcacaggcagctcggtttgccctgcgattgagctgcgggtcgcggccggcgccggcctctccaatggcaaatgtgtgtggctggaggcgagcgcgaggctttcggcaaaggcagtcgagtgtttgcagaccggggcgagtcctgtgaaagcagataaaagaaaacatttattaacgtgtcattacgaggggagcgcccggccggggctgtcgcactccccgcggaacatttggctccctccagctccgagagaggagaagaagaaagcggaaaagaggcagattcacgtcgtttccagccaagtggacctgatcgatggccctcctgaatttatcacgatatttgatttattagcgatgccccctggtttgtgtgttacgcacacacacgtgcacacaaggctctggctcgcttccctccctcgtttccagctcctgggcgaatcccacatctgtttcaactctccgccgagggcgagcaggagcgagagtgtgtcgagtgagtgtgcgtctgtgtgtcccggcgagggtgcgcgctcggcgccgggagcgcggccagccgagtccggaggcatcgggaggtcgagagccgccgggaccccagctctgcgttcactgccccgtccggagctggacttcggggccggggccggggccgtgcgccggggacaggcagggccgggtcgcgggccgcgcgtcccccaggccggagatctgcgagtgaagagggacgagggaaaagaaacaaagccacagacgcaacttgagactcccgcatcccaaaagaagcaccagatcagcaaaaaaagaagatgggccccccgagcctcgtgctgtgcttgctgtccgcaactgtgttctccctgctgggtggaagctcggccttcctgtcgcaccaccgcctgaaaggcaggtttcagagggaccgcaggaacatccgccccaacatcatcctggtgctgacggacgaccaggatgtggagctgggttccatgcaggtgatgaacaagacccggcgcatcatggagcagggcggggcgcacttcatcaacgccttcgtgaccacacccatgtgctgcccctcacgctcctccatcctcactggcaagtacgtccacaaccacaacacctacaccaacaatgagaactgctcctcgccctcctggcaggcacagcacgagagccgcacctttgccgtgtacctcaatagcactggctaccggacagctttcttcgggaagtatcttaatgaatacaacggctcctacgtgccacccggctggaaggagtgggtcggactccttaaaaactcccgcttttataactacacgctgtgtcggaacggggtgaaagagaagcacggctccgactactccaaggattacctcacagacctcatcaccaatgacagcgtgagcttcttccgcacgtccaagaagatgtacccgcacaggccagtcctcatggtcatcagccatgcagccccccacggccctgaggattcagccccacaatattcacgcctcttcccaaacgcatctcagcacatcacgccgagctacaactacgcgcccaacccggacaaacactggatcatgcgctacacggggcccatgaagcccatccacatggaattcaccaacatgctccagcggaagcgcttgcagaccctcatgtcggtggacgactccatggagacgatttacaacatgctggttgagacgggcgagctggacaacacgtacatcgtatacaccgccgaccacggttaccacatcggccagtttggcctggtgaaagggaaatccatgccatatgagtttgacatcagggtcccgttctacgtgaggggccccaacgtggaagccggctgtctgaatccccacatcgtcctcaacattgacctggcccccaccatcctggacattgcaggcctggacatacctgcggatatggacgggaaatccatcctcaagctgctggacacggagcggccggtgaatcggtttcacttgaaaaagaagatgagggtctggcgggactccttcttggtggagagaggcaagctgctacacaagagagacaatgacaaggtggacgcccaggaggagaactttctgcccaagtaccagcgtgtgaaggacctgtgtcagcgtgctgagtaccagacggcgtgtgagcagctgggacagaagtggcagtgtgtggaggacgccacggggaagctgaagctgcataagtgcaagggccccatgcggctgggcggcagcagagccctctccaacctcgtgcccaagtactacgggcagggcagcgaggcctgcacctgtgacagcggggactacaagctcagcctggccggacgccggaaaaaactcttcaagaagaagtacaaggccagctatgtccgcagtcgctccatccgctcagtggccatcgaggtggacggcagggtgtaccacgtaggcctgggtgatgccgcccagccccgaaacctcaccaagcggcactggccaggggcccctgaggaccaagatgacaaggatggtggggacttcagtggcactggaggccttcccgactactcagccgccaaccccattaaagtgacacatcggtgctacatcctagagaacgacacagtccagtgtgacctggacctgtacaagtccctgcaggcctggaaagaccacaagctgcacatcgaccacgagattgaaaccctgcagaacaaaattaagaacctgagggaagtccgaggtcacctgaagaaaaagcggccagaagaatgtgactgtcacaaaatcagctaccacacccagcacaaaggccgcctcaagcacagaggctccagtctgcatcctttcaggaagggcctgcaagagaaggacaaggtgtggctgttgcgggagcagaagcgcaagaagaaactccgcaagctgctcaagcgcctgcagaacaacgacacgtgcagcatgccaggcctcacgtgcttcacccacgacaaccagcactggcagacggcgcctttctggacactggggcctttctgtgcctgcaccagcgccaacaataacacgtactggtgcatgaggaccatcaatgagactcacaatttcctcttctgtgaatttgcaactggcttcctagagtactttgatctcaacacagacccctaccagctgatgaatgcagtgaacacactggacagggatgtcctcaaccagctacacgtacagctcatggagctgaggagctgcaagggttacaagcagtgtaacccccggactcgaaacatggacctgggacttaaagatggaggaagctatgagcaatacaggcagtttcagcgtcgaaagtggccagaaatgaagagaccttcttccaaatcactgggacaactgtgggaaggctgggaaggttaagaaacaacagaggtggacctccaaaaacatagaggcatcacctgactgcacaggcaatgaaaaaccatgtgggtgatttccagcagacctgtggtattggccaggaggcctgagaaagcaagcacgcactctcagtcaacatgacagattctggaggataaccagcaggagcagagataacttcaggaagtccatttttgcccctgcttttgctttggattatacctcaccagctgcacaaaatgcattttttcgtatcaaaaagtcaccactaaccctcccccagaagctcacaaaggaaaacggagagagcgagcgagagagatttccttggaaatttctcccaagggcgaaagtcattggaatttttaaatcataggggaaaagcagtcctgttctaaatcctcttattcttttggtttgtcacaaagaaggaactaagaagcaggacagaggcaacgtggagaggctgaaaacagtgcagagacgtttgacaatgagtcagtagcacaaaagagatgacatttacctagcactataaaccctggttgcctctgaagaaactgccttcattgtatatatgtgactatttacatgtaatcaacatgggaacttttaggggaacctaataagaaatcccaattttcaggagtggtggtgtcaataaacgctctgtggccagtgtaaaagaaaatccctcgcagttgtggacatttctgttcctgtccagataccatttctcctagtatttctttgttatgtcccagaactgatgttttttttttaaggtactgaaaagaaatgaagttgatgtatgtcccaagttttgatgaaactgtatttgtaaaaaaaattttgtagtttaagtattgtcatacagtgttcaaaaccccagccaatgaccagcagttggtatgaagaacctttgacattttgtaaaaggccatttcttgggagttttttggtgtgtctgtttttttaaagtattcaagatactaccagtcaacatctttttggaagaaaatgccttgggtttagaagattttcttaaaaggggagtagatggttgtagattgactaaaaagtctaccatacttcaagggactacaggtaagtctcatagtataccagctttggtacttcattttttaaaaaagtattaatcaattgcaaagaaattcgccttggccaacccttctttgtgtatcaggtagtctaacctgatacaagtagttgacagatttcaactatcaatcaccagtccaacccatttctcatttaacagatgacggagataatccctaaaagcacccacatttgtttcaatgccccaaacaggccaaggctccctagcaactccctagtggcgttttttaacttctcagaaactgttaccattatttgaaataggcttccttaacctcctttacccttaacccaacagggattt

SEQ ID NO: 14289 - DNA, 2121 bp, Homo sapiens
agctgctcaagcgcctgcagaacaacgacacgtgcagcatgccaggcctcacgtgcttcacccacgacaaccagcactggcagacggcgcctttctggacacgtgagcaagcccagggcaggggtggacaggctgaggcccaggggttcaagaaacttctccacttagtgacccagacctctctcagaaagggggtccccaacaccaggggtccacggtgctcgggacagcctcttggcatttgacgaactggttttaggggctgtccctgacaggaatcactgttggcagatggggcctcctcccgcaggcactcaggacatgctctctcttccttggcagtggggcctttctgtgcctgcaccagcgccaacaataacacgtactggtgcatgaggaccatcaatgagactcacaatttcctcttctgtgaatttgcaactggcttcctagagtactttgatctcaacacagacccctaccaggtacaggcaacccgagctagagggatgggggtgtggggtacaccagtgctgccaggtaggccccccccaacctcagggaagtgatgacaaattgtccaagtcccactgagtccctgagccggtgggagtaagttgtgaagctgctgagattgggggttctgtgttcaatcagccttttttgcctccatcaccctgctttttgcctccatcaccctgcgtgtgtaatatatatggcttcttccctctaacttaacatgcagcatgcaaccaggttttgccggaacttgtgaagactcctaacactgtcaggctgtaggatcaagccaaatatcacccactgcagggcctacacggaccgcgcagctaatataacagtaacacactgcaccaagcactctgctaagtgcttccgtacagtaagccatctaaacacacatgcgactgaagtggcccaggaccacacaagaccaaaaggagcagtggcatgtctggtcatcggaacatgtgggcccttgtacagggacagtcactactgagctccagcactagagctttcctgtactgtggccttggtattgcccaggctttgacctttcaagaaaagcctgaaataatttaaatgaaatctgatgtttaaatgtcagcagcacaaatgctttaattactatataggtgtgcagtctttctccttagataggttcaccctcatactttaccaaaggggtaggttaagtccctcaccggtagctcccagactacacaagaacccaggccacttacccgtcctttcatcaaatggctgctttgcaatcaggaggagctgagggcccctgaatgaaggctgctgataaaaccaagacttggaaggctttctttccaagcttgggaagtttcctgaccagtggctgcagaactccaacgttaaatacacagacgtggtttttattctcctgagttttcactctcatgaagagtgaacctggtgggacttgaagccaaaaagtcacctaactcttccaaacgctggctcttgcagaagttggagtaaacaggtcaccagcccctagcaccttccacccgccacctgcctgaaatatgtcccctggttggtagaagggcagggcgagagtccctgtacttaccttgttgacagactaccttttttgcaaccagctgatgaatgcagtgaacacactggacagggatgtcctcaaccagctacacgtacagctcatggagctgaggagctgcaagggttacaagcagtgtaacccccggactcgaaacatggacctgggtgagtaggcaccccaacgtggggcccttggacagcagggtaaccaaaggaagggactcaggaggtggtgtctaccccaagaatgagcctgaaatcaccaggctttgggaggtgatacagttccagacgagtcatgggagcccctgtccatagcaggcagatgacctttaacaagctgtgattcctgagagaggaacacctgcaccaactgcccaggaaacacacggaattccgtctcatttcattgtcctcccttttgtccactcatgcattcaacaaacacttcctgagaacttacacctgaaaccatgttgactaaagatgaccccatcctcgctg

SEQ ID NO: 14290 - DNA, 552 bp, Homo sapiens
agctgctcaagcgcctgcagaacaacgacacgtgcagcatgccaggcctcacgtgcttcacccacgacaaccagcactggcagacggcgcctttctggacactggggcctttctgtgcctgcaccagcgccaacaataacacgtactggtgcatgaggaccatcaatgagactcacaatttcctcttctgtgaatttgcaactggcttcctagagtactttgatctcaacacagacccctaccagctgatgaatgcagtgaacacactggacagggatgtcctcaaccagctacacgtacagctcatggagctgaggagctgcaagggttacaagcagtgtaacccccggactcgaaacatggacctgggcagatgacctttaacaagctgtgattcctgagagaggaacacctgcaccaactgcccaggaaacacacggaattccgtctcatttcattgtcctcccttttgtccactcatgcattcaacaaacacttcctgagaacttacacctgaaaccatgttgactaaagatgaccccatcctcgctg

SEQ ID NO: 14291 - DNA, 814 bp, Homo sapiens
ggggatgcagcagcggcagcggcggcggcggcggcggcagcggcagcggcggcgcggagtcccctgcgcccagcggcccggccgggctgcggcagaggcggcggcggcgccccgctccgggtgaggttgccggggccgtgcgcgctgatctgcgagtgaagagggacgagggaaaagaaacaaagccacagacgcaacttgagactcccgcatcccaaaagaagcaccagatcagcaaaaaaagaagatgggccccccgagcctcgtgctgtgcttgctgtccgcaactgtgttctccctgctgggtggaagctcggccttcctgtcgcaccaccgcctgaaaggcaggtttcagagggaccgcaggaacatccgccccaacatcatcctggtgctgacggacgaccaggatgtggagctgggttccatgcaggtgatgaacaagacccggcgcatcatggagcagggcggggcgcacttcatcaacgccttcgtgaccacacccatgtgctgcccctcacgctcctccatcctcactggcaagtacgtccacaaccacaacacctacaccaacaatgagaactgctcctcgccctcctggcaggcacagcacgagagccgcacctttgccgtgtacctcaatagcactggctaccggacagctttcttcgggaagtatcttaatgaatacaacggctcctacgtgccacccggctggaaggagtgggtcggactccttaaaaactcccgcttttataactacacgctgtgtcggaacggggtgaaagagaagcacggctccgactactccaag

SEQ ID NO: 14292 - DNA, 1635 bp, Homo sapiens
gtgtcgagtgagtgtgcgtctgtgtgtcccggcgagggtgcgcgctcggcgccgggagcgcggccagccgagtccggaggcatcgggaggtcgagagccgccgggaccccagctctgcgttcactgccccgtccggagctggacttcggggccggggccggggccgtgcgccggggacaggcagggccgggtcgcgggccgcgcgtcccccaggccggagatctgcgagtgaagagggacgagggaaaagaaacaaagccacagacgcaacttgagactcccgcatcccaaaagaagcaccagatcagcaaaaaaagaagatgggccccccgagcctcgtgctgtgcttgctgtccgcaactgtgttctccctgctgggtggaagctcggccttcctgtcgcaccaccgcctgaaaggcaggtttcagagggaccgcaggaacatccgccccaacatcatcctggtgctgacggacgaccaggatgtggagctgggttccatgcaggtgatgaacaagacccggcgcatcatggagcagggcggggcgcacttcatcaacgccttcgtgaccacacccatgtgctgcccctcacgctcctccatcctcactggcaagtacgtccacaaccacaacacctacaccaacaatgagaactgctcctcgccctcctggcaggcacagcacgagagccgcacctttgccgtgtacctcaatagcactggctaccggacagctttcttcgggaagtatcttaatgaatacaacggctcctacgtgccacccggctggaaggagtgggtcggactccttaaaaactcccgcttttataactacacgctgtgtcggaacggggtgaaagagaagcacggctccgactactccaaggattacctcacagacctcatcaccaatgacagcgtgagcttcttccgcacgtccaagaagatgtacccgcacaggccagtcctcatggtcatcagccatgcagccccccacggccctgaggattcagccccacaatattcacgcctcttcccaaacgcatctcagcacatgtaagcctcagcactctgcctgccagaggcactgcttagcatgaagggggagggtcaggctttagcaacagtactgtcaccaccatgacttcactgtgcctcctctctaatcctcctggtttaaagaccccaagaacatactgcttgtccatggtgaaactgggatgcaactccagacagcctgggcaacagaccaaggcaggagaatttttaacttgggatacacggcctcccaccaagaggtgtgtggatggaactgcatagaataggtttccttttaatgccatgtgtattttatttaagacatctaaaaacattcttttgaggagggggtctatagttttaccagactaattatttgccaccatttattgagctgtgggctatgtagcaggtgctgtgctaagcccttggcattattgtccagtccctgaatattcacagtgacccttggtgtaccagttatctattgccatgtaacaaatcatcccagaatctagcaacttaaaacaacaaacacaaattatctcacggtgtctgtgagtcaggaatctgggagtggctgttctgagcttctg

SEQ ID NO: 14293 - DNA, 4498 bp, Homo sapiens
cacacatgcctccggggctcctccagagctgagaggccggccccgcggctcctgctctctgccccatagcaagctgctacacaagagagacaatgacaaggtggacgcccaggaggagaactttctgcccaagtaccagcgtgtgaaggacctgtgtcagcgtgctgagtaccagacggcgtgtgagcagctgggacaggtaagaaggctcccttccctcccaacggctccccctcctgactgcagccggccctgacctgcgaggctctgagagccgctgagccagcagggccagggcctcccaacgggtagtcctttgctgccgtgtggtgcccaagatgctgtttggtggtgcaggatgatgctcacaataagtgattcatttctcagcagcctttggaccctgaccgtgtcagaggccaagtgtcccgtgggtgtgtgtatgcccttagcgcctctctagcccttgccgatctctcttgcacgaaggccccagcaggagttaaattattttattttcaccatattcactttgacagtatcctctttgtgactggttttccttttataggagtaataagacatggctttttaaaataaatataggtaaggttttaaaaagtgaattgattgcaagagaaatattaaggaaattatggccaggaacagtccgtggctcatgcctgaggtcccagctactccagagctgaggcgggaggatggcttgagcccacgtgttggaggctgcagtgagctatgattgcgccactgcactccagcttgggtgacagaataagaccctgtctctaaaaacataagaaaaaagaaaattatctgggaagtatcagagatagccagaaactgacatgtttgggaaagcctgaaggaggcttttctgaggctggaaagccagggcaggcttggagaggagggtcgggggcggggcagggcagggaggggagtgggatggaaactctgccttggctggcccaaggggtgccggaggtgtgtccctgccctgcctgtcaaaggctgggactttgagctggggctggagctgtgtgcctgtttcacctatgagaaaaagcaaaaccagggccctggtattgaaggccaaggcctgaagtggatgcgtttctgatggactgcatttgaatgactccatcttaacactgcacacagaattagtacaggcccatacaggcctgactgtgcctccccacccagtgtgtgtttgtaaacccacagacccctcttagtcacacaattaacccgtatctgccaccgggcaggagctgtggatttcatccctccgttgtacagcatgaatgcgtccccccgcttgccaggcactgtcctaggcgcagggccacagcctcgaacatgctcaacagaagctcctgccctcccagagctgatgttctggagagagttcagccttgactttgtaccgagatcccagaagtggttctgattttagttctgggctaaaaggagtgaaatgaggaggccaggaagtctttgcccctcgacgagggaacgttgtcaagtcccccactggttctttctgatgtctcccctgacccagatcagggcttgggcagccagaatgacctctttgctggggccaagaaagaggaggtatcagcattttccaaacaatcagagcacaccactgaagccaaaggaagagagtgctgagggcggagtttggggcacttagcctaggccagctgggaggcagcaacccacggcccccgacccagccccggagctttggggacctcaggctcagacgtctgccccccatcccaggcaacggccctgctcacaagccggtactccccgagtgccgttgccatgtccctgcttgtgccgtgccttctggaatgccctgcccagtgtagaagctgtaccctgtggcccgaggacgtctcttaggggcctcacacccagccatagcattgtcttgggtaccttgtccgtgctaccccacgtggtagatgtttttttgtcatttgctgaacaaacgtgcccaggaaccgagctcatgtgcatctgtctgtctcccggtgacacggggacatcctaagggcagggcccggctagaattcatgtcatcattgccaaagcccagaccagggcccaggccgggcaggagtaaatgtgccctgggcacctcgtaatgatgatcatcacgggcaacacgtgagtgtaagctctacctccagccaccctatctggcaggtatgttctgtacacggggaaactgaggcccagggctcaggcaaactgcccacagcctcacagcttcaagtggtggaggcaggatttgaacccaggtagttgggctgcgggaccttcgttctcagcagctgtagggaccccaagtcaagccgacactggcccagccctgtggggctcaggcgccgcccccgccaggacagcctcgggacgggccatgtggacacggcttctacatgagtagttgcaggggcagcaaaccctttccgcacaagatcagacagtaaatagtttgggctttgcaggccacatatttgtttttgttcttgctttttacaactctgaaaacgtacaatgtaaaaaccgtccttggtttgcaggccatacaaaaacaggctgtgggctggagttgactagcaagagggctgctgtttgccgacccctcaagtcgtgccccagctgagtttgttgggttggagcggggagcaggcagtggggaaggagaattccaggcagagagagctaagtggacaggaggctgctcgccagcgcacacagctcagggcttcacgcagaactcagagccctggcttttcttgaaaaatcagacctgggcttctgggcctgtgctcccctctggcgacagtcagatgggtatagccggtcacagtgcccactttagcctccccaggtcccccaggcgcttctgggctggcctcattcagggccatgcctgctggcccatcagtctacttctgcactaaggaatccaggttgctggaagggcctgcatgcattgaaggggatgggagggtggcagggcgctgtgaatgcaattagattcagcctccaggtgagaacagatgggcgggacaggggcaagatgagcaggtgaaaggcaccagggccttcaacggcagcgggcgggggcagacggtgcagcagagggttgggggggatggtggcaccagactccacacttttccttacagctcttgcacctcccagttgtgtgacccaggacacatctctctacctccgtgtgcctcatcttgaatcggcacagtaatgacagcacctgcctcgtagggtagcgtgaggtgtagtaagcaagttaatatattaacacacagtgcttggcacatgctaagtgctggagagacacagggaacagatctgacccatggcctggaaaggtcactttggcacagaataggccctaaagagtcactgggtcaatgggctggagcagctgtggacagaagggaagagaatccagtttacaggtggttgcagaatcccgtgaggggatccaggaggctggaactggggaagagcagaaggatcaacacgagagatttggacagtgattctatctacattcagcgtctgaccacaggcctggagttgagtgcacacgtggagcctctgcacacactgcactgattgagtctgggaaggtggtcaggggagacctccttgcgctggagcagacgggaaggaagagaagcctccagcagcaggaagggctggagaaaaggcattctaggcagaaggaacagtgagcgccaagtccctggggcagcagcccacaggggatactggagagagggctgagggagaggaggaccgatgggtaggccagggccagattgcagaggatgttcaaagactagtatcaggagcttgggtcttgtcttaaagacagtgggagccattgaagggttttaagtaggagagtaatatgatccaacttgccctttaaaaagattcctctagctgccatgtgggtggattttaggagcagacagaagcaggtaaccgtgagagtggtggctgtcggaggcatctcgctgggggatgatggtagctctgcccaaggttcaagcagtggcagtggagagaagcggcattggagatagcagaggtggggctcggtaacagctggatgcaagcagggagagggatgtctccagggtggatgggggtggcaggggagaggcgggtttaggggagcagatgagcagctggccgaggccctggcatgtctttcagaagtggcagtgtgtggaggacgccacggggaagctgaagctgcataagtgcaagggccccatgcggctgggcggcagcagagccctctccaacctcgtgcccaagtactacgggcagggcagcgaggcctgcacctgtgacagcggggactacaagctcagcctggccggacgccggaaaaaactcttcaagaagagta

SEQ ID NO: 14294 - DNA, 398 bp, Homo sapiens
cacacatgcctccggggctcctccagagctgagaggccggccccgcggctcctgctctctgccccatagcaagctgctacacaagagagacaatgacaaggtggacgcccaggaggagaactttctgcccaagtaccagcgtgtgaaggacctgtgtcagcgtgctgagtaccagacggcgtgtgagcagctgggacagaagtggcagtgtgtggaggacgccacggggaagctgaagctgcataagtgcaagggccccatgcggctgggcggcagcagagccctctccaacctcgtgcccaagtactacgggcagggcagcgaggcctgcacctgtgacagcggggactacaagctcagcctggccggacgccggaaaaaactcttcaagaagagta

SEQ ID NO: 14295 - DNA, 3905 bp, Homo sapiens
ctcgggcgcgcacaggcagctcggtttgccctgcgattgagctgcgggtcgcggccggcgccggcctctccaatggcaaatgtgtgtggctggaggcgagcgcgaggctttcggcaaaggcagtcgagtgtttgcagaccggggcgagtcctgtgaaagcagataaaagaaaacatttattaacgtgtcattacgaggggagcgcccggccggggctgtcgcactccccgcggaacatttggctccctccagctccgagagaggagaagaagaaagcggaaaagaggcagattcacgtcgtttccagccaagtggacctgatcgatggccctcctgaatttatcacgatatttgatttattagcgatgccccctggtttgtgtgttacgcacacacacgtgcacacaaggctctggctcgcttccctccctcgtttccagctcctgggcgaatcccacatctgtttcaactctccgccgagggcgagcaggagcgagagtgtgtcgaatctgcgagtgaagagggacgagggaaaagaaacaaagccacagacgcaacttgagactcccgcatcccaaaagaagcaccagatcagcaaaaaaagaagatgggccccccgagcctcgtgctgtgcttgctgtccgcaactgtgttctccctgctgggtggaagctcggccttcctgtcgcaccaccgcctgaaaggcaggtttcagagggaccgcaggaacatccgccccaacatcatcctggtgctgacggacgaccaggatgtggagctgggttccatgcaggtgatgaacaagacccggcgcatcatggagcagggcggggcgcacttcatcaacgccttcgtgaccacacccatgtgctgcccctcacgctcctccatcctcactggcaagtacgtccacaaccacaacacctacaccaacaatgagaactgctcctcgccctcctggcaggcacagcacgagagccgcacctttgccgtgtacctcaatagcactggctaccggacagctttcttcgggaagtatcttaatgaatacaacggctcctacgtgccacccggctggaaggagtgggtcggactccttaaaaactcccgcttttataactacacgctgtgtcggaacggggtgaaagagaagcacggctccgactactccaaggattacctcacagacctcatcaccaatgacagcgtgagcttcttccgcacgtccaagaagatgtacccgcacaggccagtcctcatggtcatcagccatgcagccccccacggccctgaggattcagccccacaatattcacgcctcttcccaaacgcatctcagcacatcacgccgagctacaactacgcgcccaacccggacaaacactggatcatgcgctacacggggcccatgaagcccatccacatggaattcaccaacatgctccagcggaagcgcttgcagaccctcatgtcggtggacgactccatggagacgatttacaacatgctggttgagacgggcgagctggacaacacgtacatcgtatacaccgccgaccacggttaccacatcggccagtttggcctggtgaaagggaaatccatgccatatgagtttgacatcagggtcccgttctacgtgaggggccccaacgtggaagccggctgtctgaatccccacatcgtcctcaacattgacctggcccccaccatcctggacattgcaggcctggacatacctgcggatatggacgggaaatccatcctcaagctgctggacacggagcggccggtgaatcggtttcacttgaaaaagaagatgagggtctggcgggactccttcttggtggagagaggcaagctgctacacaagagagacaatgacaaggtggacgcccaggaggagaactttctgcccaagtaccagcgtgtgaaggacctgtgtcagcgtgctgagtaccagacggcgtgtgagcagctgggacagaagtggcagtgtgtggaggacgccacggggaagctgaagctgcataagtgcaagggccccatgcggctgggcggcagcagagccctctccaacctcgtgcccaagtactacgggcagggcagcgaggcctgcacctgtgacagcggggactacaagctcagcctggccggacgccggaaaaaactcttcaagaagaagtacaaggccagctatgtccgcagtcgctccatccgctcagtggccatcgaggtggacggcagggtgtaccacgtaggcctgggtgatgccgcccagccccgaaacctcaccaagcggcactggccaggggcccctgaggaccaagatgacaaggatggtggggacttcagtggcactggaggccttcccgactactcagccgccaaccccattaaagtgacacatcggtgctacatcctagagaacgacacagtccagtgtgacctggacctgtacaagtccctgcaggcctggaaagaccacaagctgcacatcgaccacgagattgaaaccctgcagaacaaaattaagaacctgagggaagtccgaggtcacctgaagaaaaagcggccagaagaatgtgactgtcacaaaatcagctaccacacccagcacaaaggccgcctcaagcacagaggctccagtctgcatcctttcaggaagggcctgcaagagaaggacaaggtgtggctgttgcgggagcagaagcgcaagaagaaactccgcaagctgctcaagcgcctgcagaacaacgacacgtgcagcatgccaggcctcacgtgcttcacccacgacaaccagcactggcagacggcgcctttctggacactggggcctttctgtgcctgcaccagcgccaacaataacacgtactggtgcatgaggaccatcaatgagactcacaatttcctcttctgtgaatttgcaactggcttcctagagtactttgatctcaacacagacccctaccagctgatgaatgcagtgaacacactggacagggatgtcctcaaccagctacacgtacagctcatggagctgaggagctgcaagggttacaagcagtgtaacccccggactcgaaacatggacctggatggaggaagctatgagcaatacaggcagtttcagcgtcgaaagtggccagaaatgaagagaccttcttccaaatcactgggacaactgtgggaaggctgggaaggttaagaaacaacagaggtggacctccaaaaacatagaggcatcacctgactgcacaggcaatgaaaaaccatgtgggtgatttccagcagacctgtggtattggccaggaggcctgagaaagcaagcacgcactctcagtcaacatgacagattctggaggataaccagcaggagcagagataacttcaggaagtccatttttgcccctgcttttgctttggattatacctcaccagctgcacaaaatgcattttttcgtatcaaaaagtcaccactaaccctcccccagaagctcacaaaggaaaacggagagagcgagcgagagagatttccttggaaatttctcccaagggcgaaagtcattggaatttttaaatcataggggaaaagcagtcctgttctaaatcctcttattcttttggtttgtcacaaagaaggaactaagaagcaggacagaggcaacgtggagaggctgaaaacagtgcagagacgtttgacaatgagtcagtagcacaaaagagatgacatttacctagcactataaaccctggttgcctctgaagaaactgccttcattgtatatatgtgactatttacatgtaatcaacatgggaacttttaggggaacctaataagaaatcccaattttcaggagtggtggtgtcaataaacgctctgtggccagtgtaaaagaaaa

SEQ ID NO: 14296 - DNA, 363 bp, Homo sapiens
gtccgcaactgtgttctccctgctgggtggaagctcggccttcctgtcgcaccaccgcctgaaaggcaggtttcagagggaccgcaggaacatccgccccaacatcatcctggtgctgacggacgaccaggatgtggagctggctttcttcgggaagtatcttaatgaatacaacggctcctacgtgccacccggctggaaggagtgggtcggactccttaaaaactcccgcttttataactacacgctgtgtcggaacggggtgaaagagaagcacggctccgactactccaagcacgccgagctacaactacgcgcccaacccggacaaacactggatcatgcgctacacggggcccatga

SEQ ID NO: 14297 - DNA, 632 bp, Homo sapiens
ggttccatgcaggtgatgaacaagacccggcgcatcatggagcagggcggggcgcacttcatcaacgccttcgtgaccacacccatgtgctgcccctcacgctcctccatcctcactggcaagtacgtccacaaccacaacacctacaccaacaatgagaactgctcctcgccctcctggcaggcacagcacgagagccgcacctttgccgtgtacctcaatagcactggctaccggacaggtcctgagccgattaagaaatcagacccaagagtcagctgatgaaagtcaacactgcactctgatgaatctggtgaaggctgggtttgagggcatggcttccttctgagagcatttgggcttcctgactaaactccagagtgtgacagacttcccactgatgcaggtccacacctctcctccccgcgcagacaggacaagcctcctgaaaactagccctccccgggggcagctcagtccccagaggaaaagcaagggaagggattgggctatgcatgcccacttcggcccttcaaatccactaggcacatgctaggggtcagcaaaccacagccaatggacctaaccaggccctccatttgttttagtaaataaagttttattggaacata

SEQ ID NO: 14298 - DNA, 1220 bp, Homo sapiens
aaaagaaatgaagttgatgtatgtcccaagttttgatgaaactgtatttgtaaaaaaaattttgtagtttaagtattgtcatacagtgttcaaaaccccagccaatgaccagcagttggtatgaagaacctttgacattttgtaaaaggccatttcttgggagttttttggtgtgtctgtttttttaaagtattcaagatactaccagtcaacatctttttggaagaaaatgccttgggtttagaagattttcttaaaaggggagtagatggttgtagattgactaaaaagtctaccatacttcaagggactacaggtaagtctcatagtataccagctttggtacttcattttttaaaaaagtattaatcaattgcaaagaaattcgccttggccaacccttctttgtgtatcaggtagtctaacctgatacaagtagttgacagatttcaactatcaatcaccagtccaacccatttctcatttaacagatgacggagataatccctaaaagcacccacatttgtttcaatgccccaaacaggccaaggctccctagcaactccctagtggcgttttttaacttctcagaaactgttaccattatttgaaataggcttccttaacctcctttacccttaacccaacagggatttaaaaaaaaaaaaaaaaaaaaaaaactctttaggctccaattttaaatagaaacctttatttacaatgacatccaaaatggtcagcaaagcagtcacagctcaccatcccccataagtcatttcatgtggtttcaattctttgcaagataaagaataatttctatttttttaagcaacataatgtaaacttgattgaaactgaattcattctcaagagtataagtcaattcctgagaatttaaatattgctctcatattttattcttcgaaactccatatattagaaaggaagagagaaaacaccctgctcgtttattaacagtgtgccttggagttgaaaacaataaatcaatccttgaggttttgctcctaggaacctaattgtgaacaaaactcacagcttctgcaaataaaaagggaactgggcaggcatacatgtaactggcaatccattctgtttactttcagctgcacccacctctggatcaaagaacttctaggacatcaagccaattatcttctgtaataccctacccctaatatagatacccccaactcacctca

SEQ ID NO: 14299 - DNA, 412 bp, Homo sapiens
aaaagaaatgaagttgatgtatgtcccaagttttgatgaaactgtatttgtaaaaaaaattttgtagtttaagtattgtcatacagtgttcaaaaccccagccaatgaccagcagttggtatgaagaacctttgacattttgtaaaaggccatttcttgggagttttttggtgtgtctgtttttttaaagtattcaagatactaccagtcaacatctttttggaagaaaatgccttgggtttagaagattttcttaaaaggggagtagatggttgtagattgactaaaaagtctaccatacttcaagggactacagctgcacccacctctggatcaaagaacttctaggacatcaagccaattatcttctgtaataccctacccctaatatagatacccccaactcacctca

SEQ ID NO: 14300 - DNA, 2325 bp, Homo sapiens
gacttaaagatggaggaagctatgagcaatacaggtatttcgttttattattaaagcctaaacaaagttctcctatcttggcccatccttcagtctcatctctgtgagtctgcacctgttatcttgagaaactgcccttccctctggtctgcccgagaccaggatcacccaccaaagataggtgtcacctaggagaccttctttgtatagttctttggggactttttctttcttggtgatggttaacattcattctcctttgacacttgaaaacttaggcagtttcagcgtcgaaagtggccagaaatgaagagaccttcttccaaatcactgtgagttgaggaaccagcttacaaatagaaatctggttctgaccgcttcattttgccaatgctattctatttgcatgccatttcttacataccaccctttgtttgttctcatgatgagggtgggggggaagtactaatgcacatctttccctaagaaaacacttgaatccatttcatgttttagattaatgccttgtccagtacactgctgttctcgctataatctgtgcttggtaaacttgagctattacttagaggttgagaagcatttaaatattacaaattgctaggcatcttgaaggctgtggctacaaaagtgctaactgatatacaacatcagtagtaggatggcctcattaaatggtttccaaaaagcccatgctacaaactctcactccagtgccattggaggctgacagggactaagagactggcaacctgtaaagttcacctctattctaaagggagcaggccagtttgctccctgcaggaatgggctgaggttcgccagattttctcattcgtctaccaaatccaaaaatgcaagtatgtgtgagaattctttatcattatcatctaatttgacattaagttaaccatgtgggcaaattatcgcccttggtgaactgccacttgcaacctctggtctactcatttcttcctttatatgcatataaacctgtgtggctttaataggacattagtaacaggtcacctaagcctttcttcggtgcttctagaattaaggtacagaatctttacatatcacaatctccttagccactattctgtccagatccttaaatgccatccttgccaggcattgggtgtataagtaaacaaaaaattgaggtgactaggtggtggcaatcccgttctaagtaacctagaaatattcattctcagcagccttgaagcaaagcttcctcagctataggaccgattaggaagtcatgataaagaccatgatagctaagtgctaagatgagtttgttttgttctttaggggacaactgtgggaaggctgggaaggttaagaaacaacagaggtggacctccaaaaacatagaggcatcacctgactgcacaggcaatgaaaaaccatgtgggtgatttccagcagacctgtggtattggccaggaggcctgagaaagcaagcacgcactctcagtcaacatgacagattctggaggataaccagcaggagcagagataacttcaggaagtccatttttgcccctgcttttgctttggattatacctcaccagctgcacaaaatgcattttttcgtatcaaaaagtcaccactaaccctcccccagaagctcacaaaggaaaacggagagagcgagcgagagagatttccttggaaatttctcccaagggcgaaagtcattggaatttttaaatcataggggaaaagcagtcctgttctaaatcctcttattcttttggtttgtcacaaagaaggaactaagaagcaggacagaggcaacgtggagaggctgaaaacagtgcagagacgtttgacaatgagtcagtagcacaaaagagatgacatttacctagcactataaaccctggttgcctctgaagaaactgccttcattgtatatatgtgactatttacatgtaatcaacatgggaacttttaggggaacctaataagaaatcccaattttcaggagtggtggtgtcaataaacgctctgtggccagtgtaaaagaaaatccctcgcagttgtggacatttctgttcctgtccagataccatttctcctagtatttctttgttatgtcccagaactgatgttttttttttaaggtactgaaaagaaatgaagttgatgtatgtcccaagttttgatgaaactgtatttgtaaaaaaaattttgtagtttaagtattgtcatacagtgttcaaaaccccagccaatgaccagcagttggtatgaagaacctttgacattttgtaaaaggccatttcttggga

SEQ ID NO: 14301 - DNA, 1319 bp, Homo sapiens
gacttaaagatggaggaagctatgagcaatacaggtatttcgttttattattaaagcctaaacaaagttctcctatcttggcccatccttcagtctcatctctgtgagtctgcacctgttatcttgagaaactgcccttccctctggtctgcccgagaccaggatcacccaccaaagataggtgtcacctaggagaccttctttgtatagttctttggggactttttctttcttggtgatggttaacattcattctcctttgacacttgaaaacttaggcagtttcagcgtcgaaagtggccagaaatgaagagaccttcttccaaatcactgggacaactgtgggaaggctgggaaggttaagaaacaacagaggtggacctccaaaaacatagaggcatcacctgactgcacaggcaatgaaaaaccatgtgggtgatttccagcagacctgtggtattggccaggaggcctgagaaagcaagcacgcactctcagtcaacatgacagattctggaggataaccagcaggagcagagataacttcaggaagtccatttttgcccctgcttttgctttggattatacctcaccagctgcacaaaatgcattttttcgtatcaaaaagtcaccactaaccctcccccagaagctcacaaaggaaaacggagagagcgagcgagagagatttccttggaaatttctcccaagggcgaaagtcattggaatttttaaatcataggggaaaagcagtcctgttctaaatcctcttattcttttggtttgtcacaaagaaggaactaagaagcaggacagaggcaacgtggagaggctgaaaacagtgcagagacgtttgacaatgagtcagtagcacaaaagagatgacatttacctagcactataaaccctggttgcctctgaagaaactgccttcattgtatatatgtgactatttacatgtaatcaacatgggaacttttaggggaacctaataagaaatcccaattttcaggagtggtggtgtcaataaacgctctgtggccagtgtaaaagaaaatccctcgcagttgtggacatttctgttcctgtccagataccatttctcctagtatttctttgttatgtcccagaactgatgttttttttttaaggtactgaaaagaaatgaagttgatgtatgtcccaagttttgatgaaactgtatttgtaaaaaaaattttgtagtttaagtattgtcatacagtgttcaaaaccccagccaatgaccagcagttggtatgaagaacctttgacattttgtaaaaggccatttcttggga

SEQ ID NO: 14302 - DNA, 4238 bp, Homo sapiens
gggccatttctggacaacagctgctattttcacttgagccgaagttaatttctcggggagttctcgggcgcgcacaggcagctcggtttgccctgcgattgagctgcgggtcgcggccggcgccggcctctccaatggcaaatgtgtgtggctggaggcgagcgcgaggctttcggcaaaggcagtcgagtgtttgcagaccggggcgagtcctgtgaaagcagataaaagaaaacatttattaacgtgtcattacgaggggagcgcccggccggggctgtcgcactccccgcggaacatttggctccctccagctccgagagaggagaagaagaaagcggaaaagaggcagattcacgtcgtttccagccaagtggacctgatcgatggccctcctgaatttatcacgatatttgatttattagcgatgccccctggtttgtgtgttacgcacacacacgtgcacacaaggctctggctcgcttccctccctcgtttccagctcctgggcgaatcccacatctgtttcaactctccgccgagggcgagcaggagcgagagtgtgtcgaatctgcgagtgaagagggacgagggaaaagaaacaaagccacagacgcaacttgagactcccgcatcccaaaagaagcaccagatcagcaaaaaaagaagatgggccccccgagcctcgtgctgtgcttgctgtccgcaactgtgttctccctgctgggtggaagctcggccttcctgtcgcaccaccgcctgaaaggcaggtttcagagggaccgcaggaacatccgccccaacatcatcctggtgctgacggacgaccaggatgtggagctgggttccatgcaggtgatgaacaagacccggcgcatcatggagcagggcggggcgcacttcatcaacgccttcgtgaccacacccatgtgctgcccctcacgctcctccatcctcactggcaagtacgtccacaaccacaacacctacaccaacaatgagaactgctcctcgccctcctggcaggcacagcacgagagccgcacctttgccgtgtacctcaatagcactggctaccggacagctttcttcgggaagtatcttaatgaatacaacggctcctacgtgccacccggctggaaggagtgggtcggactccttaaaaactcccgcttttataactacacgctgtgtcggaacggggtgaaagagaagcacggctccgactactccaaggattacctcacagacctcatcaccaatgacagcgtgagcttcttccgcacgtccaagaagatgtacccgcacaggccagtcctcatggtcatcagccatgcagccccccacggccctgaggattcagccccacaatattcacgcctcttcccaaacgcatctcagcacatcacgccgagctacaactacgcgcccaacccggacaaacactggatcatgcgctacacggggcccatgaagcccatccacatggaattcaccaacatgctccagcggaagcgcttgcagaccctcatgtcggtggacgactccatggagacgatttacaacatgctggttgagacgggcgagctggacaacacgtacatcgtatacaccgccgaccacggttaccacatcggccagtttggcctggtgaaagggaaatccatgccatatgagtttgacatcagggtcccgttctacgtgaggggccccaacgtggaagccggctgtctgaatccccacatcgtcctcaacattgacctggcccccaccatcctggacattgcaggcctggacatacctgcggatatggacgggaaatccatcctcaagctgctggacacggagcggccggtgaatcggtttcacttgaaaaagaagatgagggtctggcgggactccttcttggtggagagaggcaagctgctacacaagagagacaatgacaaggtggacgcccaggaggagaactttctgcccaagtaccagcgtgtgaaggacctgtgtcagcgtgctgagtaccagacggcgtgtgagcagctgggacagaagtggcagtgtgtggaggacgccacggggaagctgaagctgcataagtgcaagggccccatgcggctgggcggcagcagagccctctccaacctcgtgcccaagtactacgggcagggcagcgaggcctgcacctgtgacagcggggactacaagctcagcctggccggacgccggaaaaaactcttcaagaagaagtacaaggccagctatgtccgcagtcgctccatccgctcagtggccatcgaggtggacggcagggtgtaccacgtaggcctgggtgatgccgcccagccccgaaacctcaccaagcggcactggccaggggcccctgaggaccaagatgacaaggatggtggggacttcagtggcactggaggccttcccgactactcagccgccaaccccattaaagtgacacatcggtgctacatcctagagaacgacacagtccagtgtgacctggacctgtacaagtccctgcaggcctggaaagaccacaagctgcacatcgaccacgagattgaaaccctgcagaacaaaattaagaacctgagggaagtccgaggtcacctgaagaaaaagcggccagaagaatgtgactgtcacaaaatcagctaccacacccagcacaaaggccgcctcaagcacagaggctccagtctgcatcctttcaggaagggcctgcaagagaaggacaaggtgtggctgttgcgggagcagaagcgcaagaagaaactccgcaagctgctcaagcgcctgcagaacaacgacacgtgcagcatgccaggcctcacgtgcttcacccacgacaaccagcactggcagacggcgcctttctggacactggggcctttctgtgcctgcaccagcgccaacaataacacgtactggtgcatgaggaccatcaatgagactcacaatttcctcttctgtgaatttgcaactggcttcctagagtactttgatctcaacacagacccctaccagctgatgaatgcagtgaacacactggacagggatgtcctcaaccagctacacgtacagctcatggagctgaggagctgcaagggttacaagcagtgtaacccccggactcgaaacatggacctgggacttaaagatggaggaagctatgagcaatacaggcagtttcagcgtcgaaagtggccagaaatgaagagaccttcttccaaatcactgggacaactgtgggaaggctgggaaggttaagaaacaacagaggtggacctccaaaaacatagaggcatcacctgactgcacaggcaatgaaaaaccatgtgggtgatttccagcagacctgtggtattggccaggaggcctgagaaagcaagcacgcactctcagtcaacatgacagattctggaggataaccagcaggagcagagataacttcaggaagtccatttttgcccctgcttttgctttggattatacctcaccagctgcacaaaatgcattttttcgtatcaaaaagtcaccactaaccctcccccagaagctcacaaaggaaaacggagagagcgagcgagagagatttccttggaaatttctcccaagggcgaaagtcattggaatttttaaatcataggggaaaagcagtcctgttctaaatcctcttattcttttggtttgtcacaaagaaggaactaagaagcaggacagaggcaacgtggagaggctgaaaacagtgcagagacgtttgacaatgagtcagtagcacaaaagagatgacatttacctagcactataaaccctggttgcctctgaagaaactgccttcattgtatatatgtgactatttacatgtaatcaacatgggaacttttaggggaacctaataagaaatcccaattttcaggagtggtggtgtcaataaacgctctgtggccagtgtaaaagaaaatccctcgcagttgtggacatttctgttcctgtccagataccatttctcctagtatttctttgttatgtcccagaactgatgttttttttttaaggtactgaaaagaaatgaagttgatgtatgtcccaagttttgatgaaactgtatttgtaaaaaaaattttgtagtttaagtattgtcatacagtgttcaaaaccccagccaatgaccagcagttggtatgaagaacctttgacattttgtaaaaggccatttcttggga

SEQ ID NO: 14303 - DNA, 7825 bp, Homo sapiens
gggaagtccgaggtcacctgaagaaaaagcggccagaagaatgtgactgtcacaaaatcaggtgaggcagtagcaaagggacctccctaagaccccactctcctacaggacagttcagttcatcccctctcgtgattgacccctttcattttttatttttatctttatcttctcccctcatggcattaaaaaaatccgtaatttacctccctgttgtcagccagtgtggcacacggacctgctcctcagccaggctggcgcccagattccagtactgctagcaagagacccgtgctggctgcgcagagccggctccaggccggaaaagtgcctctgccgattgccctttcagaaatcccccatgtggtttgaggtccatgttcccggcttaggggtcccctggcccaaaggactgaactctagaacagctctaatagaacattctgtgctgacggaaatgggctatatctgcactacaccacacgtggctggtgcatacttaaaattttggctagtgtcactaaggagccaaattttttattttgcttaattcaaattgaagtagccacctgtggccagtggctaccatactggacagcacagctgtagaagccctgctgtctttccagaaagtgttgcaaaacacaggcttccctgtgttgaccccgaccaagtgtgagtaggcagggtggtgagggaaccaacctcaagatgctgaggctttgacatgtaaaattaaccatcaaaaaagaaaggaaaaaggatgctgaggctgatgcacctaaagccaggcccagcttctagtcgtggctaaattacaattaacccaacctgctaaagtctagcaaaagtccaggcagagtcctggctcatgcttggagaaagaagccactcaggcaggcacctgctgccctgaggatagggtcatgccctacccaccaccaccccagaaggagggacaggggtggggcagcagcaacacatgggagtcccagaaatcacagcttgcacctgccagcggagccctctgagccactcctgaagcctggggctgggggggtctgttacagctaccacacccagcacaaaggccgcctcaagcacagaggctccagtctgcatcctttcaggtaagagcagcttgaggtcctggggaagagatgcagaggcctgcatgaggaggtggccctcccttaagctaaaactcagaagaaaaggaaagaagtccaggcccttccctgggaagtccacggtagccctcgaagaggccttacttcccaatcaacactgagcgggcctccgacgcccccttgtggctaaatggggttaccgcaactccaccaagcagggcaggacacaggaaggaggggaaaggggtgtcaacaggagtcccagtagctgcctggttctgtccccagcttgtgcccccttgggagttaaagtagaatgacaagacccaggttctggtcccggctctgccttggagcagcactgggacttgggaccctgaattgctatgcccatggctctctgttggagaagcctcagcgaagcccttaggtggacaggaagagcagagacatggggtcactgatccctcagaggcccaaggtgtgtgtggccctctgcgcccataggaagggcctgcaagagaaggacaaggtgtggctgttgcgggagcagaagcgcaagaagaaactccgcaagctgctcaagcgcctgcagaacaacgacacgtgcagcatgccaggcctcacgtgcttcacccacgacaaccagcactggcagacggcgcctttctggacacgtgagcaagcccagggcaggggtggacaggctgaggcccaggggttcaagaaacttctccacttagtgacccagacctctctcagaaagggggtccccaacaccaggggtccacggtgctcgggacagcctcttggcatttgacgaactggttttaggggctgtccctgacaggaatcactgttggcagatggggcctcctcccgcaggcactcaggacatgctctctcttccttggcagtggggcctttctgtgcctgcaccagcgccaacaataacacgtactggtgcatgaggaccatcaatgagactcacaatttcctcttctgtgaatttgcaactggcttcctagagtactttgatctcaacacagacccctaccaggtacaggcaacccgagctagagggatgggggtgtggggtacaccagtgctgccaggtaggccccccccaacctcagggaagtgatgacaaattgtccaagtcccactgagtccctgagccggtgggagtaagttgtgaagctgctgagattgggggttctgtgttcaatcagccttttttgcctccatcaccctgctttttgcctccatcaccctgcgtgtgtaatatatatggcttcttccctctaacttaacatgcagcatgcaaccaggttttgccggaacttgtgaagactcctaacactgtcaggctgtaggatcaagccaaatatcacccactgcagggcctacacggaccgcgcagctaatataacagtaacacactgcaccaagcactctgctaagtgcttccgtacagtaagccatctaaacacacatgcgactgaagtggcccaggaccacacaagaccaaaaggagcagtggcatgtctggtcatcggaacatgtgggcccttgtacagggacagtcactactgagctccagcactagagctttcctgtactgtggccttggtattgcccaggctttgacctttcaagaaaagcctgaaataatttaaatgaaatctgatgtttaaatgtcagcagcacaaatgctttaattactatataggtgtgcagtctttctccttagataggttcaccctcatactttaccaaaggggtaggttaagtccctcaccggtagctcccagactacacaagaacccaggccacttacccgtcctttcatcaaatggctgctttgcaatcaggaggagctgagggcccctgaatgaaggctgctgataaaaccaagacttggaaggctttctttccaagcttgggaagtttcctgaccagtggctgcagaactccaacgttaaatacacagacgtggtttttattctcctgagttttcactctcatgaagagtgaacctggtgggacttgaagccaaaaagtcacctaactcttccaaacgctggctcttgcagaagttggagtaaacaggtcaccagcccctagcaccttccacccgccacctgcctgaaatatgtcccctggttggtagaagggcagggcgagagtccctgtacttaccttgttgacagactaccttttttgcaaccagctgatgaatgcagtgaacacactggacagggatgtcctcaaccagctacacgtacagctcatggagctgaggagctgcaagggttacaagcagtgtaacccccggactcgaaacatggacctgggtgagtaggcaccccaacgtggggcccttggacagcagggtaaccaaaggaagggactcaggaggtggtgtctaccccaagaatgagcctgaaatcaccaggctttgggaggtgatacagttccagacgagtcatgggagcccctgtccatagcaggcagatgacctttaacaagctgtgattcctgagagaggaacacctgcaccaactgcccaggaaacacacggaattccgtctcatttcattgtcctcccttttgtccactcatgcattcaacaaacacttcctgagaacttacacctgaaaccatgttgactaaagatgaccccatcctcgctgacttgtgtggagccagtgttgtcctaagaagagcagtccacagcaggaggcctcttgcttgtatggaaagggtaaaactggatggtagaatccagtgtgactggggaagggcactgctaaataaaaccagggtcagacctctgaactgagtcctgaaaagtaggatgcaatcgaccactgagaaaacgtggagggctggcgctccaggaagcttaaagtgtgaggagcagaaagcagctcagggggtgcagccaacacaactgaggccagtggagagtggcgggagggcatcgggccaccctgtgtggggcttcctaggccacggtagagtttagatttcatttgtggtgtatcaggaagccaatggagggttttaacctgggcaccgacatttgctaggtggagaatgggactttatgggagaaaacagcgaagatggcccagttatccagggagaaatggtggtggcttggactagaggtgggagcagtaaagatgatggatttcagattcaggtggtgaagcccccagacaacatggtgatgggaggtgcgggattaggagtcccaggtaaatcctgagttttgtttgggacaggacaaaatctgcagttttaagtttagaatgccaaccagatagatattttaagatgaaaaaagctaaacaggcatggttgctcatgcctatgattccagggctttggaaggctgaggtgggaggagacttgagcccaggagttcaaggttacagtgagctatgatagcaccactgcactccagcctgggagacagagctgtcgccccatctctaaaaataaaaaaaatatattaaaaaaagaaaacaaagctaaaagaaaaatgaagttcacttactagtgagagagagtggcctaaaaaaaacctttggtatttaaggtcccttggggaagggactgtgtctaggaggatgcctagagttcatgtcaggaaaatggctacacagcttaggaggaattcagacgctaccgtcggctctagttatgaagagggaagagctaatgtgtttacacaagatgttgcactaatacttctggtcaggagcctgatatgatcagaattttcactagtagcttcctaatctctgccactcaagtgctgctactcttgtgatcaaagtgcaatgacatattagtcactgtgtgccaggctctgtgctgagcattttacatgtgttagctgataagctttgaggtgaatcttatcctcattttatggaggagtaaggtgaacaaggtgggctgaccccggagcccacgcacttgatcctgccacatcctcgggaaaacttccccagagcccaaaggggaactccctcctgcacttggtcagggctcttggctttctgtcctctggagcacagatgttcatgcctgcatctacctccctcaccataactaaggtcagcgctgaatgaagccatcagggtcctgaaactgatcatggtgacactggattttaggcaatctacaaggctatctaggagacttagggcaggttcccctcataattcagtctacccctcataattcagtctactctgagtagggaacactatcagcatcatgggattgtgacaaaaaagcataagatggttttctggtgtgttggggttgttttgcctaaactatctgctcctgttttgtttttcatttctccttcatttaggacttaaagatggaggaagctatgagcaatacaggtatttcgttttattattaaagcctaaacaaagttctcctatcttggcccatccttcagtctcatctctgtgagtctgcacctgttatcttgagaaactgcccttccctctggtctgcccgagaccaggatcacccaccaaagataggtgtcacctaggagaccttctttgtatagttctttggggactttttctttcttggtgatggttaacattcattctcctttgacacttgaaaacttaggcagtttcagcgtcgaaagtggccagaaatgaagagaccttcttccaaatcactgtgagttgaggaaccagcttacaaatagaaatctggttctgaccgcttcattttgccaatgctattctatttgcatgccatttcttacataccaccctttgtttgttctcatgatgagggtgggggggaagtactaatgcacatctttccctaagaaaacacttgaatccatttcatgttttagattaatgccttgtccagtacactgctgttctcgctataatctgtgcttggtaaacttgagctattacttagaggttgagaagcatttaaatattacaaattgctaggcatcttgaaggctgtggctacaaaagtgctaactgatatacaacatcagtagtaggatggcctcattaaatggtttccaaaaagcccatgctacaaactctcactccagtgccattggaggctgacagggactaagagactggcaacctgtaaagttcacctctattctaaagggagcaggccagtttgctccctgcaggaatgggctgaggttcgccagattttctcattcgtctaccaaatccaaaaatgcaagtatgtgtgagaattctttatcattatcatctaatttgacattaagttaaccatgtgggcaaattatcgcccttggtgaactgccacttgcaacctctggtctactcatttcttcctttatatgcatataaacctgtgtggctttaataggacattagtaacaggtcacctaagcctttcttcggtgcttctagaattaaggtacagaatctttacatatcacaatctccttagccactattctgtccagatccttaaatgccatccttgccaggcattgggtgtataagtaaacaaaaaattgaggtgactaggtggtggcaatcccgttctaagtaacctagaaatattcattctcagcagccttgaagcaaagcttcctcagctataggaccgattaggaagtcatgataaagaccatgatagctaagtgctaagatgagtttgttttgttctttaggggacaactgtgggaaggctgggaaggttaagaaacaacagaggtggacctccaaaaacatagaggcatcacctgactgcacaggcaatgaaaaaccatgtgggtgatttccagcagacctgtggtattggccaggaggcctgagaaagcaagcacgcactctcagtcaacatgacagattctggaggataaccagcaggagcagagataacttcaggaagtccatttttgcccctgcttttgctttggattatacctcaccagctgcacaaaatgcattttttcgtatcaaaaagtcaccactaaccctcccccagaagctcacaaaggaaaacggagagagcgagcgagagagatttccttggaaatttctcccaagggcgaaagtcattggaatttttaaatcataggggaaaagcagtcctgttctaaatcctcttattcttttggtttgtcacaaagaaggaactaagaagcaggacagaggcaacgtggagaggctgaaaacagtgcagagacgtttgacaatgagtcagtagcacaaaagagatgacatttacctagcactataaaccctggttgcctctgaagaaactgccttcattgtatatatgtgactatttacatgtaatcaacatgggaacttttaggggaacctaataagaaatcccaattttcaggagtggtggtgtcaataaacgctctgtggccagtgtaaaagaaaatccctcgcagttgtggacatttctgttcctgtccagataccatttctcctagtatttctttgttatgtcccagaactgatgttttttttttaaggtactgaaaagaaatgaagttgatgtatgtcccaagttttgatgaaactgtatttgtaaaaaaaattttgtagtttaagtattgtcatacagtgttcaaaaccccagccaatgaccagcagttggtatgaagaaccttt

SEQ ID NO: 14304 - DNA, 1550 bp, Homo sapiens
gggaagtccgaggtcacctgaagaaaaagcggccagaagaatgtgactgtcacaaaatcagctaccacacccagcacaaaggccgcctcaagcacagaggctccagtctgcatcctttcaggaagggcctgcaagagaaggacaaggtgtggctgttgcgggagcagaagcgcaagaagaaactccgcaagctgctcaagcgcctgcagaacaacgacacgtgcagcatgccaggcctcacgtgcttcacccacgacaaccagcactggcagacggcgcctttctggacactggggcctttctgtgcctgcaccagcgccaacaataacacgtactggtgcatgaggaccatcaatgagactcacaatttcctcttctgtgaatttgcaactggcttcctagagtactttgatctcaacacagacccctaccagctgatgaatgcagtgaacacactggacagggatgtcctcaaccagctacacgtacagctcatggagctgaggagctgcaagggttacaagcagtgtaacccccggactcgaaacatggacctgggacttaaagatggaggaagctatgagcaatacaggggacaactgtgggaaggctgggaaggttaagaaacaacagaggtggacctccaaaaacatagaggcatcacctgactgcacaggcaatgaaaaaccatgtgggtgatttccagcagacctgtggtattggccaggaggcctgagaaagcaagcacgcactctcagtcaacatgacagattctggaggataaccagcaggagcagagataacttcaggaagtccatttttgcccctgcttttgctttggattatacctcaccagctgcacaaaatgcattttttcgtatcaaaaagtcaccactaaccctcccccagaagctcacaaaggaaaacggagagagcgagcgagagagatttccttggaaatttctcccaagggcgaaagtcattggaatttttaaatcataggggaaaagcagtcctgttctaaatcctcttattcttttggtttgtcacaaagaaggaactaagaagcaggacagaggcaacgtggagaggctgaaaacagtgcagagacgtttgacaatgagtcagtagcacaaaagagatgacatttacctagcactataaaccctggttgcctctgaagaaactgccttcattgtatatatgtgactatttacatgtaatcaacatgggaacttttaggggaacctaataagaaatcccaattttcaggagtggtggtgtcaataaacgctctgtggccagtgtaaaagaaaatccctcgcagttgtggacatttctgttcctgtccagataccatttctcctagtatttctttgttatgtcccagaactgatgttttttttttaaggtactgaaaagaaatgaagttgatgtatgtcccaagttttgatgaaactgtatttgtaaaaaaaattttgtagtttaagtattgtcatacagtgttcaaaaccccagccaatgaccagcagttggtatgaagaaccttt

SEQ ID NO: 14305 - DNA, 4556 bp, Homo sapiens
atgtcctatgcccccttcagagatgtacggggaccctctatgcaccgaacccaatacgttcattccccgtatgatcgtcctggttggaaccctcggttctgcatcatctcggggaaccagctgctcatgctggatgaggatgagatacaccccctactgatccgggaccggaggagcgagtccagtcgcaacaaactgctgagacgcacagtctccgtgccggtggaggggcggccccacggcgagcatgaataccacttgggtcgctcgaggaggaagagtgtcccaggggggaagcagtacagcatggagggtgcccctgctgcgcccttccggccctcgcaaggcttcctgagccgacggctaaaaagctccatcaaacgaacgaagtcacaacccaaacttgaccggaccagcagctttcgccagatcctgcctcgcttccgaagtgctgaccatgaccgggcccggctgatgcaaagctttaaggagtcacactctcatgagtccttgctgagtcctagcagtgcagctgaggcattggagctcaacttggatgaagattccattatcaagccagtgcacagctccatcctgggccaggagttctgttttgaggtaacaacttcatcaggaacaaaatgctttgcctgtcggtctgcggccgaaagagacaaatggattgagaatctgcagcgggcagtaaagcccaacaaggacaacagccgccgggtagacaatgtgctaaagctgtggatcatagaggcccgggagctgccccccaagaagcggtactactgtgagctctgcctggatgacatgctgtatgcacgcaccacctccaagccccgctctgcctctggggacaccgtcttctggggcgagcacttcgagtttaacaacctgccggctgtccgtgccctgcggctgcatctgtaccgtgactcagacaaaaagcgcaagaaggacaaggcaggctatgtcggcctggtgactgtgccagtggccaccctggctgggcgccacttcacagagcagtggtaccctgtaaccctgccaacaggcagtgggggatctgggggcatgggttcgggagggggagggggctcggggggtggctcagggggcaagggcaaaggaggttgcccggctgtgcggctgaaagcacgttaccagacaatgagcatcttgcccatggagctatataaagagtttgcagagtatgtcaccaaccattatcggatgctgtgtgcagtcttggagcccgccctgaatgtcaaaggcaaggaggaggttgccagtgcactagttcacatcctgcagagtacaggcaaggccaaggacttcctttcagacatggccatgtctgaggtagaccggttcatggaacgggagcacctcatattccgcgagaacacgcttgccactaaagccatagaagagtatatgagactgattggtcagaaatacctcaaggatgccattggagaattcatccgtgctctgtatgaatctgaggaaaactgcgaggtagaccctatcaagtgcacagcatccagtttggcagagcaccaggccaacctgcgaatgtgctgtgagttggccctgtgcaaggtggtcaactcccactgcgtgttcccgagggagctgaaggaggtgtttgcttcgtggcggctgcgctgcgcagagcgaggccgggaggacatcgcagacaggcttatcagcgcctcactcttcctgcgcttcctctgcccagcgattatgtcgcccagtctctttgggcttatgcaggagtacccagatgagcagacctcacgaaccctcaccctcattgccaaggtcatccagaacctggccaacttttccaagtttacctcaaaggaggactttctgggcttcatgaatgagtttctggagctggaatggggttccatgcagcagtttttgtatgagatctccaatctggacacgctaaccaacagcagtagctttgagggttacatcgacttgggccgagagctctccacactgcatgccctactctgggaggtgctgccccagctcagcaaggaagccctcctgaagctgggtccactgccccggctcctcaacgacatcagcacagctctgaggaaccccaacatccaaaggcagccaagccgccagagtgagcggccccggcctcagcctgtggtactgcgggggccatcggctgagatgcagggctacatgatgcgggacctcaacagctccatcgaccttcagtccttcatggctcgaggcctcaacagctctatggacatggctcgcctcccctccccaaccaaggaaaagccacccccaccaccgcctggtggtggtaaagacctgttctatgtaagccgtccacccctggcccgttcctcaccagcatactgcacgagcagctcggacatcacagagccagagcagaagatgctgagtgtcaacaagagtgtgtccatgctggacttacagggtgatgggcctggtggccgcctcaacagcagcagtgtttcgaacctggcggccgtaggggacctgctgcactcaagccaggcctcgctgacagcagccttggggctacggcctgcgcctgccggacgcctctcccaggggagtggctcatccatcacggcggctggcatgcgcctcagccagatgggtgtcaccacagacggtgtccctgcccagcaactgcgaatccccctctccttccagaaccctctcttccacatggctgctgatgggccaggtcccccaggcggccatggagggggcggtggccatggcccaccttcctcccatcaccaccaccaccaccatcaccaccaccgaggtggagagccccctggggacacctttgccccattccatggctatagcaagagtgaggacctctcttccggggtccccaagccccctgctgcctccatccttcatagccacagctacagtgatgagtttggaccctctggcactgacttcacccgtcggcagctttcactccaggacaacctgcagcacatgctgtcccctccccagatcaccattggtccccagaggccagccccctcagggcctggaggtgggagcggtgggggcagcggtgggggtggcgggggccagccgcctccattgcagaggggcaagtctcagcagttgacagtcagcgcagcccagaaaccccggccatccagcgggaatctattgcagtccccagagccaagttatggccccgcccgtccacggcaacagagcctcagcaaggagggcagcattgggggcagcgggggcagcggtggcggagggggtggggggctgaagccctccatcaccaagcagcattctcagacaccatccacattgaaccccacaatgccagcctctgagcggacagtggcctgggtctccaacatgcctcacctgtcggctgacatcgagagtgcccacatcgagcgggaagagtacaagctcaaggagtactcaaaatcgatggatgagagccggctggatagggtgaaggagtacgaggaggagattcactcactgaaagagcggctgcacatgtccaaccggaagctggaagagtatgagcggaggctgctgtcccaggaagaacaaaccagcaaaatcctgatgcagtatcaggcccgactggagcagagtgagaagaggctaaggcagcagcaggcagagaaggattcccagatcaagagcatcattggcaggctgatgctggtggaggaggagctgcgccgggaccaccccgccatggctgagccgctgccagaacccaagaagaggctgctcgacgctcagctcctcatcaggtaattctcctggttccgctttggccacgggcggaggacacagggggaggtgactccggaccactgcaggagaggcagcttccccccttgggtccaacaaacccgcgtgtgacgctggccccaccgtggaatggcctggcccccccagccccaccacccccaccccggctgcagattacggagaacggcgagttccgaaacaccgcagaccactagcccacccagcatcagagaccttctcttcctttcctgtgcaccccaccctgtaacagcaccaaccaccaggattggacatcaccgaggaacagcgggattgcctccccgaatgcctccctgggaggcacactgattgcccacccccaccactgcaccatttccaggagggagagtggggaccctcagccgcccccttttccttcccattggggtgctgccctctctttgacccccagggacccttgccccaggacaccgcctaccccgtacagaccccttcactccggggtgctatccccatcctctgcctcatcgttcccctgagcactgggggacagaccctcacccccaccctgggggtgtggcacctccaaactttcaacttcagggtgatttttttagcagtaaccagagctgacaatctaactcccctccaccgccccattttggcctcccctgccccccttgttatggggaggggaccccggg

SEQ ID NO: 14306 - DNA, 5827 bp, Homo sapiens
atgagcaggtctcgagcctccatccatcgggggagcatccccgcgatgtcctatgcccccttcagagatgtacggggaccctctatgcaccgaacccaatacgttcattccccgtatgatcgtcctggttggaaccctcggttctgcatcatctcggggaaccagctgctcatgctggatgaggatgagatacaccccctactgatccgggaccggaggagcgagtccagtcgcaacaaactgctgagacgcacagtctccgtgccggtggaggggcggccccacggcgagcatgaataccacttgggtcgctcgaggaggaagagtgtcccaggggggaagcagtacagcatggagggtgcccctgctgcgcccttccggccctcgcaaggcttcctgagccgacggctaaaaagctccatcaaacgaacgaagtcacaacccaaacttgaccggaccagcagctttcgccagatcctgcctcgcttccgaagtgctgaccatgaccgggcccggctgatgcaaagctttaaggagtcacactctcatgagtccttgctgagtcctagcagtgcagctgaggcattggagctcaacttggatgaagattccattatcaagccagtgcacagctccatcctgggccaggagttctgttttgaggtaacaacttcatcaggaacaaaatgctttgcctgtcggtctgcggccgaaagagacaaatggattgagaatctgcagcgggcagtaaagcccaacaaggacaacagccgccgggtagacaatgtgctaaagctgtggatcatagaggcccgggagctgccccccaagaagcggtactactgtgagctctgcctggatgacatgctgtatgcacgcaccacctccaagccccgctctgcctctggggacaccgtcttctggggcgagcacttcgagtttaacaacctgccggctgtccgtgccctgcggctgcatctgtaccgtgactcagacaaaaagcgcaagaaggacaaggcaggctatgtcggcctggtgactgtgccagtggccaccctggctgggcgccacttcacagagcagtggtaccctgtaaccctgccaacaggcagtgggggatctgggggcatgggttcgggagggggagggggctcggggggtggctcagggggcaagggcaaaggaggttgcccggctgtgcggctgaaagcacgttaccagacaatgagcatcttgcccatggagctatataaagagtttgcagagtatgtcaccaaccattatcggatgctgtgtgcagtcttggagcccgccctgaatgtcaaaggcaaggaggaggttgccagtgcactagttcacatcctgcagagtacaggcaaggccaaggacttcctttcagacatggccatgtctgaggtagaccggttcatggaacgggagcacctcatattccgcgagaacacgcttgccactaaagccatagaagagtatatgagactgattggtcagaaatacctcaaggatgccattggagaattcatccgtgctctgtatgaatctgaggaaaactgcgaggtagaccctatcaagtgcacagcatccagtttggcagagcaccaggccaacctgcgaatgtgctgtgagttggccctgtgcaaggtggtcaactcccactgcgtgttcccgagggagctgaaggaggtgtttgcttcgtggcggctgcgctgcgcagagcgaggccgggaggacatcgcagacaggcttatcagcgcctcactcttcctgcgcttcctctgcccagcgattatgtcgcccagtctctttgggcttatgcaggagtacccagatgagcagacctcacgaaccctcaccctcattgccaaggtcatccagaacctggccaacttttccaagtttacctcaaaggaggactttctgggcttcatgaatgagtttctggagctggaatggggttccatgcagcagtttttgtatgagatctccaatctggacacgctaaccaacagcagtagctttgagggttacatcgacttgggccgagagctctccacactgcatgccctactctgggaggtgctgccccagctcagcaaggaagccctcctgaagctgggtccactgccccggctcctcaacgacatcagcacagctctgaggaaccccaacatccaaaggcagccaagccgccagagtgagcggccccggcctcagcctgtggtactgcgggggccatcggctgagatgcagggctacatgatgcgggacctcaacagctccatcgaccttcagtccttcatggctcgaggcctcaacagctctatggacatggctcgcctcccctccccaaccaaggaaaagccacccccaccaccgcctggtggtggtaaagacctgttctatgtaagccgtccacccctggcccgttcctcaccagcatactgcacgagcagctcggacatcacagagccagagcagaagatgctgagtgtcaacaagagtgtgtccatgctggacttacagggtgatgggcctggtggccgcctcaacagcagcagtgtttcgaacctggcggccgtaggggacctgctgcactcaagccaggcctcgctgacagcagccttggggctacggcctgcgcctgccggacgcctctcccaggggagtggctcatccatcacggcggctggcatgcgcctcagccagatgggtgtcaccacagacggtgtccctgcccagcaactgcgaatccccctctccttccagaaccctctcttccacatggctgctgatgggccaggtcccccaggcggccatggagggggcggtggccatggcccaccttcctcccatcaccaccaccaccaccatcaccaccaccgaggtggagagccccctggggacacctttgccccattccatggctatagcaagagtgaggacctctcttccggggtccccaagccccctgctgcctccatccttcatagccacagctacagtgatgagtttggaccctctggcactgacttcacccgtcggcagctttcactccaggacaacctgcagcacatgctgtcccctccccagatcaccattggtccccagaggccagccccctcagggcctggaggtgggagcggtgggggcagcggtgggggtggcgggggccagccgcctccattgcagaggggcaagtctcagcagttgacagtcagcgcagcccagaaaccccggccatccagcgggaatctattgcagtccccagagccaagttatggccccgcccgtccacggcaacagagcctcagcaaggagggcagcattgggggcagcgggggcagcggtggcggagggggtggggggctgaagccctccatcaccaagcagcattctcagacaccatccacattgaaccccacaatgccagcctctgagcggacagtggcctgggtctccaacatgcctcacctgtcggctgacatcgagagtgcccacatcgagcgggaagagtacaagctcaaggagtactcaaaatcgatggatgagagccggctggatagggtgaaggagtacgaggaggagattcactcactgaaagagcggctgcacatgtccaaccggaagctggaagagtatgagcggaggctgctgtcccaggaagaacaaaccagcaaaatcctgatgcagtatcaggcccgactggagcagagtgagaagaggctaaggcagcagcaggcagagaaggattcccagatcaagagcatcattggcagcccgtcccttcaggctgatgctggtggaggaggagctgcgccgggaccaccccgccatggctgagccgctgccagaacccaagaagaggctgctcgacgctcagagaggcagcttccccccttgggtccaacaaacccgcgtgtgacgctggccccaccgtggaatggcctggcccccccagccccaccacccccaccccggctgcagattacggagaacggcgagttccgaaacaccgcagaccactagcccacccagcatcagagaccttctcttcctttcctgtgcaccccaccctgtaacagcaccaaccaccaggattggacatcaccgaggaacagcgggattgcctccccgaatgcctccctgggaggcacactgattgcccacccccaccactgcaccatttccaggagggagagtggggaccctcagccgcccccttttccttcccattggggtgctgccctctctttgacccccagggacccttgccccaggacaccgcctaccccgtacagaccccttcactccggggtgctatccccatcctctgcctcatcgttcccctgagcactgggggacagaccctcacccccaccctgggggtgtggcacctccaaactttcaacttcagggtgatttttttagcagtaaccagagctgacaatctaactcccctccaccgccccattttggcctcccctgccccccttgttatggggaggggaccccgggtgagggggccctattaccccttgatttctcaggagcgtctgggggggctcagcacgcacaaactccttctccttctaccactcttaaatttactccctccccacccagaacccagatggggtggagggggccaccggggcagggagggggcggcaaggggggaatgggagttgtctccccttctccccacacctgatctgctctcggctggtcccagagcggggtgagggggcttatgcccccccctcccccagtgtgttgggtggggtggaattgaggttagggtgaggggtcagggtttaggagggtgtgtatgttgggaggacaggctagttgatctgtcctactctgacacacagtcccctctgccccttccttctctcttcttggtctctactcccagggggaggggggaacttactctaggaaaagccatgtctctctcccccagggtggggggacctgtgttggaggaggggtgttggggggcccccttccatgactctgtcccctgggggaggtaggacagggctgggcttccctctcatcctccccctcccaatctccttccacctccctccctcccgccagctccacgatttttcggtgtttctctgtacatagttttctggcgggataggggaggtaggatggatggggtttggggtgggtaggccatgggaggggagaagcccctccttggcaccccctcttccctgactgctgtcccctacccagccttgcccccttcatccttttgcgtttggtattgagactctcctagactctactcctctttcttttgtatggacagttccccttcagtcccatccccctacacatacacccagccggggccaaatttatacttatataaaagttgtaaatatgtgaaattttatccctgtgccctttccccacctcaggccctacccctggaccctccccaaccttccttctctcttctttggctgttgtaattatctggggtttgtactgtacatatccggggtgtgtgtgtgtgggctgggggcaacccttctgtacagagcttcctggccccctccccccccgcccctctgcttccctccccacccaccacctcaagggtagggagttgctcttcctacctgttttattttgttttctcgttctccctccccaccccactcccagccttatctatcccccctcactgtccccttttctccactcccagccccatttcctttttttctggagtgtgtggtgaaacagaaaaaaacatgtttaataaacggagattgttctttta

SEQ ID NO: 14307 - DNA, 20480 bp, Homo sapiens
gggggaagaggaaagcctgcctatgggcaatgacctttaacccatctttccccccagctagccccttctggggtgggtgggcaccagggacctagcctccctggatctttggtgtccttcattactggggttttactgaccctctcagccatgctcccctgctgactgccagccccagtcatgggcctaaggcctcccaccccatccccctcagggggctcctgctcaggttccttgccccctccttcccgctgccagcctctccgccgtcgctgctcttcctgctgctttccggggggtaggtgaggccggagctgaggggcagagggaggtgggggcatgcactggggtcaggggtgggaacctgggttaacagcttcccttctggccccctccccaacttcccttctggccatttcctcccctccagaataccacttgggtcgctcgaggaggaagagtgtcccaggggggaagcagtacagcatggagggtgcccctgctgcgcccttccggccctcggtgagtggtgcctaccagatgtggctcagttgggccccctcccctccagccccaactggggccctaggagtctgagaaagagggcaggagggggagagagggagtgagagtgagaaaaagagtgtgtgtctgtgtgtgtctccccacctctttggtttcccccttcttggctctgcccccctgcttctgagaccagccctcccaccttctccaagctgtgtgtgtgtgtatatgtgtgtgtgtgtgtgcttgcactgtacccgtgggagcaaggaagacaaactggtattagggttcctatccccctttcctcgcctctggagacttcccttttccccatcccactttcatccaggggctctctaccagctgagggatgagtaggtagaactgaccctgccccaacccaccccatccccatttcccccccagcaaggcttcctgagccgacggctaaaaagctccatcaaacgaacgaagtcacaacccaaacttgaccggaccagcagctttcgccagatcctgcctcgcttccgaagtgctgaccatgaccggtacaggggctggagcatgtgggatgagattgatgtaatgtagggtctcctgtgtgagatgcagagggagggggttatctgtgtgcaaaggttgaaggattcaactcaagttggttgggggatgtcatggcacaggggacagaacagaaaagaactagaatagggatctgtgagcagcaggagaggggtagggtggcagagagaagacagacagacaggctggaaagggaatgaaggtgaagccaaggagggactcctcagggactcctcaggccaagaaggatgggctctagcccaggatcaaaggagctgtacaggaggagagtgaccctggaggaatgtttaaggaatgcagggaaggggttggtaggtgagtgagcaataggctgtaggtggaagggtgtcagggaaggtcaggaaatacaggggcagcaggttggagtggggctgggggtggctgaatgaatggatgatggctagggctcaaggacctcatcagtgagggaagagacagtatagagcatggcagagaaggggaggctgggacaggtgtgcagggtgacagaatgggaagcaacccatggactgaggcatgaagaagcagccagcggagaagtccagaaggcactgtccctgagaccaggctgaaggagacctccactgtttgcctttgttgcctgccatttggggttcctctctgggtttccccctcacccagtcactccccagggagaaccatgccctccctttcccccatgtctggccacccccaggattgggcaggtagggaggttgggataaagtgagtcacacctttccctgcccccctcccatgttgccagagctggatttggggccggcagggggtgagggcatggtattcctggccgcgggggcgggggggggggtccgggggccgggggagcgtcgcgctgacggcagccagagcctgcgatgacggggctgctataaataacttcttggaggctcccacacccaagctcccctcccgctttcccactgctctctactcttcatcccctgcccatctccataccgcttttgtattgctatcctacccctcattattccatgcccctagccccctttatcttctgccctcctgcagtgatttttttgcattccatcccctcttagccctcacctcggttctcccggccatctctccagttggccttcctcctcttctcctgtcctctgtcttgctgcacatacctttgtctccccctttcttcttcttgccctacctcctcttcttccctagtccgtgtattctgtcttttatcctctttgagctcttttctgcccacagctttctcctatttcttatgcttttccctcactctttcccctgcttctgctaaaacttgtcctcttatgctgtgttcattcattctttgaatcattaaatgtttatcaggcactagccgtgtgccaggcccaggctagacatatctcttctctgtgccttcacttctttacttccactttttcctttatactgaggctctggtttctggggttacctggaggtactacctagaagtgccccaggcccactttgttctctccttttttttttttcttttctgccatggtccatttctgggttgagatatttctagatgtccccagtcctcgcaatcccttaggtgtgagatggtgggagtttcttttttttcctttttttttttttaaatagaaatagggtctcactgtgttgcccagactggtcttgaactcctgggctcaagtgaccctcccacctcggcctttgaaatgttgggattacaggtgtgagccaccaggcccaggtggagcaggggagttccttaaaggattctgatttttctcacatccctcacgtccttcctgataggcagggtttctttctgtgtctgtttgggaagggtgttcagggggccttctctccaagtctccatcctggaacagactgatgatgcagggtacctatgtgtctaagaagagtaggggggccgggcgcggtggctcatgcctgtaatcccagcactttgggaggctgaatcacttgaggtcaggagtttgagaccagcctgaccaacagggtgaaaccccgtctcagctaaaaatacaaaaaaaaaaaagaaaaaaaaattagctgggtgtgctgaggcaggagagacgcttgagcccaggaggcagaagttgcagcaagccgagatcacaccactgtactccagcctgggcgacagagcaagactgtctcaaaaaaaaaaaaaaaaaaaaaaaaggaagagtgggaagccctgatcccttcctctcctgaacctcctgcctgccagggcccggctgatgcaaagctttaaggagtcacactctcatgagtccttgctgagtcctagcagtgcagctgaggcattggagctcaacttggatgaagattccattatcaagccagtgcacagctccatcctgggccaggagttctgttttgaggtactgggtctggtgggctggggagggccaaaggacaggggtgatggaaggtggggggcagagaggtctagagaaagtggcacaggtggggacatcaaggaaacagaaacttctgggactggaggaaagggtaggccagggaggaagagaaggtagcagagtctcctcccctctgtagccctttccctcaactccacactcctttctaggtaacaacttcatcaggaacaaaatgctttgcctgtcggtctgcggccgaaagagacaaatggattgagaatctgcagcgggcagtaaagcccaacaaggtattggggaataaaggggacacaacctgtgcagggcaaaggttgcaccaacacgggaagctgggggcctagggaggaaagtgagttaaaggaggagaggcttggggaaggagaggattgaggtacagtgtatctggacaagcagggggagacccccattattctgagtcccccatttcttttcgctttctgtactgctaccctgccttacgatctctttccctgccatagaagtcatagacttacagagttgatggggctctggaaattctttagtctagcttccctgcaggcaggaatgcttcactaataccccgcaggacacatcaaatacacttagccaagtttctgtaccttggtttcctctctaagacagagggaactggtggcaatgggttggattaaatgatctctaaggtccctttggcacataaattctatgagtctgttcttcccaaaacttcatgcttccagttctgtcagctattctctgtatcccagtttctagcaagcttacagtcctagtcacactcctctggggggaactcttgtgtcttgatgtccttaaagaactcaacccaagatgctgacatgatctgacctatgcagagtacaaacaccatgttccctttcaacacactgcaatatcacctgagccttaccattagcttgtgctcaattgtatccccccaggcccttactgattcttttttttttttttttgagacagagtctcactctgtcacccaggctggagtgcagtggcgtgatcttggctcactgcaacctccgcctcctgggtttaagcaattcctgtgcctcagcctccccagtagctgggattacaggcatgcaccaccacacccgactaatttttgtatttttagtagagacgaggtttcaccatgttggccaggctagtctcaaactcctgacctcaggttgtctgcctgcctcagcctcccaaagtgctaggattacaggcatgagccaccacatctggccaagctttacccattctatatgcaattcttttttcacaatttctgatagtctctgcaggactttccagttcccttcaaattctacattaatatttttggcttgttattccagcttttgaaatctttccaatactgtttgtgttgtctagtgtatgtctacgcttctacagtagcttcctggggctgctataacaaactgctacaaactgggtcacgtaaaacaacagaaatttattctctcacagttcaggaggctggaagtccaaaagcaaggtatcagcagggccacgctctctttgatgctgtagcagggaatccttccttgcctcttcctagcttccggaggttgccagcagtccttggcattcctgggcttataactgcatccgtctaatttctgcctccatcttcatgtagctggcttccttctgtgtgtctctgtatcctgtatctctgtgtctccaaatctccctctccatataaagacaccagtttttataaggtgggttaagggtccactctaattcagtatggcctcttttttttgagatggaatatcgctcttgtttcccaggcttggagtgcaatggcatgagctcagctcactgcaacctccgccttccaggttcaagtgattctcctgcctcagcctcctgagtagctgggattacaggcacgtgccactatgcccagctaatttgtttttgtatttttattagagacggggtttcactatgttggccaggctggctcgaactcctgacctcaggcaatccacccacctcggcctcccaaagtgctgggattacaggaatgagataccatggctggcctcttcttagtttgattacatttgcagggatcctgtttccaaataagatcacattcacaggttcagggtagacatgagttttggtgggatactattcaacccagtacaccgtctcaccttatgattgctgtctgtatcccactttcttactgtctctcctcttttggtgtctctctgtcccttccccctttaacatcatgcccaccccaccatgccaggacaacagccgccgggtagacaatgtgctaaagctgtggatcatagaggcccgggagctgccccccaagaagcggtactactgtgagctctgcctggatgacatgctgtatgcacgcaccacctccaagccccgctctgcctctggggacaccgtcttctggggcgagcacttcgagtttaacaacctgccggctgtccgtgccctgcggctgcatctgtaccgtgactcagacaaaaagcgcaagaaggacaaggcaggctatgtcggcctggtgactgtgccagtggccaccctggctgggcgccacttcacagagcagtggtaccctgtaaccctgccaacaggcagtgggggatctgggggcatgggttcgggagggggagggggctcggggggtggctcagggggcaagggcaaaggaggttgcccggctgtgcggctgaaagcacgttaccagacaatgagcatcttgcccatggagctatataaagagtttgcagagtatgtcaccaaccattatcggatgctgtgtgcagtcttggagcccgccctgaatgtcaaaggcaaggaggaggttgccagtgcactagttcacatcctgcagagtacaggcaaggccaaggtgagtgttgtgccctcagggaaaggtgacttgggaatgggcacttgcttgggggttagtgaggacagggcaaattcacgagattgggttgtgcagaggctgacacttggattttcctgggcctcaggacttcctttcagacatggccatgtctgaggtagaccggttcatggaacgggagcacctcatattccgcgagaacacgcttgccactaaagccatagaagagtatatgagactgattggtcagaaatacctcaaggatgccattggtatggcccacactcaggccctcttcttcccaaacctgccagatgtccaccccagaccccaagtccacccttccacagcttgatacttcctaacccagagtcctaggactccagcctccaacacctgattctgaaatttccccaaccctggccacccccttccctgcccttggaaagtgtgaccacaccctcttgtgcccccaccccccaggagaattcatccgtgctctgtatgaatctgaggaaaactgcgaggtagaccctatcaagtgcacagcatccagtttggcagagcaccaggccaacctgcgaatgtgctgtgagttggccctgtgcaaggtggtcaactcccactggtgagactgggaacgctgggctggggggccagggtcgggggaattatgtgttcatctgttcatctatctgtccatcctcaaagaggactgagcaccatttatgggcaaagcattgttctaggcgctatagagcaaacaggtgaaagaggcctggtccctgccctcagagggcctccaccagaatggggacaaattagaagaaaaaaaaaaaaagccacagagccataatggtgtgtaagtgctgagtaagggtccccccaacctctgtgtgacataaggtcagagagaaggcagagctttgagataagtggggaagaggtgcccccttgggtaggctttgaagactggtttaggttctgatatatggacatagttggcaagaaagacatttcagaagaaggctgtgagaaaggcacatgtgtgatggtgaaaaggcccaggagttttcaggggacattaaagtaggttagtagcaattacatcaggtttagtggagcatgtgcctcataatggggagtggcgggagagatgtctgggcaggaagattagctttagaaactggaaggcctcaaggagtctgaggtcattggtaggccttgggatgccattaaaggtgtcagaaatattgtgatttagaagattaatccataggctgggcacggtggctcacacctgtaataccagcactttgggaggctgaggcgggcagaccacctgaggtcaggagtttgagaccaggctgaccaacatggagaaaccctgtctctactaaaaatacaaaattagccagatgtggtggcacatgcctgtaatcccagctattcgggaggctaaggcaggagaatcacttgaatctgggaggtggaggttgtagtgagccgagatcacacgattgcactctagcctgggcaacaagagtgaaactccatctcaaaaaaaaaaaattaatccataagtagagtgtatgtagtagagtagagggatgtatgttgggggatgactggaatagagccagctgggggctcggaggcatgaaagtcagatcctgaatcagaacagtgacagaagttaggaaggagctactggaaggaccctctcgggaaaggatcagtaggaattgtcagcttattggaaaggagggagcatgtctgtggggagtcacggatgactcaagaggccatgaggctggtggttgggagaccggtggcctcattgacaaccaggaaagtcaggaggaggagccagttggaggtgtgggggcgatggtgagctctgctttacaccagccgagtttaaggtgtcagtgggacattgaagtggaactgggaggtgcggggagtgagctctgagccattccagggactggggatcatgcctggggcacctccatccccatttccctggaatccagaagagttggggggtccgagctccctgtacctcaagtgaccctccatctctctcccatctctgtctctccctggtgtctgtttttcttctcctcctctccttgtctctctcccacacccctccatctctctcccacgtgtctctcccctcaccttctctccccctccatttctctctccctaatctgtctgttccctctgccatggcccccttcttcaagcagcctcccatcttgctcctgcggtccctccttccctgtctctctcacccctgtttccacaccctcacctcctaccacccccctcagcatgttccctggaagctgagggtctctggggctcagtcccggtctctctctttctctctctctctctctgtctccccgacccttccccccagcgtgttcccgagggagctgaaggaggtgtttgcttcgtggcggctgcgctgcgcagagcgaggccgggaggacatcgcagacaggcttatcagcgcctcactcttcctgcgcttcctctgcccagcgattatgtcgcccagtctctttgggcttatgcaggagtacccagatgagcagacctcacgaaccctcaccctcattgccaaggtcatccagaacctggccaacttttccaagtgagggaagcttcaggagtgggcagggcagggagtggcagggcagggagtggcagggctgggggtcggcaagaagggtctcctgagtccccagagatcctgagatggggaggctatgataccttgtgtgtgtgtgtatgtgtgtgtatgtgtgtgtgtgtgtgtgtgtgtgtgtatgtgacctttatcttctgcattcttggctaggtttacctcaaaggaggactttctgggcttcatgaatgagtttctggagctggaatggggttccatgcagcagtttttgtatgagatctccaatctggacacgctaaccaacagcagtagctttgagggttacatcgacttgggccgagagctctccacactgcatgccctactctgggaggtgctgccccagctcagcaaggtcagcagatcccctctttgccctatccccagatggctccagaggttcctggagcctgagaaactaccctttgaagattttttttctccccttgtttctcgaggtgtcaccactactatcccaactcaggccccctccacctgcaccctcagaggccctcttagagctgggcactgagcccccaggtaacagcctcacccttccaggaagccctcctgaagctgggtccactgccccggctcctcaacgacatcagcacagctctgaggaaccccaacatccaaaggcagccaagccgccagagtgagcggccccggcctcagcctgtggtactgcgggggccatcggctgagatgcagggctacatgatgcgggacctcaacaggtgagcaccctgggacagccaggcctgtgccctaggagcccttctcctattctagatactcctcactgggccccacatgcatctctctagggcttgaaagaagggaggaaaaagcaccaagttctcaggggagacgataaggagacaggtacagtcagtggtaggctgagagccctttacagcctgagggagtgagagatttggagctctaggaatagggctgaggctccaccaactcacggcttagttgtaagcctagagcatccctgctgcaagctctgatttgctgtccctctgcctgcccatgctagtccccaggctgaggttcagccagcatgtcatgtcagccatgtgtcaaaatgttcaaacatctcagtaatagctagtgaataagcacttcccccagcccccgaccacaaccccacagacctccccatgatccagcacttagagcagtgacagcagaagcctagcagggcctgcagcctgctccagagtcccagcctccattctgataggtggtgcccgtgcttcatttgctgctcattattttgatgatggccctgctttttcctctgcccgtgtcttcctccatgacaccatacccatcccaccattcccgcctctcctttcatttgtccacatctctctccttctctgtctgtgctcgcccctctttccatctctctccagctccatcgaccttcagtccttcatggctcgaggcctcaacaggtgaggggctctcccctcccccgccctcctctcctctcctgtctgttccctctcccactccactggccttcgccctactcctctcctctcctcctccatggacctcatctcctccatatgtgcccagccctgcccccatcccttctcttgctgcccccatctcccctcctctaggcctcacccccttcccggaggggccctgtcctttccctttactcacctgtcccctcccatcctccctgcctgccctcttcagggctgccaccgctagctctcagcccttccctctgggtcccacttttcaccccaaggcctgtgccagaccacagcaaggttcaattgctaggagccctgaccttaccttctgcttgtgtgcccccttcccttctgacagctctatggacatggctcgcctcccctccccaaccaaggaaaagccacccccaccaccgcctggtggtggtaaagacctgttctatgtaagccgtccacccctggcccgttcctcaccagcatactgcacgagcagctcggacatcacagagccagagcagaagatgctgagtgtcaacaagagtgtgtccatgctggacttacagggtgatgggcctggtggccgcctcaacagcagcagtgtttcgaacctggcggccgtaggggacctgctgcactcaagccaggcctcgctgacagcagccttggggctacggcctgcgcctgccggacgcctctcccaggggagtggctcatccatcacggcggctggcatgcgcctcagccagatgggtgtcaccacagacggtgtccctgcccagcaactgcgaatccccctctccttccagaaccctctcttccacatggctgctgatgggccaggtcccccaggcggccatggagggggcggtggccatggcccaccttcctcccatcaccaccaccaccaccatcaccaccaccgaggtggagagccccctggggacacctttgccccattccatggctatagcaagagtgaggacctctcttccggggtccccaagccccctgctgcctccatccttcatagccacagctacagtgatgagtttggaccctctggcactgacttcacccgtcggcagctttcactccaggacaacctgcagcacatgctgtcccctccccagatcaccattggtccccagaggccagccccctcagggcctggaggtgggagcggtgggggcagcggtgggggtggcgggggccagccgcctccattgcagaggggcaagtctcagcagttgacagtcagcgcagcccagaaaccccggccatccagcgggaatctattgcagtccccagagccaagttatggccccgcccgtccacggcaacagagcctcagcaaggagggcagcattgggggcagcgggggcagcggtggcggagggggtggggggctgaagccctccatcaccaagcaggtaggtgaaggcaggaggaaggcgggctgggtcacaacagggagggaagaaggagatggggggtggggttgaaacagagtctgtggcctgaagttacaatcttcttgcctccttttggccattaaacaaatgtgtatagagggcctgctatgtgccatgtgctatgccaggcactaaggatacggcactgaaccctcttagcactctcattccagaggggattaatccataagtagaatgggggtgactggaatagggccagctgggggcttggaggcatgaagatcagatcctgaatcagaacaacaggagaaattctctggcattcaactcacatctctggcattcagaggtgataaaggctacagcagggcaataggactgggactgtcgtctcctttggctgtgctgttgccctctaaatgtaccctgctttttcccaccttttctttctctgttcgccctcactgtgccttgtcccagcattctcagacaccatccacattgaaccccacaatgccagcctctgagcggacagtggcctgggtctccaacatgcctcacctgtcggctgacatcgagagtgcccacatcgagcgggaagagtacaagctcaaggagtactcaaaatcgatggatgagagccggctggatagggtacgatgggctctaccagctccaagccccagtgtttccttttacccacaggggagatctctagtcacttccaagggaaacctccagggtcagttatggtggtaagaaaaggcaaagacctgatcacctcttgagaagccttccgtccatctggggagaccagatacacacagttgttaaaagtcactttcaactctattttgtaggttatatatatcatagactatctggggatcatctattttaggcttacctccatgttcttccccaggaggaacataagccctggctcctgtgactgcttaggaaaggaaatgttactttactggcagtaggagctaataaattggatggggatggagggggttgcagctatattacaagtgatgtctggcctacccagtcactgtcccatgggcataagtgacagtcagtgggcagggaatgcatgtggtaaagtagtatgtatcagtcatgtgtgaaaagaccatccagaccctcacttggtggaggctgagggcaaagggcaccaagagctctggggctaacacagataacttagcagaaagttacttgaggaagctgttgttcctagggcctgaggaagagggcggctgcaggattaggtcatatataaagaacatatgatcctaacacggggaagtggtctttgagcataggaaatgttgggactgactcagatgggcttgaccagcaaatttaatgagaattaaaccctaatattagccccaaggcagccaccgtaggaagttaattcacatctctcctctgcatgtagaagggttggtgatatatgtatgtatcctcttcagagaatgaggaaatagtcttttgaatcatttttttttctgtgcttcagatgaggaaaccttgttgagaaaggctgtagactagcactatccaatataactttctgcagtgatgaaatgttctgtaatctgtagtgttcacatgtgtctagttgtgattcaggaactgaatttttagatctatttaattttaattttgtaatttttttgagacagggtcttgctctgtcacccaggctggagtgcagtggtgcaaacatggctcgaggcaacctccgcctcctgggctcaagacatcctcccacctcagccccctgagtagctaggactacagggtcgtgctaccatgcctggctagttttttttcttttcttttttttttttttttttttttgtagagacggggttttgccatgttgcccaggctggtctagaacttgtgagctcaagtgatctacctgcctcagccttccaaagtgctgggattacaggtgttgagccactgtgcctggcctaaattttaaatagctacatgtgggctggtggctaccatattagacagcacagctgtagactctagagccaatagggcagataaaatgactcttctgagctcttccagctctggaattcctagattctcagcctagaattcacttgtagacctcctatccttggcaccttgacagagccaaggagagggtcacatggaggacagcacctgcctttcccccgtcaattgccttttcttcctatgtctccagcatgtgttctggggcctggcttagggctgaagagtcaccctatttttaatttctgagcacagttactcaaggtgtgtttgtgagtgtaggtttctgtgtgggtcttcatgaggggccatacatagacctcagggtgtgggagtctgtgaccttgctccattttgagggaacctcagcaccatggcagggtcttctcaaaagcaggtgtgtggatatgatccacaggcagggaaggggttggggaaggcagctggatgtccctcaacatgcagtggctgtgcttggcagacagggatggaggctgggtggtgggcttggggtggggcgcccctcatagtgcggggtcgtgtgcccggcgggcaggtgaaggagtacgaggaggagattcactcactgaaagagcggctgcacatgtccaaccggaagctggaagagtatgagcggaggctgctgtcccaggaagaacaaaccagcaaaatcctgatgcagtatcaggcccgactggagcagagtgagaagaggctaaggcagcagcaggcagagaaggattcccagatcaagagcatcattggcaggtgaggggcggcctggggagggggttgtgagggagagcctgaggctggagagagcaagtgggtgagctactccgctgactcccatccccaaactcaggagcccaccaggagagcccaccactctcctccccaggaagccacccactcactcatcaccagatggagagaaaccccaacctgcttagtgcattaaatatctctttaccaaaccctgacctctcttctgatagagtagcttcggaagcccttggaaaatgtacctgttcctgtccaaccatcactgcatttgcatttaccctaggccagagctccccactagttattctcaacttaacctgtgatgttcactccaaacctaagcagggctccctagccagagtaggccctgcccttcctgggtggaccctccctctctagccttggaaaggtgttctgttagaaagggtcttttagcctgtgtatgttttcagctgctccagcaagtcctgggctccaaagagggtatcctcagcaaagaggtcaattatcttcagagtggtggggtcggggtgggggggaccctgggcgcactccaaccagagccacctccattttgatccattctaaatgtattttatgtaagatttaattagaagaaaagggcttcttgaaatattttttgaaaaccactgctctaattgatatcctttatgataaatcacctcgaggatcttcacagtgaggtgacatgggggatgcagaagccaggtcctcagccatggaaggtctggggaaggggcactgctgtcctgattgggacgatggaggcctggaggtgtctggatggtagaagtctttgaggcacagaaagctgccttagcagggaggtgtaagggttcctgggaggaaggtggagagcatgatcctgaggaacagggagtcttgcatcacggcaatggagggactctgattctaagggataaggatgcctgaggtttttccagagagctatggggttccatgggcaggctctgagcctgtgcccgccactaaccccactgaagcccgtcccttcaggctgatgctggtggaggaggagctgcgccgggaccaccccgccatggctgagccgctgccagaacccaagaagaggctgctcgacgctcaggtggaaattacaatgtcatttatcttctccgtgtcccatccccatccatcccactgtctttcgtgcactcactacaccagccacctagccccatcaccatctgtctctcatagtctgctgtttgtccactggctgctcctggcagccccctagtgaccccatcttcatcccatcgtctgtgcctttgtcactcctggcagcgtcagcccaactcctgtgccttcccatccagtcttcccactcctctctgcatctcaggaccttctctaccagaaccttggtctttctgcccctagaccccacctagttccaagaacccctgccccttctttgctcactcctattcaagccacgttgttcagcttcctctgcgctcttgggccagagggctagaagctgccgttttctggaatagagcacagggcagtatgatctgtagtttctccaggccctggccggtaccctgaaaacttggggacccatcacctctgttctcttggctccctaattttcctgtctccttggcagctcctgcatagcttcctcttcctgactcttcagatcttgaaggccttccatcctgtaacctccctttgccctcagtatttaagtccagcctccctctggcctccctcccactctggccctcagaccttcccagctgcctgctgcccagcctctcttctcacaagccagcttctaggacctcccttctgcacccttaccccttgctttcccaaaattctgctcattttcctacccatactcctctttgctctgactgctaggctccccccgcctgccatccccccaccaaggctcctgaccccatgaccccactctctcccactgcagctcctcatcaggtaattctcctggttccgctttggccacgggcggaggacacagggggaggtgactccggaccactgcaggttggtcgtgaagcccactccctccaacacctccggagcctctcccctctcactgctgccctccacacccagagaacctccacagactccagccctccgacacctgcacagatccatctcccaagacaccacccaaagagagcatttgctgctgcttcccagaactgtccaacaataccttagcaacaccaagagttgggccctagatgggcccagcacattcacaggtcacacccacttccctgcaaaacccaccccctcccagcctcctcctgactctaagccctcctcttcctctacctctccagtgtatgtctgtcaccccccatttcaccagagcgtccttaggggctgggggtgggtttgttaatggggtggaggcaatgatgggttggaggatcttggctataggggctgtgctgactgcagcaggtaggttgggtttccctcttccttccctaatcttggttctctaccctcctttccactcctcacctgattctctctcttcctcctccttatatctgtgaggcagaaggcatctgaagctcatattagcccccattgggtgggaattaggagtgggtagttaactcagggagacttgagataccctggaaaaaatgctattgagatgtcctgacattaggcagggtggatggaacaagaaggagcaagaaaggaacctcaggcagatgttaggacatggacttgatcatgtggcctgggagtttagaaatggggagagacatcctcctagatcagatcgtgggctcagtaggcatgttgattcccagggagaggtgccaggaacagcatggtaaagaatgtactcttcacagctcacatccccaggttgctgatgccactcactccccctctcctgccatcgagtggccttgccggacacatcaccctacctaaaaagccagtaaatgagaacctgtcagctatagccatcatttctgagatgcgattttctttgggattgagctgcagtgggcagtggctccttacactgtaattttaattctctgcctgcccagcctctctgtcaaagtagctggtgatctataaagatgctaaaaggcaccaggggactttgccatttaaaggactcctgcagtgaattcttttgtaaaatgaataatggcaccctaatttatccactttctaaatttgggtccatgggggtgtccagggcatgcttatgtgctgtcaccagcagacaaacagagggaatggaatctgggggttccttccctgctctcccgccatactcaggataccctaccataagtgatttcctctcactgacttgcagaaaatgtgtgagatacccagcaagctaagaaggcagttttgctgggtatctcatacccaaggctggggtttgggtgatctgagaggttagctccttgatcctaggatggaagggagagcttatatagaagcttttacttggaaggttttgtatcctaaggtcagacatagctatattaccaagcctaaatgccatgtggcccaggaaataatttggacatttgttctaaaccacttgtggtaggtattggtctctctgcaactcagccattaattagaaattagttttgagcctgaattttaaaaagccaagtgttgcccccagcccacacacacacacacggacatgtacagtacaaaccccagataattacaacagccaaagagagaaggaagtgaatttcccaaccagaagcgtagggaaattcagatggctttcttttctcccagcagaggaacagaaggcggagctaagggcaggaaccaggagttggtcaaggagctataggaggtgatgagagtagaaccaggggtaggagctggtctggtacccctcaccctctaattgggagcccagggagaaggactgaaaagaagatgggagtggaaaagaataaagccagtttctgcttcccagggatgcagagattggggcatgctgtgtctgcagaagctcctagtcatttccgccataattgtgagagagaggggcagccctcccacaagatttttcccttcccatatcacttccctgaatccccttcctttccccccagtacagttaaacctctctctaatttggaatgttatatttgagaagatggccactgtgaataagtgacaaacggaatgacagtgtctatttaatgaaatgcatgtcttcaaaatatatacagaactcgatgaacaaggctttttccactcctcagggagcatgcattaatgaatagataggattcaaaagtctgttttctggtatgggttaaatatcccctcctacagacatatttccaccactaatttgcttagtacaccttttcttcacagataaaggaaaatgcaagctcagtttttcttcagattatgaagaaattccaaatccacaggggtttggattaatgaggttttgctgtactgcctccccttattcctcaacatgaagttcccacctcggattggggatgggtgggagggggtttcaagaggaggagggtgggatgggcaaggaatatacacaggtgaagccagagaagggttaggttgggggtgcggtgggaacttgctgttttgatctggtttcctggtgtgacactctgggttaaaggcttgaaggcccctgttaggagtctaggggtgagattctcttctctctgatcccagaggacgttaacttctactgcaggtgagaaacaaaataggaggatggtggggactgtcctgggaggagggggtggtccatggcttgtggtgtgggctggctataggggaggccactgctaggggactggcatccaggcccccttgaagcgtctcaataagtccgcgctctcctttttggtgtcttgcaggagaggcagcttccccccttgggtccaacaaacccgcgtgtgacgctggccccaccgtggaatggcctggcccccccagccccaccacccccaccccggctgcagattacggagaacggcgagttccgaaacaccgcagaccactagcccacccagcatcagagaccttctcttcctttcctgtgcaccccaccctgtaacagcaccaaccaccaggattggacatcaccgaggaacagcgggattgcctccccgaatgcctccctgggaggcacactgattgcccacccccaccactgcaccatttccaggagggagagtggggaccctcagccgcccccttttccttcccattggggtgctgccctctctttgacccccagggacccttgccccaggacaccgcctaccccgtacagaccccttcactccggggtgctatccccatcct

SEQ ID NO: 14308 - DNA, 4339 bp, Homo sapiens
gggggaagaggaaagcctgcctatgggcaatgacctttaacccatctttccccccagctagccccttctggggtgggtgggcaccagggacctagcctccctggatctttggtgtccttcattactggggttttactgaccctctcagccatgctcccctgctgactgccagccccagtcatgggcctaaggcctcccaccccatccccctcagggggctcctgctcaggttccttgccccctccttcccgctgccagcctctccgccgtcgctgctcttcctgctgctttccgggggaataccacttgggtcgctcgaggaggaagagtgtcccaggggggaagcagtacagcatggagggtgcccctgctgcgcccttccggccctcgcaaggcttcctgagccgacggctaaaaagctccatcaaacgaacgaagtcacaacccaaacttgaccggaccagcagctttcgccagatcctgcctcgcttccgaagtgctgaccatgaccgggcccggctgatgcaaagctttaaggagtcacactctcatgagtccttgctgagtcctagcagtgcagctgaggcattggagctcaacttggatgaagattccattatcaagccagtgcacagctccatcctgggccaggagttctgttttgaggtaacaacttcatcaggaacaaaatgctttgcctgtcggtctgcggccgaaagagacaaatggattgagaatctgcagcgggcagtaaagcccaacaaggacaacagccgccgggtagacaatgtgctaaagctgtggatcatagaggcccgggagctgccccccaagaagcggtactactgtgagctctgcctggatgacatgctgtatgcacgcaccacctccaagccccgctctgcctctggggacaccgtcttctggggcgagcacttcgagtttaacaacctgccggctgtccgtgccctgcggctgcatctgtaccgtgactcagacaaaaagcgcaagaaggacaaggcaggctatgtcggcctggtgactgtgccagtggccaccctggctgggcgccacttcacagagcagtggtaccctgtaaccctgccaacaggcagtgggggatctgggggcatgggttcgggagggggagggggctcggggggtggctcagggggcaagggcaaaggaggttgcccggctgtgcggctgaaagcacgttaccagacaatgagcatcttgcccatggagctatataaagagtttgcagagtatgtcaccaaccattatcggatgctgtgtgcagtcttggagcccgccctgaatgtcaaaggcaaggaggaggttgccagtgcactagttcacatcctgcagagtacaggcaaggccaaggacttcctttcagacatggccatgtctgaggtagaccggttcatggaacgggagcacctcatattccgcgagaacacgcttgccactaaagccatagaagagtatatgagactgattggtcagaaatacctcaaggatgccattggagaattcatccgtgctctgtatgaatctgaggaaaactgcgaggtagaccctatcaagtgcacagcatccagtttggcagagcaccaggccaacctgcgaatgtgctgtgagttggccctgtgcaaggtggtcaactcccactgcgtgttcccgagggagctgaaggaggtgtttgcttcgtggcggctgcgctgcgcagagcgaggccgggaggacatcgcagacaggcttatcagcgcctcactcttcctgcgcttcctctgcccagcgattatgtcgcccagtctctttgggcttatgcaggagtacccagatgagcagacctcacgaaccctcaccctcattgccaaggtcatccagaacctggccaacttttccaagtttacctcaaaggaggactttctgggcttcatgaatgagtttctggagctggaatggggttccatgcagcagtttttgtatgagatctccaatctggacacgctaaccaacagcagtagctttgagggttacatcgacttgggccgagagctctccacactgcatgccctactctgggaggtgctgccccagctcagcaaggaagccctcctgaagctgggtccactgccccggctcctcaacgacatcagcacagctctgaggaaccccaacatccaaaggcagccaagccgccagagtgagcggccccggcctcagcctgtggtactgcgggggccatcggctgagatgcagggctacatgatgcgggacctcaacagctccatcgaccttcagtccttcatggctcgaggcctcaacagctctatggacatggctcgcctcccctccccaaccaaggaaaagccacccccaccaccgcctggtggtggtaaagacctgttctatgtaagccgtccacccctggcccgttcctcaccagcatactgcacgagcagctcggacatcacagagccagagcagaagatgctgagtgtcaacaagagtgtgtccatgctggacttacagggtgatgggcctggtggccgcctcaacagcagcagtgtttcgaacctggcggccgtaggggacctgctgcactcaagccaggcctcgctgacagcagccttggggctacggcctgcgcctgccggacgcctctcccaggggagtggctcatccatcacggcggctggcatgcgcctcagccagatgggtgtcaccacagacggtgtccctgcccagcaactgcgaatccccctctccttccagaaccctctcttccacatggctgctgatgggccaggtcccccaggcggccatggagggggcggtggccatggcccaccttcctcccatcaccaccaccaccaccatcaccaccaccgaggtggagagccccctggggacacctttgccccattccatggctatagcaagagtgaggacctctcttccggggtccccaagccccctgctgcctccatccttcatagccacagctacagtgatgagtttggaccctctggcactgacttcacccgtcggcagctttcactccaggacaacctgcagcacatgctgtcccctccccagatcaccattggtccccagaggccagccccctcagggcctggaggtgggagcggtgggggcagcggtgggggtggcgggggccagccgcctccattgcagaggggcaagtctcagcagttgacagtcagcgcagcccagaaaccccggccatccagcgggaatctattgcagtccccagagccaagttatggccccgcccgtccacggcaacagagcctcagcaaggagggcagcattgggggcagcgggggcagcggtggcggagggggtggggggctgaagccctccatcaccaagcagcattctcagacaccatccacattgaaccccacaatgccagcctctgagcggacagtggcctgggtctccaacatgcctcacctgtcggctgacatcgagagtgcccacatcgagcgggaagagtacaagctcaaggagtactcaaaatcgatggatgagagccggctggatagggtgaaggagtacgaggaggagattcactcactgaaagagcggctgcacatgtccaaccggaagctggaagagtatgagcggaggctgctgtcccaggaagaacaaaccagcaaaatcctgatgcagtatcaggcccgactggagcagagtgagaagaggctaaggcagcagcaggcagagaaggattcccagatcaagagcatcattggcaggctgatgctggtggaggaggagctgcgccgggaccaccccgccatggctgagccgctgccagaacccaagaagaggctgctcgacgctcaggagaggcagcttccccccttgggtccaacaaacccgcgtgtgacgctggccccaccgtggaatggcctggcccccccagccccaccacccccaccccggctgcagattacggagaacggcgagttccgaaacaccgcagaccactagcccacccagcatcagagaccttctcttcctttcctgtgcaccccaccctgtaacagcaccaaccaccaggattggacatcaccgaggaacagcgggattgcctccccgaatgcctccctgggaggcacactgattgcccacccccaccactgcaccatttccaggagggagagtggggaccctcagccgcccccttttccttcccattggggtgctgccctctctttgacccccagggacccttgccccaggacaccgcctaccccgtacagaccccttcactccggggtgctatccccatcct

SEQ ID NO: 14309 - DNA, 3929 bp, Homo sapiens
cccaggcctgatgagcaggtctcgagcctccatccatcgggggagcatccccgcgatgtcctatgcccccttcagagatgtacggggaccctctatgcaccgaacccaatacgttcattccccgtatgatcgtcctggttggaaccctcggttctgcatcatctcggggaaccagctgctcatgctggatgaggatgagatacaccccctactgatccgggaccggaggagcgagtccagtcgcaacaaactgctgagacgcacagtctccgtgccggtggaggggcggccccacggcgagcatgaataccacttgggtcgctcgaggaggaagagtgtcccaggggggaagcagtacagcatggagggtgcccctgctgcgcccttccggccctcgcaaggcttcctgagccgacggctaaaaagctccatcaaacgaacgaagtcacaacccaaacttgaccggaccagcagctttcgccagatcctgcctcgcttccgaagtgctgaccatgaccgggcccggctgatgcaaagctttaaggagtcacactctcatgagtccttgctgagtcctagcagtgcagctgaggcattggagctcaacttggatgaagattccattatcaagccagtgcacagctccatcctgggccaggagttctgttttgaggtaacaacttcatcaggaacaaaatgctttgcctgtcggtctgcggccgaaagagacaaatggattgagaatctgcagcgggcagtaaagcccaacaaggacaacagccgccgggtagacaatgtgctaaagctgtggatcatagaggcccgggagctgccccccaagaagcggtactactgtgagctctgcctggatgacatgctgtatgcacgcaccacctccaagccccgctctgcctctggggacaccgtcttctggggcgagcacttcgagtttaacaacctgccggctgtccgtgccctgcggctgcatctgtaccgtgactcagacaaaaagcgcaagaaggacaaggcaggctatgtcggcctggtgactgtgccagtggccaccctggctgggcgccacttcacagagcagtggtaccctgtaaccctgccaacaggcagtgggggatctgggggcatgggttcgggagggggagggggctcggggggtggctcagggggcaagggcaaaggaggttgcccggctgtgcggctgaaagcacgttaccagacaatgagcatcttgcccatggagctatataaagagtttgcagagtatgtcaccaaccattatcggatgctgtgtgcagtcttggagcccgccctgaatgtcaaaggcaaggaggaggttgccagtgcactagttcacatcctgcagagtacaggcaaggccaaggacttcctttcagacatggccatgtctgaggtagaccggttcatggaacgggagcacctcatattccgcgagaacacgcttgccactaaagccatagaagagtatatgagactgattggtcagaaatacctcaaggatgccattggagaattcatccgtgctctgtatgaatctgaggaaaactgcgaggtagaccctatcaagtgcacagcatccagtttggcagagcaccaggccaacctgcgaatgtgctgtgagttggccctgtgcaaggtggtcaactcccactgcgtgttcccgagggagctgaaggaggtgtttgcttcgtggcggctgcgctgcgcagagcgaggccgggaggacatcgcagacaggcttatcagcgcctcactcttcctgcgcttcctctgcccagcgattatgtcgcccagtctctttgggcttatgcaggagtacccagatgagcagacctcacgaaccctcaccctcattgccaaggtcatccagaacctggccaacttttccaagtttacctcaaaggaggactttctgggcttcatgaatgagtttctggagctggaatggggttccatgcagcagtttttgtatgagatctccaatctggacacgctaaccaacagcagtagctttgagggttacatcgacttgggccgagagctctccacactgcatgccctactctgggaggtgctgccccagctcagcaaggaagccctcctgaagctgggtccactgccccggctcctcaacgacatcagcacagctctgaggaaccccaacatccaaaggcagccaagccgccagagtgagcggccccggcctcagcctgtggtactgcgggggccatcggctgagatgcagggctacatgatgcgggacctcaacagctctatggacatggctcgcctcccctccccaaccaaggaaaagccacccccaccaccgcctggtggtggtaaagacctgttctatgtaagccgtccacccctggcccgttcctcaccagcatactgcacgagcagctcggacatcacagagccagagcagaagatgctgagtgtcaacaagagtgtgtccatgctggacttacagggtgatgggcctggtggccgcctcaacagcagcagtgtttcgaacctggcggccgtaggggacctgctgcactcaagccaggcctcgctgacagcagccttggggctacggcctgcgcctgccggacgcctctcccaggggagtggctcatccatcacggcggctggcatgcgcctcagccagatgggtgtcaccacagacggtgtccctgcccagcaactgcgaatccccctctccttccagaaccctctcttccacatggctgctgatgggccaggtcccccaggcggccatggagggggcggtggccatggcccaccttcctcccatcaccaccaccaccaccatcaccaccaccgaggtggagagccccctggggacacctttgccccattccatggctatagcaagagtgaggacctctcttccggggtccccaagccccctgctgcctccatccttcatagccacagctacagtgatgagtttggaccctctggcactgacttcacccgtcggcagctttcactccaggacaacctgcagcacatgctgtcccctccccagatcaccattggtccccagaggccagccccctcagggcctggaggtgggagcggtgggggcagcggtgggggtggcgggggccagccgcctccattgcagaggggcaagtctcagcagttgacagtcagcgcagcccagaaaccccggccatccagcgggaatctattgcagtccccagagccaagttatggccccgcccgtccacggcaacagagcctcagcaaggagggcagcattgggggcagcgggggcagcggtggcggagggggtggggggctgaagccctccatcaccaagcagcattctcagacaccatccacattgaaccccacaatgccagcctctgagcggacagtggcctgggtctccaacatgcctcacctgtcggctgacatcgagagtgcccacatcgagcgggaagagtacaagctcaaggagtactcaaaatcgatggatgagagccggctggatagggagtacgaggaggagattcactcactgaaagagcggctgcacatgtccaaccggaagctggaagagtatgagcggaggctgctgtcccaggaagaacaaaccagcaaaatcctgatgcagtatcaggcccgactggagcagagtgagaagaggctaaggcagcagcaggcagagaaggattcccagatcaagagcatcattggcaggctgatgctggtggaggaggagctgcgccgggaccaccccgccatggctgagccgctgccagaacccaagaagaggctgctcgacgctcagagaggcagcttccccccttgggtccaacaaacccgcgtgtgacgctggccccaccgtggaatggcctggcccccccagcccc

SEQ ID NO: 14310 - DNA, 1450 bp, Homo sapiens
gactggagcagagtgagaagaggctaaggcagcagcaggcagagaaggattcccagatcaagagcatcattggcaggtgaggggcggcctggggagggggttgtgagggagagcctgaggctggagagagcaagtgggtgagctactccgctgactcccatccccaaactcaggagcccaccaggagagcccaccactctcctccccaggaagccacccactcactcatcaccagatggagagaaaccccaacctgcttagtgcattaaatatctctttaccaaaccctgacctctcttctgatagagtagcttcggaagcccttggaaaatgtacctgttcctgtccaaccatcactgcatttgcatttaccctaggccagagctccccactagttattctcaacttaacctgtgatgttcactccaaacctaagcagggctccctagccagagtaggccctgcccttcctgggtggaccctccctctctagccttggaaaggtgttctgttagaaagggtcttttagcctgtgtatgttttcagctgctccagcaagtcctgggctccaaagagggtatcctcagcaaagaggtcaattatcttcagagtggtggggtcggggtgggggggaccctgggcgcactccaaccagagccacctccattttgatccattctaaatgtattttatgtaagatttaattagaagaaaagggcttcttgaaatattttttgaaaaccactgctctaattgatatcctttatgataaatcacctcgaggatcttcacagtgaggtgacatgggggatgcagaagccaggtcctcagccatggaaggtctggggaaggggcactgctgtcctgattgggacgatggaggcctggaggtgtctggatggtagaagtctttgaggcacagaaagctgccttagcagggaggtgtaagggttcctgggaggaaggtggagagcatgatcctgaggaacagggagtcttgcatcacggcaatggagggactctgattctaagggataaggatgcctgaggtttttccagagagctatggggttccatgggcaggctctgagcctgtgcccgccactaaccccactgaagcccgtcccttcaggctgatgctggtggaggaggagctgcgccgggaccaccccgccatggctgagccgctgccagaacccaagaagaggctgctcgacgctcaggtggaaattacaatgtcatttatcttctccgtgtcccatccccatccatcccactgtctttcgtgcactcactacaccagccacctagccccatcaccatctgtctctcatagtctgctgtttgtccactggctgctcctggcagccccctagtgaccccatcttcatcccatcgtctgtgcctttgtcactcctggcagcgtcagcccaactcctgtgccttccca

SEQ ID NO: 14311 - DNA, 394 bp, Homo sapiens
gactggagcagagtgagaagaggctaaggcagcagcaggcagagaaggattcccagatcaagagcatcattggcaggctgatgctggtggaggaggagctgcgccgggaccaccccgccatggctgagccgctgccagaacccaagaagaggctgctcgacgctcaggtggaaattacaatgtcatttatcttctccgtgtcccatccccatccatcccactgtctttcgtgcactcactacaccagccacctagccccatcaccatctgtctctcatagtctgctgtttgtccactggctgctcctggcagccccctagtgaccccatcttcatcccatcgtctgtgcctttgtcactcctggcagcgtcagcccaactcctgtgccttccca

SEQ ID NO: 14312 - DNA, 19052 bp, Homo sapiens
tctcggctgccgctgctgccgttggctcttattctcctcctcctcctcctctctcctcctctctgcttctctctgctcctctctcctcctctctcctcctcctcctcctccacctcctcctccttctccccctctttctccccctctttctctcttctttctcccccgtccccccgccccctccccccaggcctgatgagcaggtctcgagcctccatccatcgggggagcatccccgcgatgtcctatgcccccttcagaggtacgtggtggggggagggggagggccatatggggggcaacagggggaggggcagggggcgggggagagtcggggccgagggaagggagcggctgaaatggagggagaggggaggaccgggaaggcaggggtgggagcaaccgggaaggagggattggaggccagagggataggggtagataagggatggaggggccaggaaatgggccttgaaagggggctgaagggaaaatgatgaaggggaaagaaagcgccagaaaggggtgggaaggtagaaggattgggttggggaaaaagctgcagaaataatttgggggtgggagctgagtgatgaggaaaacatcaaggaaatagagggacagagtcttgggagaggggctaggaaggagaaatgaaaacataggggtgaaaagagaagccaagaagatgtggggggataatttggtgggggactcagagtatggtaaggggcggaaaaagagaggaggatggagggagagaaggggccagatggagagagagggaggcagtggggggtggggggatggagggtccagatggagggaagagagaagagagagggaacggtgggggaggggagaccagggcagggggagggccaaattatgtgtgcttgggggggtggcagtacaagtaagatgaaatgatgggagtaggggacaggttaggatcctgccccagactctgaccctcttaaaggctcttgaccagtaaaatgtaacctctggggtcttaatgctgtcttcacttcatcacttttacccccttcccccacccctccaatccttatttccattccccctccctcctctgctgtccatcacctatatctttccccccatatggtgtccgttccttatatgagtcccccttctgtccttcccctatatcagtcccctctctggtgttcattgcctctctcttatctcttttctatgtggtcgctcccttatatctctatcacttctttactagtccgtcttgaccccttctcatagcctccgcattaggtctgcctcctttgctctgacacatgtccagtcgagcccttcaggtgtattcccttgcccctgggcatttaccatcatttctgcctccttttctatctactcctattatttgtctcccagaccattccttgtcaccacaagtctgtgcctacccactttcccttaatacctcaactcttattatcatttctcttttcttgtctcctctacttattggggtgttggagatttggggtacaaagacacaggttttgatgattagaacaagggatccccatctcagcccttgagggatttctcatcctagtaaaaatttcccgtttctcagccatgttgctctgcctcttgcatctgcctcccagaatcattcttcaccaagtccagacagtatgtgtgtgtgtgtttctagagttgttcctaagttccctgctgccaggagaaagatgccctctgaagtctaacccgcctcccttggctgcagcctgaaccagccctttccccaaatgcttatgtgtatcaacagatttctcctctgggtataccaagtgtctaagtgcggtgggcatgttgcctgcaatgtctgtagtttcagaggctaggtattggtgatctctgtatctagagaacattagttagtctctgagatgggttgagatagagtttcaaagtatgtggtttctaaatggtggacattctgagggttcatcgctcactgtgatctggaggttgggtaaatttgagagacatatttatagacagaaaagggctgaatttgcaaaactctgctactcagtgcattctgttggaatgaagctcaaagaccagttctcctgcagtatactcatggttatcccataaaggtgacagagtttgatcttttttccatctaaaatctgataccttaagcctaatttctagctctttgctgtcgccaatgtgacatctctcttacttcaatagggcctgtgtggcattggggtttaaaggagaggcagtttgcagggagagcggcatggcaagaacaacagagctggggaaggaggaccctggtctcatctcagccataggcgacacttggtctactgttctctcttctcaaagttttgttcccatctccagctcttgtctttggaggcccctctgtgtcaccaggcctggatattccattctttccccctgacatctttcttcctcaagctcctcactgtgccttgagaaggctcctgacctatggagtggcttccatcctgtccactgagactaggtggggtgaggtggtgggggcagtgttgaatctctgggcactgaatgggagaagagataaatttggtctctacttgtccaaacaagggcatatttcccaccttctgccctggggcctccacagccagatgccgacaaaagccatcttctccttaccaccagaagaaccagaactttccctaaaggatgagcagggttgaactaggggaggagggcacagaggagggaagagttgggaggggaggccctctcatgtctctgactgtgaacaggtaagctccccgacttcttcttttctagatatttagccctcagaatctcatgatcccaatgttcctacacacacaccccatccttctttcccacagccatgtagctttcctcatactcttttatagaggggtggtgccaccttccaagtccttgtcttctgcagctatttggatgccttcctctacccagatatctgacaccaacttctctgtttttctcctgccaattttgcggcacctctaccttattttcctgaagtagatggagagctccttcatctttctctgcccccaaacgtgtaccttctctgtcatataattcccatccctgaacctctgcatttcttcccccaagtctccagagccttctgtgatgtgatcctctcctcttttcccctttgtataaatgcttgtcttgtgttcctttagagttgccaggtgtctcactttcaactgtgatctcctgaaggccggtagggtccccttctcactttgtggactctcttcttgccattttaggcctctgcttccaaatgcatagagcctcccttactgtttctgtgtgtctctgtcctccagatgtacggggaccctctatgcaccgaacccaatacgttcattccccgtatgatcgtcctggttggaaccctcggttctgcatcatctcggggaaccagctgctcatgctggatgaggatgaggtgagtgtggtgagaaggctgggaaaacgcatgtgggagaatggggagagtcctcattagtgaaggggagagagacacaaagaaggcagacaaagaagaaacatttgcaaatggcaggagggtggccattgagacttgggttggagtgtgacaagaggggtagtcattctctcatcttgggcagggagtctttgagggttatgagctgtgttggggaggagatgtggttctgaagatttcgggggtggggaggctcctgttttcacactgtccatattgtaggataggttagaatggggaaggggaactgaagggtttggagaaggggtgaagacatggaaggccctcccaaccaaagcaatcctcaggacccctctctgctttgcccactgagcaagactcccagtcctttctccatcagggggcagagtgcaagaagagaaattgcaggacgcagagaaaaggcaggggatagaggaggttttaggtagctggaggatactgggaaagaagactgaggtcagtggatcttggcatgatggggtgaagactgggagagtgattgagatcaaggtttagagagacactgagagggcttctgcaagggagtggttggacatcaggaaggaatataagggaggggaactgggagtatgtggagttatctaaaggagtacaagtggagtaggggcagggactagccagagtaaaggagatgaaacggacagaggcctcttatgggaggtggtggccaggtatggagatctgagagccagggaagtgtgggttctgatttgggagctgggtcagcaggagtgtccattggaggaaatagaggataaaaactggaatggtgccccacaagtgtgagtcagggaatgggggtgatttgggggacaagctttaaaaaatggtagggtagcctggaaaaccaaacgtggtgagagatggaccctgaaagttattgggaatggtgtgatgaggaagggttagaatttgagtcagggctaactagagtgtcaagggacctatgggggcaggtgagagtgtggagagatggctgggtagacagcttccaggccacagagtaaagtagaggtgttaaggagaggatatggtgactttgaaaggagaggtggcttggggagtctaagttttggacaccattgggagacatttgagtgactgtggtcaaacccctagatcaaggtttggagtctgtaggagaaatgggggaaactggaacccagagtggggactgttatagggatgaagagggaagacaatggattggggtaatgaaggaatgacagagatagggacagactgaagggaccagtggccagcaagttgaggggcaataggaatggccggtctggagcaggaagggcgtgtgtgtgggaggaggagtagatagaattgggaaaatgagcagcctgaacagacgcagggagttggaattggatgggtggtggaactggggctgggggatagtgaggggtctgttcctgtggctctttgtagaggtggaggagactgcaggggtggaggtgtatggaggtagggatggaggtggacagggggagctgggtgtgaagcttagggaaaggtgatggctgaggggaagaagggaactgagagatgctgggtcgggtgatggaaggagatgaaaggtgggggaaggtgaccaggccctctggcgggaggggaggttgggtcccagtctggccgcaagccgggccgtgggagggagacaagctgtggatcctgattataaatgcagcttctgctacccccgtgacaggctcggagggagagaagggggtaagggaggtgggaggttgggaggaaagcagggagaatggaggaactgaaggtcaagggaaaactggattcaggaagtagctaacttctgaggagttgcagaagagctgagtagggtttgggagaattctccggaaggtgtttcaagacaaatggagggagaaaagagggtgggacggcaaagaatgagagagagagactgggggagagaagggagagatccagtcaccaagtgtggaggggccggggcagaaaaagtgggcaggcttagggggaaaaggaggcccgcccttcctgggaggaggcggaggggggaagagggaggggaggggcggcgtgggccagggaggtctgacacacccccacctcccctagatacaccccctactgatccgggaccggaggagcgagtccagtcgcaacaaactgctgagacgcacagtctccgtgccggtggaggggcggccccacggcgagcatggtacggcggccgagcaggctctcatgacccggacaggcgcggggagagggctgaagatggaccgggctggcggggcgggggcgtcggggagcggcgggagctggccgggggcgggagaaggcggagacaaagtcttgcttcccgaggggagatggcgccctcctctggaaggtggagcgggacaggggctgtgggtgagaggcccctgtgggtcctcgctcggcttcgctccctttctcctctccagcagtgaagtttgactattttcctggtgcttgtaaaaatagtctccttagatctttagcttccagtccgtgtgttcctgcccctgcccctcccagcccctggtctgggatcttggaaagaatgacctagttcctgccctccccccagacctcttccccacccctatgctcctgattcttcttccggaccttcagtccttgaggtctccttttattaccccctgttttctcctctcatcagctgcttctattttctgcaattgtatcaccctttctctttcctccctgatttctcttattttctgtacccctcttgattaccccgtccctcccctctgctcccggcgaaagtccatcagactcccatctcatctcctttctgtctgtagagctatctgcgcggtctgtctctccaactctctccctctctccatctgtctcttcccctccctccccctttctgcccccccaaccccctctttagtcatttaaaaaaagatttttgtcttcctgagaagttcgcttaaaaggtttccatgggaacagtgaggggagatgaaggcagagaacagagatctgcagccaaggtgcagagagacgccctcagcccccggaaaccccctcgtcactgcccccttccacttcatttcccttcccggacctagcgatccaggttccccattcctccaacccccaggtgacccctttttcccaccagctccccctcccttcaggaattcaagctaccagtttctctcccttagagagccagtgacctgtccccatcctttggctccttccagccttctgataggtccaggccctactagccttgtgggccggtttggggaccttgggtgggtgggtgggtggtcagggatgtgtgtcattgtcatggaaaccccataccatcggggtgtgtgggtagcacatctctgtgaggcaaagtcaggtggtggtggagtgtatacagagaatgtgtgtgatgtctgtcacatctgtgtgtatatgtatatgtgtgtatgtcatgttcatgtctggggaagatgtgtgtgtttgtgtgcatgtgtgtacacctgcgtttccaggccagaatggtcacatgctcacagagcatgtttatcatgtgtcctgtggttggcagatctgcccacttattccccatctttctccttatcctgagtcctcagggtctaggggtctctggcgggggtctcccgtgtgttttgggtggggacaccgtgtgtgtttggagttgaggtggcatgtggaggttgctgtattggggttcagtaggggctgggaggggttccaggggcatatgtatttggggggagggcttagtgaaagttgatgggggtgaacgtttagggtcttcaggcagacatggaatgtgtaaagggcatggaggatgtgcagtggacataggggtcgttgggaccttggggacttggcaatgccaaggtgtttgctgaggctgtggactctccagcccgggagaggtcgccggacctttgaggggcattggaatcctgggctcctcctctgctgggtggagccgcgaaccctcgttctctccgcggttttgtgtgtgtgggggggtcctgctcaggaggggatggtgggtggcctggtttgttttgggggtccccttgcccccctcccccgtctctctcgcgctgtctccgggcgacagggctcgtgacagaggcggccacggcagcagcggtcgcctagcaacggcggcggggcccgggcaacggcggcagcggcgggagcggcggcggagggagccgttcccgcggccgtcaccgcgcggccgtcccggccgtcccgggccccgccgccgcccccaccgcgccgggcggcgcgagccgggccgtaccgccccctctccctccgcaccccgcccttcccccgcgcaggggcggggcccctcccccaccggggacacccctggcccccccggggggcggtgcgaggtaagggcggggccgggcggactaggagcgcgcgtagaggggggggcgccgcgcgcgtggggcgggggcgcgcgtgtgcgtgggcgcggggaggggggtggggaagccgcggtggcggcggcggcggcggcagctgctccctccgcatgttctcgctgcatcttccgagtggggggagttatggtaaccggagggggacagcggaggacgggagggtcggggaccggcctcgtgcggacagggtcttgagcacgcgggggcggccggtgtgtgtgggatcttggagcccctggtggaaggggcagcccgtgtgtccgcgtgtgtgttcgtgcccatgctcgtgtctcctgtgtgtcggtgccatgtgcacacgggggcccagttcctcgtgcacacatgtgcagccatccttgtgcaagtgtgtcctgtcttatcttgcctctgcctgtttcctgcctagggggctgttgggccagccacgggcttgtggggcagtccgcggccttgctggtccatgtcacctctgaccctgagcatgcatatccctggctggggctcacctcctgtcaggcttctgtgtgtgggaatgtgtggccctatgagcaggattttctgtgtccctggtggcaggtgtgtgtctttgcatgtgtgttccagcactggcctgagtatctgtgtcaatcccagcatgggtgtccagggcgtgtctggatgtgggtggtgtggctggggggagtaagtgtgtgaatgtgttccttggaattctactgtgtatgaaacacctttgggctgggcaggtgtaagccctgcttggtcagtaagtggggacagaaaagcttaaaaagggaagaaatggggtaaagaggaaaagtggggaggggataggagagaaggaatgagagaggcttgaagaagagagcagagagcagcaggccagggagaaagaatagctggagaatgggaatgtgggagaaagccaagccagacttagaagagagaacaggggataagagcttaagatggggaactggatagagatggtgggagaagaaggggtctgggagctggggaggcagtggggaggagagagtcaggccttctggtaaagtgatctctgaaagaagaaagggaagaagatgggagaaggcactggattcttgtaggccttgcaggatcaggcttggttttggatcagggaaggccactcaggcatacgggctggctcacagtgaggcctgtcatagcagggactgtcattagaggttcatatccccagcacagagctctgtctcccatttctctgctctgtgtccaaccctgttcttcgcccttctctggcaacctccctcctctggctccccttgagagctgccagctgggtgtggagaggaagaaaggccaaagggaaggttagggatttggagggcagggggagattctgtgggtgatggcaagattagagatgttggaggggcaggagtccaagcccttgctgtgtgtgtgtgagtgccattgtgtgtgtacacagggtgtgtacatgtgtgggtgtgtgcacaatgcctgtgttacgggtttgtgtaggtggctgttatgtgtgtgcatgcgtgtatacatcgtgcaggcatgggacatggagacccaggatcacagtttgtgcttttcaggtttgctgtgtgtgtgtgtacacgggtgtgtgttgttttctctgtacatgtcactgcatgcagcattaataacaggatgttctgtgtttctgtcactctgccccccctttcctctgtgtttctgctattcttttcctgcggcaacaaaagtgtttaataagcatatgtgtatgtggcctctgtgtacctgtgacttatgagtgagttcatggatcttagttcttggtaatatgtgtaaggttatattacttccaagaaccaagcaagccaattagcaaatttgttcttctgttaatgctttagttccaaagcggaattttaatgcatttaaagttagactttatgcctttattagatgagcttgcacatgaaaataatggctgagctcggttccctgaaatgagagtgaggcagccatacctgagaaatgcagaaaaaatgttactagggaagagatatcctgaaccattggatgcattgcttagtgtgtaccagaaggataattaacacatttgctcctggtttttctttactctggtggcaatctcggatgcctgtgttagagtgagagaagggctgggggaggaaagggggttgtcctgagacagagtggatgtggttgtacttttcacgtgaatgaaaggatgtttgtgcttctgagatatggggatacctttctgtggtcaggatcatggtgtactcaagcatgtatttcaggggttaaactggaattcccctgcatggggatatgtgtgtcttagggttataggtccatttctgtagtgtgctgtccacatgattgcccaagagacttgggccacaaagtccacaccagcagctctcatgtgggtcactgggttcaagtatgtactcccttgttgcagagctcacatatgtcaaagcatgtatcctgtggggtgtgtgggcctcagggtctcagaatgtggatccgtgctatgcccgtgctcacagttgtctgtatgtctcaaaagcacatagatccccagttatttttctgtattgtggttctcatatacacgtacctccatagctcagtatatgtttctgtactatacacctgttcctgagggagtgatagggttctcgtgtcatggggtccacatttttgtatgcaaacctcctaacacctgggttttacaggtaaagggaagctgaggactgattctagggcagtttgcaggcaatttgcaattctggaagcagacagtgaaaatataattgtggtcctcccttgttctgttctggaacctagagggttaacaggcagctcttccggtccacccccctccttccagcctgtagcttcttgttgccgtggagatggtggccccgccccgatgcagcacctgcccccccattggctgcagtggtgactgtggggctgaggggggagcccaggcctgggcagccattctggagctggagccggagcttggcatccccccacttacattctcttccagcccctcggcccctctaaattcccttgcagccgagcctcagcttcctttttcagcgcttgccatccctctaggctcttggcagactgagctgcatccgcattcacctcccctcctcctcctttccctatccttacttgggagtcccgagaacccccactgtccatccttcctgctccctgcccattcccctgcattctttgcttttcccctccccccaccaaccttctgagcccctgccactgcagtgcacgtggaaccggctccttctcccttccccccacctgccccttccttggattttctgtccccagcttctccccctgctactcttcacaggtctcttccaagacctccccctccagtccagggagggggtcatgggaggcagccctggccctccagacagacaggggttccaggaggtggggggcaggtggaagatgtgcccaccagggggaagaggaaagcctgcctatgggcaatgacctttaacccatctttccccccagctagccccttctggggtgggtgggcaccagggacctagcctccctggatctttggtgtccttcattactggggttttactgaccctctcagccatgctcccctgctgactgccagccccagtcatgggcctaaggcctcccaccccatccccctcagggggctcctgctcaggttccttgccccctccttcccgctgccagcctctccgccgtcgctgctcttcctgctgctttccggggggtaggtgaggccggagctgaggggcagagggaggtgggggcatgcactggggtcaggggtgggaacctgggttaacagcttcccttctggccccctccccaacttcccttctggccatttcctcccctccagaataccacttgggtcgctcgaggaggaagagtgtcccaggggggaagcagtacagcatggagggtgcccctgctgcgcccttccggccctcggtgagtggtgcctaccagatgtggctcagttgggccccctcccctccagccccaactggggccctaggagtctgagaaagagggcaggagggggagagagggagtgagagtgagaaaaagagtgtgtgtctgtgtgtgtctccccacctctttggtttcccccttcttggctctgcccccctgcttctgagaccagccctcccaccttctccaagctgtgtgtgtgtgtatatgtgtgtgtgtgtgtgcttgcactgtacccgtgggagcaaggaagacaaactggtattagggttcctatccccctttcctcgcctctggagacttcccttttccccatcccactttcatccaggggctctctaccagctgagggatgagtaggtagaactgaccctgccccaacccaccccatccccatttcccccccagcaaggcttcctgagccgacggctaaaaagctccatcaaacgaacgaagtcacaacccaaacttgaccggaccagcagctttcgccagatcctgcctcgcttccgaagtgctgaccatgaccggtacaggggctggagcatgtgggatgagattgatgtaatgtagggtctcctgtgtgagatgcagagggagggggttatctgtgtgcaaaggttgaaggattcaactcaagttggttgggggatgtcatggcacaggggacagaacagaaaagaactagaatagggatctgtgagcagcaggagaggggtagggtggcagagagaagacagacagacaggctggaaagggaatgaaggtgaagccaaggagggactcctcagggactcctcaggccaagaaggatgggctctagcccaggatcaaaggagctgtacaggaggagagtgaccctggaggaatgtttaaggaatgcagggaaggggttggtaggtgagtgagcaataggctgtaggtggaagggtgtcagggaaggtcaggaaatacaggggcagcaggttggagtggggctgggggtggctgaatgaatggatgatggctagggctcaaggacctcatcagtgagggaagagacagtatagagcatggcagagaaggggaggctgggacaggtgtgcagggtgacagaatgggaagcaacccatggactgaggcatgaagaagcagccagcggagaagtccagaaggcactgtccctgagaccaggctgaaggagacctccactgtttgcctttgttgcctgccatttggggttcctctctgggtttccccctcacccagtcactccccagggagaaccatgccctccctttcccccatgtctggccacccccaggattgggcaggtagggaggttgggataaagtgagtcacacctttccctgcccccctcccatgttgccagagctggatttggggccggcagggggtgagggcatggtattcctggccgcgggggcgggggggggggtccgggggccgggggagcgtcgcgctgacggcagccagagcctgcgatgacggggctgctataaataacttcttggaggctcccacacccaagctcccctcccgctttcccactgctctctactcttcatcccctgcccatctccataccgcttttgtattgctatcctacccctcattattccatgcccctagccccctttatcttctgccctcctgcagtgatttttttgcattccatcccctcttagccctcacctcggttctcccggccatctctccagttggccttcctcctcttctcctgtcctctgtcttgctgcacatacctttgtctccccctttcttcttcttgccctacctcctcttcttccctagtccgtgtattctgtcttttatcctctttgagctcttttctgcccacagctttctcctatttcttatgcttttccctcactctttcccctgcttctgctaaaacttgtcctcttatgctgtgttcattcattctttgaatcattaaatgtttatcaggcactagccgtgtgccaggcccaggctagacatatctcttctctgtgccttcacttctttacttccactttttcctttatactgaggctctggtttctggggttacctggaggtactacctagaagtgccccaggcccactttgttctctccttttttttttttcttttctgccatggtccatttctgggttgagatatttctagatgtccccagtcctcgcaatcccttaggtgtgagatggtgggagtttcttttttttcctttttttttttttaaatagaaatagggtctcactgtgttgcccagactggtcttgaactcctgggctcaagtgaccctcccacctcggcctttgaaatgttgggattacaggtgtgagccaccaggcccaggtggagcaggggagttccttaaaggattctgatttttctcacatccctcacgtccttcctgataggcagggtttctttctgtgtctgtttgggaagggtgttcagggggccttctctccaagtctccatcctggaacagactgatgatgcagggtacctatgtgtctaagaagagtaggggggccgggcgcggtggctcatgcctgtaatcccagcactttgggaggctgaatcacttgaggtcaggagtttgagaccagcctgaccaacagggtgaaaccccgtctcagctaaaaatacaaaaaaaaaaaagaaaaaaaaattagctgggtgtgctgaggcaggagagacgcttgagcccaggaggcagaagttgcagcaagccgagatcacaccactgtactccagcctgggcgacagagcaagactgtctcaaaaaaaaaaaaaaaaaaaaaaaaggaagagtgggaagccctgatcccttcctctcctgaacctcctgcctgccagggcccggctgatgcaaagctttaaggagtcacactctcatgagtccttgctgagtcctagcagtgcagctgaggcattggagctcaacttggatgaagattccattatcaagccagtgcacagctccatcctgggccaggagttctgttttgaggtactgggtctggtgggctggggagggccaaaggacaggggtgatggaaggtggggggcagagaggtctagagaaagtggcacaggtggggacatcaaggaaacagaaacttctgggactggaggaaagggtaggccagggaggaagagaaggtagcagagtctcctcccctctgtagccctttccctcaactccacactcctttctaggtaacaacttcatcaggaacaaaatgctttgcctgtcggtctgcggccgaaagagacaaatggattgagaatctgcagcgggcagtaaagcccaacaaggtattggggaataaaggggacacaacctgtgcagggcaaaggttgcaccaacacgggaagctgggggcctagggaggaaagtgagttaaaggaggagaggcttggggaaggagaggattgaggtacagtgtatctggacaagcagggggagacccccattattctgagtcccccatttcttttcgctttctgtactgctaccctgccttacgatctctttccctgccatagaagtcatagacttacagagttgatggggctctggaaattctttagtctagcttccctgcaggcaggaatgcttcactaataccccgcaggacacatcaaatacacttagccaagtttctgtaccttggtttcctctctaagacagagggaactggtggcaatgggttggattaaatgatctctaaggtccctttggcacataaattctatgagtctgttcttcccaaaacttcatgcttccagttctgtcagctattctctgtatcccagtttctagcaagcttacagtcctagtcacactcctctggggggaactcttgtgtcttgatgtccttaaagaactcaacccaagatgctgacatgatctgacctatgcagagtacaaacaccatgttccctttcaacacactgcaatatcacctgagccttaccattagcttgtgctcaattgtatccccccaggcccttactgattcttttttttttttttttgagacagagtctcactctgtcacccaggctggagtgcagtggcgtgatcttggctcactgcaacctccgcctcctgggtttaagcaattcctgtgcctcagcctccccagtagctgggattacaggcatgcaccaccacacccgactaatttttgtatttttagtagagacgaggtttcaccatgttggccaggctagtctcaaactcctgacctcaggttgtctgcctgcctcagcctcccaaagtgctaggattacaggcatgagccaccacatctggccaagctttacccattctatatgcaattcttttttcacaatttctgatagtctctgcaggactttccagttcccttcaaattctacattaatatttttggcttgttattccagcttttgaaatctttccaatactgtttgtgttgtctagtgtatgtctacgcttctacagtagcttcctggggctgctataacaaactgctacaaactgggtcacgtaaaacaacagaaatttattctctcacagttcaggaggctggaagtccaaaagcaaggtatcagcagggccacgctctctttgatgctgtagcagggaatccttccttgcctcttcctagcttccggaggttgccagcagtccttggcattcctgggcttataactgcatccgtctaatttctgcctccatcttcatgtagctggcttccttctgtgtgtctctgtatcctgtatctctgtgtctccaaatctccctctccatataaagacaccagtttttataaggtgggttaagggtccactctaattcagtatggcctcttttttttgagatggaatatcgctcttgtttcccaggcttggagtgcaatggcatgagctcagctcactgcaacctccgccttccaggttcaagtgattctcctgcctcagcctcctgagtagctgggattacaggcacgtgccactatgcccagctaatttgtttttgtatttttattagagacggggtttcactatgttggccaggctggctcgaactcctgacctcaggcaatccacccacctcggcctcccaaagtgctgggattacaggaatgagataccatggctggcctcttcttagtttgattacatttgcagggatcctgtttccaaataagatcacattcacaggttcagggtagacatgagttttggtgggatactattcaacccagtacaccgtctcaccttatgattgctgtctgtatcccactttcttactgtctctcctcttttggtgtctctctgtcccttccccctttaacatcatgcccaccccaccatgccaggacaacagccgccgggtagacaatgtgctaaagctgtggatcatagaggcccgggagctgccccccaagaagcggtactactgtgagctctgcctggatgacatgctgtatgcacgcaccacctccaagccccgctctgcctctggggacaccgtcttctggggcgagcacttcgagtttaacaacctgccggctgtccgtgccctgcggctgcatctgtaccgtgactcagacaaaaagcgcaagaaggacaaggcaggctatgtcggcctggtgactgtgccagtggccaccctggctgggcgccacttcacagagcagtggtaccctgtaaccctgccaacaggcagtgggggatctgggggcatgggttcgggagggggagggggctcggggggtggctcagggggcaagggcaaaggaggttgcccggctgtgcggctgaaagcacgttaccagacaatgagcatcttgcccatggagctatataaagagtttgcagagtatgtcaccaaccattatcggatgctgtgtgcagtcttggagcccgccctgaatgtcaaaggcaaggaggaggttgccagtgcactagttcacatcctgcagagtacaggcaaggccaaggtgagtgttgtgccctcagggaaaggtgacttgggaatgggcacttgcttgggggttagtgaggacagggcaaattcacgagattgggttgtgcagaggctgacacttggattttcctgggcctcaggacttcctttcagacatggccatgtctgaggtagaccggttcatggaacgggagcacctcatattccgcgagaacacgcttgccactaaagccatagaagagtatatgagactgattggtcagaaatacctcaaggatgccattggtatggcccacactcaggccctcttcttcccaaacctgccagatgtccaccccagaccccaagtccacccttccacagcttgatacttcctaacccagagtcctaggactccagcctccaacacctgattctgaaatttccccaaccctggccacccccttccctgcccttggaaagtgtgaccacaccctcttgtgcccccaccccccaggagaattcatccgtgctctgtatgaatctgaggaaaactgcgaggtagaccctatcaagtgcacagcatccagtttggcagagcaccaggccaacctgcgaatgtgctgtgagttggccctgtgcaaggtggtcaactcccactggtgagactgggaacgctgggctggggggccagggtcgggggaattatgtgttcatctgttcatctatctgtccatcctcaaagaggactgagcaccatttatgggcaaagcattgttctaggcgctatagagcaaacaggtgaaagaggcctggtccctgccctcagagggcctccaccagaatggggacaaattagaagaa

SEQ ID NO: 14313 - DNA, 2073 bp, Homo sapiens
tctcggctgccgctgctgccgttggctcttattctcctcctcctcctcctctctcctcctctctgcttctctctgctcctctctcctcctctctcctcctcctcctcctccacctcctcctccttctccccctctttctccccctctttctctcttctttctcccccgtccccccgccccctccccccaggcctgatgagcaggtctcgagcctccatccatcgggggagcatccccgcgatgtcctatgcccccttcagagatgtacggggaccctctatgcaccgaacccaatacgttcattccccgtatgatcgtcctggttggaaccctcggttctgcatcatctcggggaaccagctgctcatgctggatgaggatgagatacaccccctactgatccgggaccggaggagcgagtccagtcgcaacaaactgctgagacgcacagtctccgtgccggtggaggggcggccccacggcgagcatgaataccacttgggtcgctcgaggaggaagagtgtcccaggggggaagcagtacagcatggagggtgcccctgctgcgcccttccggccctcgcaaggcttcctgagccgacggctaaaaagctccatcaaacgaacgaagtcacaacccaaacttgaccggaccagcagctttcgccagatcctgcctcgcttccgaagtgctgaccatgaccgggcccggctgatgcaaagctttaaggagtcacactctcatgagtccttgctgagtcctagcagtgcagctgaggcattggagctcaacttggatgaagattccattatcaagccagtgcacagctccatcctgggccaggagttctgttttgaggtaacaacttcatcaggaacaaaatgctttgcctgtcggtctgcggccgaaagagacaaatggattgagaatctgcagcgggcagtaaagcccaacaaggacaacagccgccgggtagacaatgtgctaaagctgtggatcatagaggcccgggagctgccccccaagaagcggtactactgtgagctctgcctggatgacatgctgtatgcacgcaccacctccaagccccgctctgcctctggggacaccgtcttctggggcgagcacttcgagtttaacaacctgccggctgtccgtgccctgcggctgcatctgtaccgtgactcagacaaaaagcgcaagaaggacaaggcaggctatgtcggcctggtgactgtgccagtggccaccctggctgggcgccacttcacagagcagtggtaccctgtaaccctgccaacaggcagtgggggatctgggggcatgggttcgggagggggagggggctcggggggtggctcagggggcaagggcaaaggaggttgcccggctgtgcggctgaaagcacgttaccagacaatgagcatcttgcccatggagctatataaagagtttgcagagtatgtcaccaaccattatcggatgctgtgtgcagtcttggagcccgccctgaatgtcaaaggcaaggaggaggttgccagtgcactagttcacatcctgcagagtacaggcaaggccaaggacttcctttcagacatggccatgtctgaggtagaccggttcatggaacgggagcacctcatattccgcgagaacacgcttgccactaaagccatagaagagtatatgagactgattggtcagaaatacctcaaggatgccattggagaattcatccgtgctctgtatgaatctgaggaaaactgcgaggtagaccctatcaagtgcacagcatccagtttggcagagcaccaggccaacctgcgaatgtgctgtgagttggccctgtgcaaggtggtcaactcccactggtgagactgggaacgctgggctggggggccagggtcgggggaattatgtgttcatctgttcatctatctgtccatcctcaaagaggactgagcaccatttatgggcaaagcattgttctaggcgctatagagcaaacaggtgaaagaggcctggtccctgccctcagagggcctccaccagaatggggacaaattagaagaa

SEQ ID NO: 14314 - DNA, 28903 bp, Homo sapiens
atgagcaggtctcgagcctccatccatcgggggagcatccccgcgatgtcctatgcccccttcagaggtacgtggtggggggagggggagggccatatggggggcaacagggggaggggcagggggcgggggagagtcggggccgagggaagggagcggctgaaatggagggagaggggaggaccgggaaggcaggggtgggagcaaccgggaaggagggattggaggccagagggataggggtagataagggatggaggggccaggaaatgggccttgaaagggggctgaagggaaaatgatgaaggggaaagaaagcgccagaaaggggtgggaaggtagaaggattgggttggggaaaaagctgcagaaataatttgggggtgggagctgagtgatgaggaaaacatcaaggaaatagagggacagagtcttgggagaggggctaggaaggagaaatgaaaacataggggtgaaaagagaagccaagaagatgtggggggataatttggtgggggactcagagtatggtaaggggcggaaaaagagaggaggatggagggagagaaggggccagatggagagagagggaggcagtggggggtggggggatggagggtccagatggagggaagagagaagagagagggaacggtgggggaggggagaccagggcagggggagggccaaattatgtgtgcttgggggggtggcagtacaagtaagatgaaatgatgggagtaggggacaggttaggatcctgccccagactctgaccctcttaaaggctcttgaccagtaaaatgtaacctctggggtcttaatgctgtcttcacttcatcacttttacccccttcccccacccctccaatccttatttccattccccctccctcctctgctgtccatcacctatatctttccccccatatggtgtccgttccttatatgagtcccccttctgtccttcccctatatcagtcccctctctggtgttcattgcctctctcttatctcttttctatgtggtcgctcccttatatctctatcacttctttactagtccgtcttgaccccttctcatagcctccgcattaggtctgcctcctttgctctgacacatgtccagtcgagcccttcaggtgtattcccttgcccctgggcatttaccatcatttctgcctccttttctatctactcctattatttgtctcccagaccattccttgtcaccacaagtctgtgcctacccactttcccttaatacctcaactcttattatcatttctcttttcttgtctcctctacttattggggtgttggagatttggggtacaaagacacaggttttgatgattagaacaagggatccccatctcagcccttgagggatttctcatcctagtaaaaatttcccgtttctcagccatgttgctctgcctcttgcatctgcctcccagaatcattcttcaccaagtccagacagtatgtgtgtgtgtgtttctagagttgttcctaagttccctgctgccaggagaaagatgccctctgaagtctaacccgcctcccttggctgcagcctgaaccagccctttccccaaatgcttatgtgtatcaacagatttctcctctgggtataccaagtgtctaagtgcggtgggcatgttgcctgcaatgtctgtagtttcagaggctaggtattggtgatctctgtatctagagaacattagttagtctctgagatgggttgagatagagtttcaaagtatgtggtttctaaatggtggacattctgagggttcatcgctcactgtgatctggaggttgggtaaatttgagagacatatttatagacagaaaagggctgaatttgcaaaactctgctactcagtgcattctgttggaatgaagctcaaagaccagttctcctgcagtatactcatggttatcccataaaggtgacagagtttgatcttttttccatctaaaatctgataccttaagcctaatttctagctctttgctgtcgccaatgtgacatctctcttacttcaatagggcctgtgtggcattggggtttaaaggagaggcagtttgcagggagagcggcatggcaagaacaacagagctggggaaggaggaccctggtctcatctcagccataggcgacacttggtctactgttctctcttctcaaagttttgttcccatctccagctcttgtctttggaggcccctctgtgtcaccaggcctggatattccattctttccccctgacatctttcttcctcaagctcctcactgtgccttgagaaggctcctgacctatggagtggcttccatcctgtccactgagactaggtggggtgaggtggtgggggcagtgttgaatctctgggcactgaatgggagaagagataaatttggtctctacttgtccaaacaagggcatatttcccaccttctgccctggggcctccacagccagatgccgacaaaagccatcttctccttaccaccagaagaaccagaactttccctaaaggatgagcagggttgaactaggggaggagggcacagaggagggaagagttgggaggggaggccctctcatgtctctgactgtgaacaggtaagctccccgacttcttcttttctagatatttagccctcagaatctcatgatcccaatgttcctacacacacaccccatccttctttcccacagccatgtagctttcctcatactcttttatagaggggtggtgccaccttccaagtccttgtcttctgcagctatttggatgccttcctctacccagatatctgacaccaacttctctgtttttctcctgccaattttgcggcacctctaccttattttcctgaagtagatggagagctccttcatctttctctgcccccaaacgtgtaccttctctgtcatataattcccatccctgaacctctgcatttcttcccccaagtctccagagccttctgtgatgtgatcctctcctcttttcccctttgtataaatgcttgtcttgtgttcctttagagttgccaggtgtctcactttcaactgtgatctcctgaaggccggtagggtccccttctcactttgtggactctcttcttgccattttaggcctctgcttccaaatgcatagagcctcccttactgtttctgtgtgtctctgtcctccagatgtacggggaccctctatgcaccgaacccaatacgttcattccccgtatgatcgtcctggttggaaccctcggttctgcatcatctcggggaaccagctgctcatgctggatgaggatgaggtgagtgtggtgagaaggctgggaaaacgcatgtgggagaatggggagagtcctcattagtgaaggggagagagacacaaagaaggcagacaaagaagaaacatttgcaaatggcaggagggtggccattgagacttgggttggagtgtgacaagaggggtagtcattctctcatcttgggcagggagtctttgagggttatgagctgtgttggggaggagatgtggttctgaagatttcgggggtggggaggctcctgttttcacactgtccatattgtaggataggttagaatggggaaggggaactgaagggtttggagaaggggtgaagacatggaaggccctcccaaccaaagcaatcctcaggacccctctctgctttgcccactgagcaagactcccagtcctttctccatcagggggcagagtgcaagaagagaaattgcaggacgcagagaaaaggcaggggatagaggaggttttaggtagctggaggatactgggaaagaagactgaggtcagtggatcttggcatgatggggtgaagactgggagagtgattgagatcaaggtttagagagacactgagagggcttctgcaagggagtggttggacatcaggaaggaatataagggaggggaactgggagtatgtggagttatctaaaggagtacaagtggagtaggggcagggactagccagagtaaaggagatgaaacggacagaggcctcttatgggaggtggtggccaggtatggagatctgagagccagggaagtgtgggttctgatttgggagctgggtcagcaggagtgtccattggaggaaatagaggataaaaactggaatggtgccccacaagtgtgagtcagggaatgggggtgatttgggggacaagctttaaaaaatggtagggtagcctggaaaaccaaacgtggtgagagatggaccctgaaagttattgggaatggtgtgatgaggaagggttagaatttgagtcagggctaactagagtgtcaagggacctatgggggcaggtgagagtgtggagagatggctgggtagacagcttccaggccacagagtaaagtagaggtgttaaggagaggatatggtgactttgaaaggagaggtggcttggggagtctaagttttggacaccattgggagacatttgagtgactgtggtcaaacccctagatcaaggtttggagtctgtaggagaaatgggggaaactggaacccagagtggggactgttatagggatgaagagggaagacaatggattggggtaatgaaggaatgacagagatagggacagactgaagggaccagtggccagcaagttgaggggcaataggaatggccggtctggagcaggaagggcgtgtgtgtgggaggaggagtagatagaattgggaaaatgagcagcctgaacagacgcagggagttggaattggatgggtggtggaactggggctgggggatagtgaggggtctgttcctgtggctctttgtagaggtggaggagactgcaggggtggaggtgtatggaggtagggatggaggtggacagggggagctgggtgtgaagcttagggaaaggtgatggctgaggggaagaagggaactgagagatgctgggtcgggtgatggaaggagatgaaaggtgggggaaggtgaccaggccctctggcgggaggggaggttgggtcccagtctggccgcaagccgggccgtgggagggagacaagctgtggatcctgattataaatgcagcttctgctacccccgtgacaggctcggagggagagaagggggtaagggaggtgggaggttgggaggaaagcagggagaatggaggaactgaaggtcaagggaaaactggattcaggaagtagctaacttctgaggagttgcagaagagctgagtagggtttgggagaattctccggaaggtgtttcaagacaaatggagggagaaaagagggtgggacggcaaagaatgagagagagagactgggggagagaagggagagatccagtcaccaagtgtggaggggccggggcagaaaaagtgggcaggcttagggggaaaaggaggcccgcccttcctgggaggaggcggaggggggaagagggaggggaggggcggcgtgggccagggaggtctgacacacccccacctcccctagatacaccccctactgatccgggaccggaggagcgagtccagtcgcaacaaactgctgagacgcacagtctccgtgccggtggaggggcggccccacggcgagcatggtacggcggccgagcaggctctcatgacccggacaggcgcggggagagggctgaagatggaccgggctggcggggcgggggcgtcggggagcggcgggagctggccgggggcgggagaaggcggagacaaagtcttgcttcccgaggggagatggcgccctcctctggaaggtggagcgggacaggggctgtgggtgagaggcccctgtgggtcctcgctcggcttcgctccctttctcctctccagcagtgaagtttgactattttcctggtgcttgtaaaaatagtctccttagatctttagcttccagtccgtgtgttcctgcccctgcccctcccagcccctggtctgggatcttggaaagaatgacctagttcctgccctccccccagacctcttccccacccctatgctcctgattcttcttccggaccttcagtccttgaggtctccttttattaccccctgttttctcctctcatcagctgcttctattttctgcaattgtatcaccctttctctttcctccctgatttctcttattttctgtacccctcttgattaccccgtccctcccctctgctcccggcgaaagtccatcagactcccatctcatctcctttctgtctgtagagctatctgcgcggtctgtctctccaactctctccctctctccatctgtctcttcccctccctccccctttctgcccccccaaccccctctttagtcatttaaaaaaagatttttgtcttcctgagaagttcgcttaaaaggtttccatgggaacagtgaggggagatgaaggcagagaacagagatctgcagccaaggtgcagagagacgccctcagcccccggaaaccccctcgtcactgcccccttccacttcatttcccttcccggacctagcgatccaggttccccattcctccaacccccaggtgacccctttttcccaccagctccccctcccttcaggaattcaagctaccagtttctctcccttagagagccagtgacctgtccccatcctttggctccttccagccttctgataggtccaggccctactagccttgtgggccggtttggggaccttgggtgggtgggtgggtggtcagggatgtgtgtcattgtcatggaaaccccataccatcggggtgtgtgggtagcacatctctgtgaggcaaagtcaggtggtggtggagtgtatacagagaatgtgtgtgatgtctgtcacatctgtgtgtatatgtatatgtgtgtatgtcatgttcatgtctggggaagatgtgtgtgtttgtgtgcatgtgtgtacacctgcgtttccaggccagaatggtcacatgctcacagagcatgtttatcatgtgtcctgtggttggcagatctgcccacttattccccatctttctccttatcctgagtcctcagggtctaggggtctctggcgggggtctcccgtgtgttttgggtggggacaccgtgtgtgtttggagttgaggtggcatgtggaggttgctgtattggggttcagtaggggctgggaggggttccaggggcatatgtatttggggggagggcttagtgaaagttgatgggggtgaacgtttagggtcttcaggcagacatggaatgtgtaaagggcatggaggatgtgcagtggacataggggtcgttgggaccttggggacttggcaatgccaaggtgtttgctgaggctgtggactctccagcccgggagaggtcgccggacctttgaggggcattggaatcctgggctcctcctctgctgggtggagccgcgaaccctcgttctctccgcggttttgtgtgtgtgggggggtcctgctcaggaggggatggtgggtggcctggtttgttttgggggtccccttgcccccctcccccgtctctctcgcgctgtctccgggcgacagggctcgtgacagaggcggccacggcagcagcggtcgcctagcaacggcggcggggcccgggcaacggcggcagcggcgggagcggcggcggagggagccgttcccgcggccgtcaccgcgcggccgtcccggccgtcccgggccccgccgccgcccccaccgcgccgggcggcgcgagccgggccgtaccgccccctctccctccgcaccccgcccttcccccgcgcaggggcggggcccctcccccaccggggacacccctggcccccccggggggcggtgcgaggtaagggcggggccgggcggactaggagcgcgcgtagaggggggggcgccgcgcgcgtggggcgggggcgcgcgtgtgcgtgggcgcggggaggggggtggggaagccgcggtggcggcggcggcggcggcagctgctccctccgcatgttctcgctgcatcttccgagtggggggagttatggtaaccggagggggacagcggaggacgggagggtcggggaccggcctcgtgcggacagggtcttgagcacgcgggggcggccggtgtgtgtgggatcttggagcccctggtggaaggggcagcccgtgtgtccgcgtgtgtgttcgtgcccatgctcgtgtctcctgtgtgtcggtgccatgtgcacacgggggcccagttcctcgtgcacacatgtgcagccatccttgtgcaagtgtgtcctgtcttatcttgcctctgcctgtttcctgcctagggggctgttgggccagccacgggcttgtggggcagtccgcggccttgctggtccatgtcacctctgaccctgagcatgcatatccctggctggggctcacctcctgtcaggcttctgtgtgtgggaatgtgtggccctatgagcaggattttctgtgtccctggtggcaggtgtgtgtctttgcatgtgtgttccagcactggcctgagtatctgtgtcaatcccagcatgggtgtccagggcgtgtctggatgtgggtggtgtggctggggggagtaagtgtgtgaatgtgttccttggaattctactgtgtatgaaacacctttgggctgggcaggtgtaagccctgcttggtcagtaagtggggacagaaaagcttaaaaagggaagaaatggggtaaagaggaaaagtggggaggggataggagagaaggaatgagagaggcttgaagaagagagcagagagcagcaggccagggagaaagaatagctggagaatgggaatgtgggagaaagccaagccagacttagaagagagaacaggggataagagcttaagatggggaactggatagagatggtgggagaagaaggggtctgggagctggggaggcagtggggaggagagagtcaggccttctggtaaagtgatctctgaaagaagaaagggaagaagatgggagaaggcactggattcttgtaggccttgcaggatcaggcttggttttggatcagggaaggccactcaggcatacgggctggctcacagtgaggcctgtcatagcagggactgtcattagaggttcatatccccagcacagagctctgtctcccatttctctgctctgtgtccaaccctgttcttcgcccttctctggcaacctccctcctctggctccccttgagagctgccagctgggtgtggagaggaagaaaggccaaagggaaggttagggatttggagggcagggggagattctgtgggtgatggcaagattagagatgttggaggggcaggagtccaagcccttgctgtgtgtgtgtgagtgccattgtgtgtgtacacagggtgtgtacatgtgtgggtgtgtgcacaatgcctgtgttacgggtttgtgtaggtggctgttatgtgtgtgcatgcgtgtatacatcgtgcaggcatgggacatggagacccaggatcacagtttgtgcttttcaggtttgctgtgtgtgtgtgtacacgggtgtgtgttgttttctctgtacatgtcactgcatgcagcattaataacaggatgttctgtgtttctgtcactctgccccccctttcctctgtgtttctgctattcttttcctgcggcaacaaaagtgtttaataagcatatgtgtatgtggcctctgtgtacctgtgacttatgagtgagttcatggatcttagttcttggtaatatgtgtaaggttatattacttccaagaaccaagcaagccaattagcaaatttgttcttctgttaatgctttagttccaaagcggaattttaatgcatttaaagttagactttatgcctttattagatgagcttgcacatgaaaataatggctgagctcggttccctgaaatgagagtgaggcagccatacctgagaaatgcagaaaaaatgttactagggaagagatatcctgaaccattggatgcattgcttagtgtgtaccagaaggataattaacacatttgctcctggtttttctttactctggtggcaatctcggatgcctgtgttagagtgagagaagggctgggggaggaaagggggttgtcctgagacagagtggatgtggttgtacttttcacgtgaatgaaaggatgtttgtgcttctgagatatggggatacctttctgtggtcaggatcatggtgtactcaagcatgtatttcaggggttaaactggaattcccctgcatggggatatgtgtgtcttagggttataggtccatttctgtagtgtgctgtccacatgattgcccaagagacttgggccacaaagtccacaccagcagctctcatgtgggtcactgggttcaagtatgtactcccttgttgcagagctcacatatgtcaaagcatgtatcctgtggggtgtgtgggcctcagggtctcagaatgtggatccgtgctatgcccgtgctcacagttgtctgtatgtctcaaaagcacatagatccccagttatttttctgtattgtggttctcatatacacgtacctccatagctcagtatatgtttctgtactatacacctgttcctgagggagtgatagggttctcgtgtcatggggtccacatttttgtatgcaaacctcctaacacctgggttttacaggtaaagggaagctgaggactgattctagggcagtttgcaggcaatttgcaattctggaagcagacagtgaaaatataattgtggtcctcccttgttctgttctggaacctagagggttaacaggcagctcttccggtccacccccctccttccagcctgtagcttcttgttgccgtggagatggtggccccgccccgatgcagcacctgcccccccattggctgcagtggtgactgtggggctgaggggggagcccaggcctgggcagccattctggagctggagccggagcttggcatccccccacttacattctcttccagcccctcggcccctctaaattcccttgcagccgagcctcagcttcctttttcagcgcttgccatccctctaggctcttggcagactgagctgcatccgcattcacctcccctcctcctcctttccctatccttacttgggagtcccgagaacccccactgtccatccttcctgctccctgcccattcccctgcattctttgcttttcccctccccccaccaaccttctgagcccctgccactgcagtgcacgtggaaccggctccttctcccttccccccacctgccccttccttggattttctgtccccagcttctccccctgctactcttcacaggtctcttccaagacctccccctccagtccagggagggggtcatgggaggcagccctggccctccagacagacaggggttccaggaggtggggggcaggtggaagatgtgcccaccagggggaagaggaaagcctgcctatgggcaatgacctttaacccatctttccccccagctagccccttctggggtgggtgggcaccagggacctagcctccctggatctttggtgtccttcattactggggttttactgaccctctcagccatgctcccctgctgactgccagccccagtcatgggcctaaggcctcccaccccatccccctcagggggctcctgctcaggttccttgccccctccttcccgctgccagcctctccgccgtcgctgctcttcctgctgctttccggggggtaggtgaggccggagctgaggggcagagggaggtgggggcatgcactggggtcaggggtgggaacctgggttaacagcttcccttctggccccctccccaacttcccttctggccatttcctcccctccagaataccacttgggtcgctcgaggaggaagagtgtcccaggggggaagcagtacagcatggagggtgcccctgctgcgcccttccggccctcggtgagtggtgcctaccagatgtggctcagttgggccccctcccctccagccccaactggggccctaggagtctgagaaagagggcaggagggggagagagggagtgagagtgagaaaaagagtgtgtgtctgtgtgtgtctccccacctctttggtttcccccttcttggctctgcccccctgcttctgagaccagccctcccaccttctccaagctgtgtgtgtgtgtatatgtgtgtgtgtgtgtgcttgcactgtacccgtgggagcaaggaagacaaactggtattagggttcctatccccctttcctcgcctctggagacttcccttttccccatcccactttcatccaggggctctctaccagctgagggatgagtaggtagaactgaccctgccccaacccaccccatccccatttcccccccagcaaggcttcctgagccgacggctaaaaagctccatcaaacgaacgaagtcacaacccaaacttgaccggaccagcagctttcgccagatcctgcctcgcttccgaagtgctgaccatgaccggtacaggggctggagcatgtgggatgagattgatgtaatgtagggtctcctgtgtgagatgcagagggagggggttatctgtgtgcaaaggttgaaggattcaactcaagttggttgggggatgtcatggcacaggggacagaacagaaaagaactagaatagggatctgtgagcagcaggagaggggtagggtggcagagagaagacagacagacaggctggaaagggaatgaaggtgaagccaaggagggactcctcagggactcctcaggccaagaaggatgggctctagcccaggatcaaaggagctgtacaggaggagagtgaccctggaggaatgtttaaggaatgcagggaaggggttggtaggtgagtgagcaataggctgtaggtggaagggtgtcagggaaggtcaggaaatacaggggcagcaggttggagtggggctgggggtggctgaatgaatggatgatggctagggctcaaggacctcatcagtgagggaagagacagtatagagcatggcagagaaggggaggctgggacaggtgtgcagggtgacagaatgggaagcaacccatggactgaggcatgaagaagcagccagcggagaagtccagaaggcactgtccctgagaccaggctgaaggagacctccactgtttgcctttgttgcctgccatttggggttcctctctgggtttccccctcacccagtcactccccagggagaaccatgccctccctttcccccatgtctggccacccccaggattgggcaggtagggaggttgggataaagtgagtcacacctttccctgcccccctcccatgttgccagagctggatttggggccggcagggggtgagggcatggtattcctggccgcgggggcgggggggggggtccgggggccgggggagcgtcgcgctgacggcagccagagcctgcgatgacggggctgctataaataacttcttggaggctcccacacccaagctcccctcccgctttcccactgctctctactcttcatcccctgcccatctccataccgcttttgtattgctatcctacccctcattattccatgcccctagccccctttatcttctgccctcctgcagtgatttttttgcattccatcccctcttagccctcacctcggttctcccggccatctctccagttggccttcctcctcttctcctgtcctctgtcttgctgcacatacctttgtctccccctttcttcttcttgccctacctcctcttcttccctagtccgtgtattctgtcttttatcctctttgagctcttttctgcccacagctttctcctatttcttatgcttttccctcactctttcccctgcttctgctaaaacttgtcctcttatgctgtgttcattcattctttgaatcattaaatgtttatcaggcactagccgtgtgccaggcccaggctagacatatctcttctctgtgccttcacttctttacttccactttttcctttatactgaggctctggtttctggggttacctggaggtactacctagaagtgccccaggcccactttgttctctccttttttttttttcttttctgccatggtccatttctgggttgagatatttctagatgtccccagtcctcgcaatcccttaggtgtgagatggtgggagtttcttttttttcctttttttttttttaaatagaaatagggtctcactgtgttgcccagactggtcttgaactcctgggctcaagtgaccctcccacctcggcctttgaaatgttgggattacaggtgtgagccaccaggcccaggtggagcaggggagttccttaaaggattctgatttttctcacatccctcacgtccttcctgataggcagggtttctttctgtgtctgtttgggaagggtgttcagggggccttctctccaagtctccatcctggaacagactgatgatgcagggtacctatgtgtctaagaagagtaggggggccgggcgcggtggctcatgcctgtaatcccagcactttgggaggctgaatcacttgaggtcaggagtttgagaccagcctgaccaacagggtgaaaccccgtctcagctaaaaatacaaaaaaaaaaaagaaaaaaaaattagctgggtgtgctgaggcaggagagacgcttgagcccaggaggcagaagttgcagcaagccgagatcacaccactgtactccagcctgggcgacagagcaagactgtctcaaaaaaaaaaaaaaaaaaaaaaaaggaagagtgggaagccctgatcccttcctctcctgaacctcctgcctgccagggcccggctgatgcaaagctttaaggagtcacactctcatgagtccttgctgagtcctagcagtgcagctgaggcattggagctcaacttggatgaagattccattatcaagccagtgcacagctccatcctgggccaggagttctgttttgaggtactgggtctggtgggctggggagggccaaaggacaggggtgatggaaggtggggggcagagaggtctagagaaagtggcacaggtggggacatcaaggaaacagaaacttctgggactggaggaaagggtaggccagggaggaagagaaggtagcagagtctcctcccctctgtagccctttccctcaactccacactcctttctaggtaacaacttcatcaggaacaaaatgctttgcctgtcggtctgcggccgaaagagacaaatggattgagaatctgcagcgggcagtaaagcccaacaaggtattggggaataaaggggacacaacctgtgcagggcaaaggttgcaccaacacgggaagctgggggcctagggaggaaagtgagttaaaggaggagaggcttggggaaggagaggattgaggtacagtgtatctggacaagcagggggagacccccattattctgagtcccccatttcttttcgctttctgtactgctaccctgccttacgatctctttccctgccatagaagtcatagacttacagagttgatggggctctggaaattctttagtctagcttccctgcaggcaggaatgcttcactaataccccgcaggacacatcaaatacacttagccaagtttctgtaccttggtttcctctctaagacagagggaactggtggcaatgggttggattaaatgatctctaaggtccctttggcacataaattctatgagtctgttcttcccaaaacttcatgcttccagttctgtcagctattctctgtatcccagtttctagcaagcttacagtcctagtcacactcctctggggggaactcttgtgtcttgatgtccttaaagaactcaacccaagatgctgacatgatctgacctatgcagagtacaaacaccatgttccctttcaacacactgcaatatcacctgagccttaccattagcttgtgctcaattgtatccccccaggcccttactgattcttttttttttttttttgagacagagtctcactctgtcacccaggctggagtgcagtggcgtgatcttggctcactgcaacctccgcctcctgggtttaagcaattcctgtgcctcagcctccccagtagctgggattacaggcatgcaccaccacacccgactaatttttgtatttttagtagagacgaggtttcaccatgttggccaggctagtctcaaactcctgacctcaggttgtctgcctgcctcagcctcccaaagtgctaggattacaggcatgagccaccacatctggccaagctttacccattctatatgcaattcttttttcacaatttctgatagtctctgcaggactttccagttcccttcaaattctacattaatatttttggcttgttattccagcttttgaaatctttccaatactgtttgtgttgtctagtgtatgtctacgcttctacagtagcttcctggggctgctataacaaactgctacaaactgggtcacgtaaaacaacagaaatttattctctcacagttcaggaggctggaagtccaaaagcaaggtatcagcagggccacgctctctttgatgctgtagcagggaatccttccttgcctcttcctagcttccggaggttgccagcagtccttggcattcctgggcttataactgcatccgtctaatttctgcctccatcttcatgtagctggcttccttctgtgtgtctctgtatcctgtatctctgtgtctccaaatctccctctccatataaagacaccagtttttataaggtgggttaagggtccactctaattcagtatggcctcttttttttgagatggaatatcgctcttgtttcccaggcttggagtgcaatggcatgagctcagctcactgcaacctccgccttccaggttcaagtgattctcctgcctcagcctcctgagtagctgggattacaggcacgtgccactatgcccagctaatttgtttttgtatttttattagagacggggtttcactatgttggccaggctggctcgaactcctgacctcaggcaatccacccacctcggcctcccaaagtgctgggattacaggaatgagataccatggctggcctcttcttagtttgattacatttgcagggatcctgtttccaaataagatcacattcacaggttcagggtagacatgagttttggtgggatactattcaacccagtacaccgtctcaccttatgattgctgtctgtatcccactttcttactgtctctcctcttttggtgtctctctgtcccttccccctttaacatcatgcccaccccaccatgccaggacaacagccgccgggtagacaatgtgctaaagctgtggatcatagaggcccgggagctgccccccaagaagcggtactactgtgagctctgcctggatgacatgctgtatgcacgcaccacctccaagccccgctctgcctctggggacaccgtcttctggggcgagcacttcgagtttaacaacctgccggctgtccgtgccctgcggctgcatctgtaccgtgactcagacaaaaagcgcaagaaggacaaggcaggctatgtcggcctggtgactgtgccagtggccaccctggctgggcgccacttcacagagcagtggtaccctgtaaccctgccaacaggcagtgggggatctgggggcatgggttcgggagggggagggggctcggggggtggctcagggggcaagggcaaaggaggttgcccggctgtgcggctgaaagcacgttaccagacaatgagcatcttgcccatggagctatataaagagtttgcagagtatgtcaccaaccattatcggatgctgtgtgcagtcttggagcccgccctgaatgtcaaaggcaaggaggaggttgccagtgcactagttcacatcctgcagagtacaggcaaggccaaggtgagtgttgtgccctcagggaaaggtgacttgggaatgggcacttgcttgggggttagtgaggacagggcaaattcacgagattgggttgtgcagaggctgacacttggattttcctgggcctcaggacttcctttcagacatggccatgtctgaggtagaccggttcatggaacgggagcacctcatattccgcgagaacacgcttgccactaaagccatagaagagtatatgagactgattggtcagaaatacctcaaggatgccattggtatggcccacactcaggccctcttcttcccaaacctgccagatgtccaccccagaccccaagtccacccttccacagcttgatacttcctaacccagagtcctaggactccagcctccaacacctgattctgaaatttccccaaccctggccacccccttccctgcccttggaaagtgtgaccacaccctcttgtgcccccaccccccaggagaattcatccgtgctctgtatgaatctgaggaaaactgcgaggtagaccctatcaagtgcacagcatccagtttggcagagcaccaggccaacctgcgaatgtgctgtgagttggccctgtgcaaggtggtcaactcccactggtgagactgggaacgctgggctggggggccagggtcgggggaattatgtgttcatctgttcatctatctgtccatcctcaaagaggactgagcaccatttatgggcaaagcattgttctaggcgctatagagcaaacaggtgaaagaggcctggtccctgccctcagagggcctccaccagaatggggacaaattagaagaaaaaaaaaaaaagccacagagccataatggtgtgtaagtgctgagtaagggtccccccaacctctgtgtgacataaggtcagagagaaggcagagctttgagataagtggggaagaggtgcccccttgggtaggctttgaagactggtttaggttctgatatatggacatagttggcaagaaagacatttcagaagaaggctgtgagaaaggcacatgtgtgatggtgaaaaggcccaggagttttcaggggacattaaagtaggttagtagcaattacatcaggtttagtggagcatgtgcctcataatggggagtggcgggagagatgtctgggcaggaagattagctttagaaactggaaggcctcaaggagtctgaggtcattggtaggccttgggatgccattaaaggtgtcagaaatattgtgatttagaagattaatccataggctgggcacggtggctcacacctgtaataccagcactttgggaggctgaggcgggcagaccacctgaggtcaggagtttgagaccaggctgaccaacatggagaaaccctgtctctactaaaaatacaaaattagccagatgtggtggcacatgcctgtaatcccagctattcgggaggctaaggcaggagaatcacttgaatctgggaggtggaggttgtagtgagccgagatcacacgattgcactctagcctgggcaacaagagtgaaactccatctcaaaaaaaaaaaattaatccataagtagagtgtatgtagtagagtagagggatgtatgttgggggatgactggaatagagccagctgggggctcggaggcatgaaagtcagatcctgaatcagaacagtgacagaagttaggaaggagctactggaaggaccctctcgggaaaggatcagtaggaattgtcagcttattggaaaggagggagcatgtctgtggggagtcacggatgactcaagaggccatgaggctggtggttgggagaccggtggcctcattgacaaccaggaaagtcaggaggaggagccagttggaggtgtgggggcgatggtgagctctgctttacaccagccgagtttaaggtgtcagtgggacattgaagtggaactgggaggtgcggggagtgagctctgagccattccagggactggggatcatgcctggggcacctccatccccatttccctggaatccagaagagttggggggtccgagctccctgtacctcaagtgaccctccatctctctcccatctctgtctctccctggtgtctgtttttcttctcctcctctccttgtctctctcccacacccctccatctctctcccacgtgtctctcccctcaccttctctccccctccatttctctctccctaatctgtctgttccctctgccatggcccccttcttcaagcagcctcccatcttgctcctgcggtccctccttccctgtctctctcacccctgtttccacaccctcacctcctaccacccccctcagcatgttccctggaagctgagggtctctggggctcagtcccggtctctctctttctctctctctctctctgtctccccgacccttccccccagcgtgttcccgagggagctgaaggaggtgtttgcttcgtggcggctgcgctgcgcagagcgaggccgggaggacatcgcagacaggcttatcagcgcctcactcttcctgcgcttcctctgcccagcgattatgtcgcccagtctctttgggcttatgcaggagtacccagatgagcagacctcacgaaccctcaccctcattgccaaggtcatccagaacctggccaacttttccaagtgagggaagcttcaggagtgggcagggcagggagtggcagggcagggagtggcagggctgggggtcggcaagaagggtctcctgagtccccagagatcctgagatggggaggctatgataccttgtgtgtgtgtgtatgtgtgtgtatgtgtgtgtgtgtgtgtgtgtgtgtgtatgtgacctttatcttctgcattcttggctaggtttacctcaaaggaggactttctgggcttcatgaatgagtttctggagctggaatggggttccatgcagcagtttttgtatgagatctccaatctggacacgctaaccaacagcagtagctttgagggttacatcgacttgggccgagagctctccacactgcatgccctactctgggaggtgctgccccagctcagcaaggtcagcagatcccctctttgccctatccccagatggctccagaggttcctggagcctgagaaactaccctttgaagattttttttctccccttgtttctcgaggtgtcaccactactatcccaactcaggccccctccacctgcaccctcagaggccctcttagagctgggcactgagcccccaggtaacagcctcacccttccaggaagccctcctgaagctgggtccactgccccggctcctcaacgacatcagcacagctctgaggaaccccaacatccaaaggcagccaagccgccagagtgagcggccccggcctcagcctgtggtactgcgggggccatcggctgagatgcagggctacatgatgcgggacctcaacaggtgagcaccctgggacagccaggcctgtgccctaggagcccttctcctattctagatactcctcactgggccccacatgcatctctctagggcttgaaagaagggaggaaaaagcaccaagttctcaggggagacgataaggagacaggtacagtcagtggtaggctgagagccctttacagcctgagggagtgagagatttggagctctaggaatagggctgaggctccaccaactcacggcttagttgtaagcctagagcatccctgctgcaagctctgatttgctgtccctctgcctgcccatgctagtccccaggctgaggttcagccagcatgtcatgtcagccatgtgtcaaaatgttcaaacatctcagtaatagctagtgaataagcacttcccccagcccccgaccacaaccccacagacctccccatgatccagcacttagagcagtgacagcagaagcctagcagggcctgcagcctgctccagagtcccagcctccattctgataggtggtgcccgtgcttcatttgctgctcattattttgatgatggccctgctttttcctctgcccgtgtcttcctccatgacaccatacccatcccaccattcccgcctctcctttcatttgtccacatctctctccttctctgtctgtgctcgcccctctttccatctctctccagctccatcgaccttcagtccttcatggctcgaggcctcaacaggtgaggggctctcccctcccccgccctcctctcctctcctgtctgttccctctcccactccactggccttcgccctactcctctcctctcctcctccatggacctcatctcctccatatgtgcccagccctgcccccatcccttctcttgctgcccccatctcccctcctctaggcctcacccccttcccggaggggccctgtcctttccctttactcacctgtcccctcccatcctccctgcctgccctcttcagggctgccaccgctagctctcagcccttccctctgggtcccacttttcaccccaaggcctgtgccagaccacagcaaggttcaattgctaggagccctgaccttaccttctgcttgtgtgcccccttcccttctgacagctctatggacatggctcgcctcccctccccaaccaaggaaaagccacccccaccaccgcctggtggtggtaaagacctgttctatgtaagccgtccacccctggcccgttcctcaccagcatactgcacgagcagctcggacatcacagagccagagcagaagatgctgagtgtcaacaagagtgtgtccatgctggacttacagggtgatgggcctggtggccgcctcaacagcagcagtgtttcgaacctggcggccgtaggggacctgctgcactcaagccaggcctcgctgacagcagccttggggctacggcctgcgcctgccggacgcctctcccaggggagtggctcatccatcacggcggctggcatgcgcctcagccagatgggtgtcaccacagacggtgtccctgcccagcaactgcgaatccccctctccttccagaaccctctcttccacatggctgctgatgggccaggtcccccaggcggccatggagggggcggtggccatggcccaccttcctcccatcaccaccaccaccaccatcaccaccaccgaggtggagagccccctggggacacctttgccccattccatggctatagcaagagtgaggacctctcttccggggtccccaagccccctgctgcctccatccttcatagccacagctacagtgatgagtttggaccctctggcactgacttcacccgtcggcagctttcactccaggacaacctgcagcacatgctgtcccctccccagatcaccattggtccccagaggccagccccctcagggcctggaggtgggagcggtgggggcagcggtgggggtggcgggggccagccgcctccattgcagaggggcaagtctcagcagttgacagtcagcgcagcccagaaaccccggccatccagcgggaatctattgcagtccccagagccaagttatggccccgcccgtccacggcaacagagcctcagcaaggagggcagcattgggggcagcgggggcagcggtggcggagggggtggggggctgaagccctccatcaccaagcaggtaggtgaaggcaggaggaaggcgggctgggtcacaacagggagggaagaaggagatggggggtggggttgaaacagagtctgtggcctgaagttacaatcttcttgcctccttttggccattaaacaaatgtgtatagagggcctgctatgtgccatgtgctatgccaggcactaaggatacggcactgaaccctcttagcactctcattccagaggggattaatccataagtagaatgggggtgactggaatagggccagctgggggcttggaggcatgaagatcagatcctgaatcagaacaacaggagaaattctctggcattcaactcacatctctggcattcagaggtgataaaggctacagcagggcaataggactgggactgtcgtctcctttggctgtgctgttgccctctaaatgtaccctgctttttcccaccttttctttctctgttcgccctcactgtgccttgtcccagcattctcagacaccatccacattgaaccccacaatgccagcctctgagcggacagtggcctgggtctccaacatgcctcacctgtcggctgacatcgagagtgcccacatcgagcgggaagagtacaagctcaaggagtactcaaaatcgatggatgagagccggctggatagggtacgatgggctctaccagctccaagccccagtgtttccttttacccacaggggagatctctagtcacttccaagggaaacctccagggtcagttatggtggtaagaaaaggcaaagacctgatcacctcttgagaagccttccgtccatctggggagaccagatacacacagttgttaaaagtcactttcaactctattttgtaggttatatatatcatagactatctggggatcatctattttaggcttacctccatgttcttccccaggaggaacataagccctggctcctgtgactgcttaggaaaggaaatgttactttactggcagtaggagctaataaattggatggggatggagggggttgcagctatattacaagtgatgtctggcctacccagtcactgtcccatgggcataagtgacagtcagtgggcagggaatgcatgtggtaaagtagtatgtatcagtcatgtgtgaaaagaccatccagaccctcacttggtggaggctgagggcaaagggcaccaagagctctggggctaacacagataacttagcagaaagttacttgaggaagctgttgttcctagggcctgaggaagagggcggctgcaggattaggtcatatataaagaacatatgatcctaacacggggaagtggtctttgagcataggaaatgttgggactgactcagatgggcttgaccagcaaatttaatgagaattaaaccctaatattagccccaaggcagccaccgtaggaagttaattcacatctctcctctgcatgtagaagggttggtgatatatgtatgtatcctcttcagagaatgaggaaatagtcttttgaatcatttttttttctgtgcttcagatgaggaaaccttgttgagaaaggctgtagactagcactatccaatataactttctgcagtgatgaaatgttctgtaatctgtagtgttcacatgtgtctagttgtgattcaggaactgaatttttagatctatttaattttaattttgtaatttttttgagacagggtcttgctctgtcacccaggctggagtgcagtggtgcaaacatggctcgaggcaacctccgcctcctgggctcaagacatcctcccacctcagccccctgagtagctaggactacagggtcgtgctaccatgcctggctagttttttttcttttcttttttttttttttttttttttgtagagacggggttttgccatgttgcccaggctggtctagaacttgtgagctcaagtgatctacctgcctcagccttccaaagtgctgggattacaggtgttgagccactgtgcctggcctaaattttaaatagctacatgtgggctggtggctaccatattagacagcacagctgtagactctagagccaatagggcagataaaatgactcttctgagctcttccagctctggaattcctagattctcagcctagaattcacttgtagacctcctatccttggcaccttgacagagccaaggagagggtcacatggaggacagcacctgcctttcccccgtcaattgccttttcttcctatgtctccagcatgtgttctggggcctggcttagggctgaagagtcaccctatttttaatttctgagcacagttactcaaggtgtgtttgtgagtgtaggtttctgtgtgggtcttcatgaggggccatacatagacctcagggtgtgggagtctgtgaccttgctccattttgagggaacctcagcaccatggcagggtcttctcaaaagcaggtgtgtggatatgatccacaggcagggaaggggttggggaaggcagctggatgtccctcaacatgcagtggctgtgcttggcagacagggatggaggctgggtggtgggcttggggtggggcgcccctcatagtgcggggtcgtgtgcccggcgggcaggtgaaggagtacgaggaggagattcactcactgaaagagcggctgcacatgtccaaccggaagctggaagagtatgagcggaggctgctgtcccaggaagaacaaaccagcaaaatcctgatgcagtatcaggcccgactggagcagagtgagaagaggctaaggcagcagcaggcagagaaggattcccagatcaagagcatcattggcaggtgaggggcggcctggggagggggttgtgagggagagcctgaggctggagagagcaagtgggtgagctactccgctgactcccatccccaaactcaggagcccaccaggagagcccaccactctcctccccaggaagccacccactcactcatcaccagatggagagaaaccccaacctgcttagtgcattaaatatctctttaccaaaccctgacctctcttctgatagagtagcttcggaagcccttggaaaatgtacctgttcctgtccaaccatcactgcatttgcatttaccctaggccagagctccccactagttattctcaacttaacctgtgatgttcactccaaacctaagcagggctccctagccagagtaggccctgcccttcctgggtggaccctccctctctagccttggaaaggtgttctgttagaaagggtcttttagcctgtgtatgttttcagctgctccagcaagtcctgggctccaaagagggtatcctcagcaaagaggtcaattatcttcagagtggtggggtcggggtgggggggaccctgggcgcactccaaccagagccacctccattttgatccattctaaatgtattttatgtaagatttaattagaagaaaagggcttcttgaaatattttttgaaaaccactgctctaattgatatcctttatgataaatcacctcgaggatcttcacagtgaggtgacatgggggatgcagaagccaggtcctcagccatggaaggtctggggaaggggcactgctgtcctgattgggacgatggaggcctggaggtgtctggatggtagaagtctttgaggcacagaaagctgccttagcagggaggtgtaagggttcctgggaggaaggtggagagcatgatcctgaggaacagggagtcttgcatcacggcaatggagggactctgattctaagggataaggatgcctgaggtttttccagagagctatggggttccatgggcaggctctgagcctgtgcccgccactaaccccactgaagcccgtcccttcaggctgatgctggtggaggaggagctgcgccgggaccaccccgccatggctgagccgctgccagaacccaagaagaggctgctcgacgctcaggtggaaattacaatgtcatttatcttctccgtgtcccatccccatccatcccactgtctttcgtgcactcactacaccagccacctagccccatcaccatctgtctctcatagtctgctgtttgtccactggctgctcctggcagccccctagtgaccccatcttcatcccatcgtctgtgcctttgtcactcctggcagcgtcagcccaactcctgtgccttcccatccagtcttcccactcctctctgcatctcaggaccttctctaccagaaccttggtctttctgcccctagaccccacctagttccaagaacccctgccccttctttgctcactcctattcaagccacgttgttcagcttcctctgcgctcttgggccagagggctagaagctgccgttttctggaatagagcacagggcagtatgatctgtagtttctccaggccctggccggtaccctgaaaacttggggacccatcacctctgttctcttggctccctaattttcctgtctccttggcagctcctgcatagcttcctcttcctgactcttcagatcttgaaggccttccatcctgtaacctccctttgccctcagtatttaagtccagcctccctctggcctccctcccactctggccctcagaccttcccagctgcctgctgcccagcctctcttctcacaagccagcttctaggacctcccttctgcacccttaccccttgctttcccaaaattctgctcattttcctacccatactcctctttgctctgactgctaggctccccccgcctgccatccccccaccaaggctcctgaccccatgaccccactctctcccactgcagctcctcatcaggtaattctcctggttccgctttggccacgggcggaggacacagggggaggtgactccggaccactgcaggttggtcgtgaagcccactccctccaacacctccggagcctctcccctctcactgctgccctccacacccagagaacctccacagactccagccctccgacacctgcacagatccatctcccaagacaccacccaaagagagcatttgctgctgcttcccagaactgtccaacaataccttagcaacaccaagagttgggccctagatgggcccagcacattcacaggtcacacccacttccctgcaaaacccaccccctcccagcctcctcctgactctaagccctcctcttcctcta

SEQ ID NO: 14315 - DNA, 4264 bp, Homo sapiens
atgagcaggtctcgagcctccatccatcgggggagcatccccgcgatgtcctatgcccccttcagagatgtacggggaccctctatgcaccgaacccaatacgttcattccccgtatgatcgtcctggttggaaccctcggttctgcatcatctcggggaaccagctgctcatgctggatgaggatgagatacaccccctactgatccgggaccggaggagcgagtccagtcgcaacaaactgctgagacgcacagtctccgtgccggtggaggggcggccccacggcgagcatgaataccacttgggtcgctcgaggaggaagagtgtcccaggggggaagcagtacagcatggagggtgcccctgctgcgcccttccggccctcgcaaggcttcctgagccgacggctaaaaagctccatcaaacgaacgaagtcacaacccaaacttgaccggaccagcagctttcgccagatcctgcctcgcttccgaagtgctgaccatgaccgggcccggctgatgcaaagctttaaggagtcacactctcatgagtccttgctgagtcctagcagtgcagctgaggcattggagctcaacttggatgaagattccattatcaagccagtgcacagctccatcctgggccaggagttctgttttgaggtaacaacttcatcaggaacaaaatgctttgcctgtcggtctgcggccgaaagagacaaatggattgagaatctgcagcgggcagtaaagcccaacaaggacaacagccgccgggtagacaatgtgctaaagctgtggatcatagaggcccgggagctgccccccaagaagcggtactactgtgagctctgcctggatgacatgctgtatgcacgcaccacctccaagccccgctctgcctctggggacaccgtcttctggggcgagcacttcgagtttaacaacctgccggctgtccgtgccctgcggctgcatctgtaccgtgactcagacaaaaagcgcaagaaggacaaggcaggctatgtcggcctggtgactgtgccagtggccaccctggctgggcgccacttcacagagcagtggtaccctgtaaccctgccaacaggcagtgggggatctgggggcatgggttcgggagggggagggggctcggggggtggctcagggggcaagggcaaaggaggttgcccggctgtgcggctgaaagcacgttaccagacaatgagcatcttgcccatggagctatataaagagtttgcagagtatgtcaccaaccattatcggatgctgtgtgcagtcttggagcccgccctgaatgtcaaaggcaaggaggaggttgccagtgcactagttcacatcctgcagagtacaggcaaggccaaggacttcctttcagacatggccatgtctgaggtagaccggttcatggaacgggagcacctcatattccgcgagaacacgcttgccactaaagccatagaagagtatatgagactgattggtcagaaatacctcaaggatgccattggagaattcatccgtgctctgtatgaatctgaggaaaactgcgaggtagaccctatcaagtgcacagcatccagtttggcagagcaccaggccaacctgcgaatgtgctgtgagttggccctgtgcaaggtggtcaactcccactgcgtgttcccgagggagctgaaggaggtgtttgcttcgtggcggctgcgctgcgcagagcgaggccgggaggacatcgcagacaggcttatcagcgcctcactcttcctgcgcttcctctgcccagcgattatgtcgcccagtctctttgggcttatgcaggagtacccagatgagcagacctcacgaaccctcaccctcattgccaaggtcatccagaacctggccaacttttccaagtttacctcaaaggaggactttctgggcttcatgaatgagtttctggagctggaatggggttccatgcagcagtttttgtatgagatctccaatctggacacgctaaccaacagcagtagctttgagggttacatcgacttgggccgagagctctccacactgcatgccctactctgggaggtgctgccccagctcagcaaggaagccctcctgaagctgggtccactgccccggctcctcaacgacatcagcacagctctgaggaaccccaacatccaaaggcagccaagccgccagagtgagcggccccggcctcagcctgtggtactgcgggggccatcggctgagatgcagggctacatgatgcgggacctcaacagctccatcgaccttcagtccttcatggctcgaggcctcaacagctctatggacatggctcgcctcccctccccaaccaaggaaaagccacccccaccaccgcctggtggtggtaaagacctgttctatgtaagccgtccacccctggcccgttcctcaccagcatactgcacgagcagctcggacatcacagagccagagcagaagatgctgagtgtcaacaagagtgtgtccatgctggacttacagggtgatgggcctggtggccgcctcaacagcagcagtgtttcgaacctggcggccgtaggggacctgctgcactcaagccaggcctcgctgacagcagccttggggctacggcctgcgcctgccggacgcctctcccaggggagtggctcatccatcacggcggctggcatgcgcctcagccagatgggtgtcaccacagacggtgtccctgcccagcaactgcgaatccccctctccttccagaaccctctcttccacatggctgctgatgggccaggtcccccaggcggccatggagggggcggtggccatggcccaccttcctcccatcaccaccaccaccaccatcaccaccaccgaggtggagagccccctggggacacctttgccccattccatggctatagcaagagtgaggacctctcttccggggtccccaagccccctgctgcctccatccttcatagccacagctacagtgatgagtttggaccctctggcactgacttcacccgtcggcagctttcactccaggacaacctgcagcacatgctgtcccctccccagatcaccattggtccccagaggccagccccctcagggcctggaggtgggagcggtgggggcagcggtgggggtggcgggggccagccgcctccattgcagaggggcaagtctcagcagttgacagtcagcgcagcccagaaaccccggccatccagcgggaatctattgcagtccccagagccaagttatggccccgcccgtccacggcaacagagcctcagcaaggagggcagcattgggggcagcgggggcagcggtggcggagggggtggggggctgaagccctccatcaccaagcagcattctcagacaccatccacattgaaccccacaatgccagcctctgagcggacagtggcctgggtctccaacatgcctcacctgtcggctgacatcgagagtgcccacatcgagcgggaagagtacaagctcaaggagtactcaaaatcgatggatgagagccggctggatagggtgaaggagtacgaggaggagattcactcactgaaagagcggctgcacatgtccaaccggaagctggaagagtatgagcggaggctgctgtcccaggaagaacaaaccagcaaaatcctgatgcagtatcaggcccgactggagcagagtgagaagaggctaaggcagcagcaggcagagaaggattcccagatcaagagcatcattggcaggctgatgctggtggaggaggagctgcgccgggaccaccccgccatggctgagccgctgccagaacccaagaagaggctgctcgacgctcagctcctcatcaggtaattctcctggttccgctttggccacgggcggaggacacagggggaggtgactccggaccactgcaggttggtcgtgaagcccactccctccaacacctccggagcctctcccctctcactgctgccctccacacccagagaacctccacagactccagccctccgacacctgcacagatccatctcccaagacaccacccaaagagagcatttgctgctgcttcccagaactgtccaacaataccttagcaacaccaagagttgggccctagatgggcccagcacattcacaggtcacacccacttccctgcaaaacccaccccctcccagcctcctcctgactctaagccctcctcttcctcta

SEQ ID NO: 14316 - DNA, 6010 bp, Homo sapiens
tctcggctgccgctgctgccgttggctcttattctcctcctcctcctcctctctcctcctctctgcttctctctgctcctctctcctcctctctcctcctcctcctcctccacctcctcctccttctccccctctttctccccctctttctctcttctttctcccccgtccccccgccccctccccccaggcctgatgagcaggtctcgagcctccatccatcgggggagcatccccgcgatgtcctatgcccccttcagagatgtacggggaccctctatgcaccgaacccaatacgttcattccccgtatgatcgtcctggttggaaccctcggttctgcatcatctcggggaaccagctgctcatgctggatgaggatgagatacaccccctactgatccgggaccggaggagcgagtccagtcgcaacaaactgctgagacgcacagtctccgtgccggtggaggggcggccccacggcgagcatgaataccacttgggtcgctcgaggaggaagagtgtcccaggggggaagcagtacagcatggagggtgcccctgctgcgcccttccggccctcgcaaggcttcctgagccgacggctaaaaagctccatcaaacgaacgaagtcacaacccaaacttgaccggaccagcagctttcgccagatcctgcctcgcttccgaagtgctgaccatgaccgggcccggctgatgcaaagctttaaggagtcacactctcatgagtccttgctgagtcctagcagtgcagctgaggcattggagctcaacttggatgaagattccattatcaagccagtgcacagctccatcctgggccaggagttctgttttgaggtaacaacttcatcaggaacaaaatgctttgcctgtcggtctgcggccgaaagagacaaatggattgagaatctgcagcgggcagtaaagcccaacaaggacaacagccgccgggtagacaatgtgctaaagctgtggatcatagaggcccgggagctgccccccaagaagcggtactactgtgagctctgcctggatgacatgctgtatgcacgcaccacctccaagccccgctctgcctctggggacaccgtcttctggggcgagcacttcgagtttaacaacctgccggctgtccgtgccctgcggctgcatctgtaccgtgactcagacaaaaagcgcaagaaggacaaggcaggctatgtcggcctggtgactgtgccagtggccaccctggctgggcgccacttcacagagcagtggtaccctgtaaccctgccaacaggcagtgggggatctgggggcatgggttcgggagggggagggggctcggggggtggctcagggggcaagggcaaaggaggttgcccggctgtgcggctgaaagcacgttaccagacaatgagcatcttgcccatggagctatataaagagtttgcagagtatgtcaccaaccattatcggatgctgtgtgcagtcttggagcccgccctgaatgtcaaaggcaaggaggaggttgccagtgcactagttcacatcctgcagagtacaggcaaggccaaggacttcctttcagacatggccatgtctgaggtagaccggttcatggaacgggagcacctcatattccgcgagaacacgcttgccactaaagccatagaagagtatatgagactgattggtcagaaatacctcaaggatgccattggagaattcatccgtgctctgtatgaatctgaggaaaactgcgaggtagaccctatcaagtgcacagcatccagtttggcagagcaccaggccaacctgcgaatgtgctgtgagttggccctgtgcaaggtggtcaactcccactgcgtgttcccgagggagctgaaggaggtgtttgcttcgtggcggctgcgctgcgcagagcgaggccgggaggacatcgcagacaggcttatcagcgcctcactcttcctgcgcttcctctgcccagcgattatgtcgcccagtctctttgggcttatgcaggagtacccagatgagcagacctcacgaaccctcaccctcattgccaaggtcatccagaacctggccaacttttccaagtttacctcaaaggaggactttctgggcttcatgaatgagtttctggagctggaatggggttccatgcagcagtttttgtatgagatctccaatctggacacgctaaccaacagcagtagctttgagggttacatcgacttgggccgagagctctccacactgcatgccctactctgggaggtgctgccccagctcagcaaggaagccctcctgaagctgggtccactgccccggctcctcaacgacatcagcacagctctgaggaaccccaacatccaaaggcagccaagccgccagagtgagcggccccggcctcagcctgtggtactgcgggggccatcggctgagatgcagggctacatgatgcgggacctcaacagctccatcgaccttcagtccttcatggctcgaggcctcaacagctctatggacatggctcgcctcccctccccaaccaaggaaaagccacccccaccaccgcctggtggtggtaaagacctgttctatgtaagccgtccacccctggcccgttcctcaccagcatactgcacgagcagctcggacatcacagagccagagcagaagatgctgagtgtcaacaagagtgtgtccatgctggacttacagggtgatgggcctggtggccgcctcaacagcagcagtgtttcgaacctggcggccgtaggggacctgctgcactcaagccaggcctcgctgacagcagccttggggctacggcctgcgcctgccggacgcctctcccaggggagtggctcatccatcacggcggctggcatgcgcctcagccagatgggtgtcaccacagacggtgtccctgcccagcaactgcgaatccccctctccttccagaaccctctcttccacatggctgctgatgggccaggtcccccaggcggccatggagggggcggtggccatggcccaccttcctcccatcaccaccaccaccaccatcaccaccaccgaggtggagagccccctggggacacctttgccccattccatggctatagcaagagtgaggacctctcttccggggtccccaagccccctgctgcctccatccttcatagccacagctacagtgatgagtttggaccctctggcactgacttcacccgtcggcagctttcactccaggacaacctgcagcacatgctgtcccctccccagatcaccattggtccccagaggccagccccctcagggcctggaggtgggagcggtgggggcagcggtgggggtggcgggggccagccgcctccattgcagaggggcaagtctcagcagttgacagtcagcgcagcccagaaaccccggccatccagcgggaatctattgcagtccccagagccaagttatggccccgcccgtccacggcaacagagcctcagcaaggagggcagcattgggggcagcgggggcagcggtggcggagggggtggggggctgaagccctccatcaccaagcagcattctcagacaccatccacattgaaccccacaatgccagcctctgagcggacagtggcctgggtctccaacatgcctcacctgtcggctgacatcgagagtgcccacatcgagcgggaagagtacaagctcaaggagtactcaaaatcgatggatgagagccggctggatagggtgaaggagtacgaggaggagattcactcactgaaagagcggctgcacatgtccaaccggaagctggaagagtatgagcggaggctgctgtcccaggaagaacaaaccagcaaaatcctgatgcagtatcaggcccgactggagcagagtgagaagaggctaaggcagcagcaggcagagaaggattcccagatcaagagcatcattggcaggctgatgctggtggaggaggagctgcgccgggaccaccccgccatggctgagccgctgccagaacccaagaagaggctgctcgacgctcaggagaggcagcttccccccttgggtccaacaaacccgcgtgtgacgctggccccaccgtggaatggcctggcccccccagccccaccacccccaccccggctgcagattacggagaacggcgagttccgaaacaccgcagaccactagcccacccagcatcagagaccttctcttcctttcctgtgcaccccaccctgtaacagcaccaaccaccaggattggacatcaccgaggaacagcgggattgcctccccgaatgcctccctgggaggcacactgattgcccacccccaccactgcaccatttccaggagggagagtggggaccctcagccgcccccttttccttcccattggggtgctgccctctctttgacccccagggacccttgccccaggacaccgcctaccccgtacagaccccttcactccggggtgctatccccatcctctgcctcatcgttcccctgagcactgggggacagaccctcacccccaccctgggggtgtggcacctccaaactttcaacttcagggtgatttttttagcagtaaccagagctgacaatctaactcccctccaccgccccattttggcctcccctgccccccttgttatggggaggggaccccgggtgagggggccctattaccccttgatttctcaggagcgtctgggggggctcagcacgcacaaactccttctccttctaccactcttaaatttactccctccccacccagaacccagatggggtggagggggccaccggggcagggagggggcggcaaggggggaatgggagttgtctccccttctccccacacctgatctgctctcggctggtcccagagcggggtgagggggcttatgcccccccctcccccagtgtgttgggtggggtggaattgaggttagggtgaggggtcagggtttaggagggtgtgtatgttgggaggacaggctagttgatctgtcctactctgacacacagtcccctctgccccttccttctctcttcttggtctctactcccagggggaggggggaacttactctaggaaaagccatgtctctctcccccagggtggggggacctgtgttggaggaggggtgttggggggcccccttccatgactctgtcccctgggggaggtaggacagggctgggcttccctctcatcctccccctcccaatctccttccacctccctccctcccgccagctccacgatttttcggtgtttctctgtacatagttttctggcgggataggggaggtaggatggatggggtttggggtgggtaggccatgggaggggagaagcccctccttggcaccccctcttccctgactgctgtcccctacccagccttgcccccttcatccttttgcgtttggtattgagactctcctagactctactcctctttcttttgtatggacagttccccttcagtcccatccccctacacatacacccagccggggccaaatttatacttatataaaagttgtaaatatgtgaaattttatccctgtgccctttccccacctcaggccctacccctggaccctccccaaccttccttctctcttctttggctgttgtaattatctggggtttgtactgtacatatccggggtgtgtgtgtgtgggctgggggcaacccttctgtacagagcttcctggccccctccccccccgcccctctgcttccctccccacccaccacctcaagggtagggagttgctcttcctacctgttttattttgttttctcgttctccctccccaccccactcccagccttatctatcccccctcactgtccccttttctccactcccagccccatttcctttttttctggagtgtgtggtgaaacagaaaaaaacatgtttaataaacggagattgttctttta

SEQ ID NO: 14317 - DNA, 428 bp, Homo sapiens
ggaactgaaggtcaagggaaaactggattcaggaagtagctaacttctgaggagttgcagaagagctgagtagggtttgggagaattctccggaaggtgtttcaagacaaatggagggagaaaagagggtgggacggcaaagaatgagagagagagactgggggagagaagggagagatccagtcaccaagtgtggaggggccggggcagaaaaagtgggcaggcttagggggaaaaggaggcccgcccttcctgggaggaggcggaggggggaagagggaggggaggggcggcgtgggccagggaggtctgacacacccccacctcccctagatacaccccctactgatccgggaccggaggagcgagtccagtcgcaacaaactgctgagacgcacagtctccgtgccggtggaggggcggcccca

SEQ ID NO: 14318 - DNA, 191 bp, Homo sapiens
ggaactgaaggtcaagggaaaactggattcaggaagtagctaacttctgaggagttgcagaagagctgagtagggtttgggagaattctccggaagatacaccccctactgatccgggaccggaggagcgagtccagtcgcaacaaactgctgagacgcacagtctccgtgccggtggaggggcggcccca

SEQ ID NO: 14319 - DNA, 787 bp, Homo sapiens
tctgttcctgtggctctttgtagaggtggaggagactgcaggggtggaggtgtatggaggtagggatggaggtggacagggggagctgggtgtgaagcttagggaaaggtgatggctgaggggaagaagggaactgagagatgctgggtcgggtgatggaaggagatgaaaggtgggggaaggtgaccaggccctctggcgggaggggaggttgggtcccagtctggccgcaagccgggccgtgggagggagacaagctgtggatcctgattataaatgcagcttctgctacccccgtgacaggctcggagggagagaagggggtaagggaggtgggaggttgggaggaaagcagggagaatggaggaactgaaggtcaagggaaaactggattcaggaagtagctaacttctgaggagttgcagaagagctgagtagggtttgggagaattctccggaaggtgtttcaagacaaatggagggagaaaagagggtgggacggcaaagaatgagagagagagactgggggagagaagggagagatccagtcaccaagtgtggaggggccggggcagaaaaagtgggcaggcttagggggaaaaggaggcccgcccttcctgggaggaggcggaggggggaagagggaggggaggggcggcgtgggccagggaggtctgacacacccccacctcccctagatacaccccctactgatccgggaccggaggagcgagtccagtcgcaacaaactgctgagacgcacagtctccgtgccggtggaggggcg

SEQ ID NO: 14320 - DNA, 148 bp, Homo sapiens
tctgttcctgtggctctttgtagaggtggaggagactgcaggggtggaggtgtatggagatacaccccctactgatccgggaccggaggagcgagtccagtcgcaacaaactgctgagacgcacagtctccgtgccggtggaggggcg

SEQ ID NO: 14321 - DNA, 2843 bp, Homo sapiens
tgaaaacataggggtgaaaagagaagccaagaagatgtggggggataatttggtgggggactcagagtatggtaaggggcggaaaaagagaggaggatggagggagagaaggggccagatggagagagagggaggcagtggggggtggggggatggagggtccagatggagggaagagagaagagagagggaacggtgggggaggggagaccagggcagggggagggccaaattatgtgtgcttgggggggtggcagtacaagtaagatgaaatgatgggagtaggggacaggttaggatcctgccccagactctgaccctcttaaaggctcttgaccagtaaaatgtaacctctggggtcttaatgctgtcttcacttcatcacttttacccccttcccccacccctccaatccttatttccattccccctccctcctctgctgtccatcacctatatctttccccccatatggtgtccgttccttatatgagtcccccttctgtccttcccctatatcagtcccctctctggtgttcattgcctctctcttatctcttttctatgtggtcgctcccttatatctctatcacttctttactagtccgtcttgaccccttctcatagcctccgcattaggtctgcctcctttgctctgacacatgtccagtcgagcccttcaggtgtattcccttgcccctgggcatttaccatcatttctgcctccttttctatctactcctattatttgtctcccagaccattccttgtcaccacaagtctgtgcctacccactttcccttaatacctcaactcttattatcatttctcttttcttgtctcctctacttattggggtgttggagatttggggtacaaagacacaggttttgatgattagaacaagggatccccatctcagcccttgagggatttctcatcctagtaaaaatttcccgtttctcagccatgttgctctgcctcttgcatctgcctcccagaatcattcttcaccaagtccagacagtatgtgtgtgtgtgtttctagagttgttcctaagttccctgctgccaggagaaagatgccctctgaagtctaacccgcctcccttggctgcagcctgaaccagccctttccccaaatgcttatgtgtatcaacagatttctcctctgggtataccaagtgtctaagtgcggtgggcatgttgcctgcaatgtctgtagtttcagaggctaggtattggtgatctctgtatctagagaacattagttagtctctgagatgggttgagatagagtttcaaagtatgtggtttctaaatggtggacattctgagggttcatcgctcactgtgatctggaggttgggtaaatttgagagacatatttatagacagaaaagggctgaatttgcaaaactctgctactcagtgcattctgttggaatgaagctcaaagaccagttctcctgcagtatactcatggttatcccataaaggtgacagagtttgatcttttttccatctaaaatctgataccttaagcctaatttctagctctttgctgtcgccaatgtgacatctctcttacttcaatagggcctgtgtggcattggggtttaaaggagaggcagtttgcagggagagcggcatggcaagaacaacagagctggggaaggaggaccctggtctcatctcagccataggcgacacttggtctactgttctctcttctcaaagttttgttcccatctccagctcttgtctttggaggcccctctgtgtcaccaggcctggatattccattctttccccctgacatctttcttcctcaagctcctcactgtgccttgagaaggctcctgacctatggagtggcttccatcctgtccactgagactaggtggggtgaggtggtgggggcagtgttgaatctctgggcactgaatgggagaagagataaatttggtctctacttgtccaaacaagggcatatttcccaccttctgccctggggcctccacagccagatgccgacaaaagccatcttctccttaccaccagaagaaccagaactttccctaaaggatgagcagggttgaactaggggaggagggcacagaggagggaagagttgggaggggaggccctctcatgtctctgactgtgaacaggtaagctccccgacttcttcttttctagatatttagccctcagaatctcatgatcccaatgttcctacacacacaccccatccttctttcccacagccatgtagctttcctcatactcttttatagaggggtggtgccaccttccaagtccttgtcttctgcagctatttggatgccttcctctacccagatatctgacaccaacttctctgtttttctcctgccaattttgcggcacctctaccttattttcctgaagtagatggagagctccttcatctttctctgcccccaaacgtgtaccttctctgtcatataattcccatccctgaacctctgcatttcttcccccaagtctccagagccttctgtgatgtgatcctctcctcttttcccctttgtataaatgcttgtcttgtgttcctttagagttgccaggtgtctcactttcaactgtgatctcctgaaggccggtagggtccccttctcactttgtggactctcttcttgccattttaggcctctgcttccaaatgcatagagcctcccttactgtttctgtgtgtctctgtcctccagatgtacggggaccctctatgcaccgaacccaatacgttcattccccgtatgatcgtcctggttggaaccctcggttctgcatcatctcgg

SEQ ID NO: 14322 - DNA, 161 bp, Homo sapiens
tgaaaacataggggtgaaaagagaagccaagaagatgtggggggataatttggtgggggactcagagtatgatgtacggggaccctctatgcaccgaacccaatacgttcattccccgtatgatcgtcctggttggaaccctcggttctgcatcatctcgg

SEQ ID NO: 14323 - DNA, 327 bp, Homo sapiens
ctgggttaaaggcttgaaggcccctgttaggagtctaggggtgagattctcttctctctgatcccagaggacgttaacttctactgcaggtgagaaacaaaataggaggatggtggggactgtcctgggaggagggggtggtccatggcttgtggtgtgggctggctataggggaggccactgctaggggactggcatccaggcccccttgaagcgtctcaataagtccgcgctctcctttttggtgtcttgcaggagaggcagcttccccccttgggtccaacaaacccgcgtgtgacgctggccccaccgtggaatggcctggcc

SEQ ID NO: 14324 - DNA, 161 bp, Homo sapiens
ctgggttaaaggcttgaaggcccctgttaggagtctaggggtgagattctcttctctctgatcccagaggacgttaacttctactgcaggagaggcagcttccccccttgggtccaacaaacccgcgtgtgacgctggccccaccgtggaatggcctggcc

SEQ ID NO: 14325 - DNA, 176 bp, Homo sapiens
cgacttgggccgagagctctccacactgcatgccctactctgggaggtgctgccccagctcagcaaggtcagcagatcccctctttgccctatccccagatggctccagaggttcctggagcctgagaaactaccctttgaagattttttttctccccttgtttctcgaggtgtca

SEQ ID NO: 14326 - DNA, 100 bp, Homo sapiens
cgacttgggccgagagctctccacactgcatgccctactctgggaggtgctgccccagctcagcaagattttttttctccccttgtttctcgaggtgtca

SEQ ID NO: 14327 - DNA, 1056 bp, Homo sapiens
gactggagcagagtgagaagaggctaaggcagcagcaggcagagaaggattcccagatcaagagcatcattggcaggtgaggggcggcctggggagggggttgtgagggagagcctgaggctggagagagcaagtgggtgagctactccgctgactcccatccccaaactcaggagcccaccaggagagcccaccactctcctccccaggaagccacccactcactcatcaccagatggagagaaaccccaacctgcttagtgcattaaatatctctttaccaaaccctgacctctcttctgatagagtagcttcggaagcccttggaaaatgtacctgttcctgtccaaccatcactgcatttgcatttaccctaggccagagctccccactagttattctcaacttaacctgtgatgttcactccaaacctaagcagggctccctagccagagtaggccctgcccttcctgggtggaccctccctctctagccttggaaaggtgttctgttagaaagggtcttttagcctgtgtatgttttcagctgctccagcaagtcctgggctccaaagagggtatcctcagcaaagaggtcaattatcttcagagtggtggggtcggggtgggggggaccctgggcgcactccaaccagagccacctccattttgatccattctaaatgtattttatgtaagatttaattagaagaaaagggcttcttgaaatattttttgaaaaccactgctctaattgatatcctttatgataaatcacctcgaggatcttcacagtgaggtgacatgggggatgcagaagccaggtcctcagccatggaaggtctggggaaggggcactgctgtcctgattgggacgatggaggcctggaggtgtctggatggtagaagtctttgaggcacagaaagctgccttagcagggaggtgtaagggttcctgggaggaaggtggagagcatgatcctgaggaacagggagtcttgcatcacggcaatggagggactctgattctaagggataaggatgcctgaggtttttc

SEQ ID NO: 14328 - DNA, 100 bp, Homo sapiens
gactggagcagagtgagaagaggctaaggcagcagcaggcagagaaggattcccagatcaagagcatcattggcagggataaggatgcctgaggtttttc

SEQ ID NO: 14329 - DNA, 343 bp, Homo sapiens
tgaaggtcaagggaaaactggattcaggaagtagctaacttctgaggagttgcagaagagctgagtagggtttgggagaattctccggaaggtgtttcaagacaaatggagggagaaaagagggtgggacggcaaagaatgagagagagagactgggggagagaagggagagatccagtcaccaagtgtggaggggccggggcagaaaaagtgggcaggcttagggggaaaaggaggcccgcccttcctgggaggaggcggaggggggaagagggaggggaggggcggcgtgggccagggaggtctgacacacccccacctcccctagatacaccccctactg

SEQ ID NO: 14330 - DNA, 79 bp, Homo sapiens
tgaaggtcaagggaaaactggattcaggaagtagctaacttctgaggagttgcagaagagctgaatacaccccctactg

SEQ ID NO: 14331 - DNA, 221 bp, Homo sapiens
cacactgcatgccctactctgggaggtgctgccccagctcagcaaggtcagcagatcccctctttgccctatccccagatggctccagaggttcctggagcctgagaaactaccctttgaagattttttttctccccttgtttctcgaggtgtcaccactactatcccaactcaggccccctccacctgcaccctcagaggccctcttagagctgggcact

SEQ ID NO: 14332 - DNA, 118 bp, Homo sapiens
cacactgcatgccctactctgggaggtgctgccccagctcagcaaggtgtcaccactactatcccaactcaggccccctccacctgcaccctcagaggccctcttagagctgggcact

SEQ ID NO: 14333 - DNA, 5525 bp, Homo sapiens
gtttccatgggaacagtgaggggagatgaaggcagagaacagagatctgcagccaaggtgcagagagacgccctcagcccccggaaaccccctcgtcactgcccccttccacttcatttcccttcccggacctagcgatccaggttccccattcctccaacccccaggtgacccctttttcccaccagctccccctcccttcaggaattcaagctaccagtttctctcccttagagagccagtgacctgtccccatcctttggctccttccagccttctgataggtccaggccctactagccttgtgggccggtttggggaccttgggtgggtgggtgggtggtcagggatgtgtgtcattgtcatggaaaccccataccatcggggtgtgtgggtagcacatctctgtgaggcaaagtcaggtggtggtggagtgtatacagagaatgtgtgtgatgtctgtcacatctgtgtgtatatgtatatgtgtgtatgtcatgttcatgtctggggaagatgtgtgtgtttgtgtgcatgtgtgtacacctgcgtttccaggccagaatggtcacatgctcacagagcatgtttatcatgtgtcctgtggttggcagatctgcccacttattccccatctttctccttatcctgagtcctcagggtctaggggtctctggcgggggtctcccgtgtgttttgggtggggacaccgtgtgtgtttggagttgaggtggcatgtggaggttgctgtattggggttcagtaggggctgggaggggttccaggggcatatgtatttggggggagggcttagtgaaagttgatgggggtgaacgtttagggtcttcaggcagacatggaatgtgtaaagggcatggaggatgtgcagtggacataggggtcgttgggaccttggggacttggcaatgccaaggtgtttgctgaggctgtggactctccagcccgggagaggtcgccggacctttgaggggcattggaatcctgggctcctcctctgctgggtggagccgcgaaccctcgttctctccgcggttttgtgtgtgtgggggggtcctgctcaggaggggatggtgggtggcctggtttgttttgggggtccccttgcccccctcccccgtctctctcgcgctgtctccgggcgacagggctcgtgacagaggcggccacggcagcagcggtcgcctagcaacggcggcggggcccgggcaacggcggcagcggcgggagcggcggcggagggagccgttcccgcggccgtcaccgcgcggccgtcccggccgtcccgggccccgccgccgcccccaccgcgccgggcggcgcgagccgggccgtaccgccccctctccctccgcaccccgcccttcccccgcgcaggggcggggcccctcccccaccggggacacccctggcccccccggggggcggtgcgaggtaagggcggggccgggcggactaggagcgcgcgtagaggggggggcgccgcgcgcgtggggcgggggcgcgcgtgtgcgtgggcgcggggaggggggtggggaagccgcggtggcggcggcggcggcggcagctgctccctccgcatgttctcgctgcatcttccgagtggggggagttatggtaaccggagggggacagcggaggacgggagggtcggggaccggcctcgtgcggacagggtcttgagcacgcgggggcggccggtgtgtgtgggatcttggagcccctggtggaaggggcagcccgtgtgtccgcgtgtgtgttcgtgcccatgctcgtgtctcctgtgtgtcggtgccatgtgcacacgggggcccagttcctcgtgcacacatgtgcagccatccttgtgcaagtgtgtcctgtcttatcttgcctctgcctgtttcctgcctagggggctgttgggccagccacgggcttgtggggcagtccgcggccttgctggtccatgtcacctctgaccctgagcatgcatatccctggctggggctcacctcctgtcaggcttctgtgtgtgggaatgtgtggccctatgagcaggattttctgtgtccctggtggcaggtgtgtgtctttgcatgtgtgttccagcactggcctgagtatctgtgtcaatcccagcatgggtgtccagggcgtgtctggatgtgggtggtgtggctggggggagtaagtgtgtgaatgtgttccttggaattctactgtgtatgaaacacctttgggctgggcaggtgtaagccctgcttggtcagtaagtggggacagaaaagcttaaaaagggaagaaatggggtaaagaggaaaagtggggaggggataggagagaaggaatgagagaggcttgaagaagagagcagagagcagcaggccagggagaaagaatagctggagaatgggaatgtgggagaaagccaagccagacttagaagagagaacaggggataagagcttaagatggggaactggatagagatggtgggagaagaaggggtctgggagctggggaggcagtggggaggagagagtcaggccttctggtaaagtgatctctgaaagaagaaagggaagaagatgggagaaggcactggattcttgtaggccttgcaggatcaggcttggttttggatcagggaaggccactcaggcatacgggctggctcacagtgaggcctgtcatagcagggactgtcattagaggttcatatccccagcacagagctctgtctcccatttctctgctctgtgtccaaccctgttcttcgcccttctctggcaacctccctcctctggctccccttgagagctgccagctgggtgtggagaggaagaaaggccaaagggaaggttagggatttggagggcagggggagattctgtgggtgatggcaagattagagatgttggaggggcaggagtccaagcccttgctgtgtgtgtgtgagtgccattgtgtgtgtacacagggtgtgtacatgtgtgggtgtgtgcacaatgcctgtgttacgggtttgtgtaggtggctgttatgtgtgtgcatgcgtgtatacatcgtgcaggcatgggacatggagacccaggatcacagtttgtgcttttcaggtttgctgtgtgtgtgtgtacacgggtgtgtgttgttttctctgtacatgtcactgcatgcagcattaataacaggatgttctgtgtttctgtcactctgccccccctttcctctgtgtttctgctattcttttcctgcggcaacaaaagtgtttaataagcatatgtgtatgtggcctctgtgtacctgtgacttatgagtgagttcatggatcttagttcttggtaatatgtgtaaggttatattacttccaagaaccaagcaagccaattagcaaatttgttcttctgttaatgctttagttccaaagcggaattttaatgcatttaaagttagactttatgcctttattagatgagcttgcacatgaaaataatggctgagctcggttccctgaaatgagagtgaggcagccatacctgagaaatgcagaaaaaatgttactagggaagagatatcctgaaccattggatgcattgcttagtgtgtaccagaaggataattaacacatttgctcctggtttttctttactctggtggcaatctcggatgcctgtgttagagtgagagaagggctgggggaggaaagggggttgtcctgagacagagtggatgtggttgtacttttcacgtgaatgaaaggatgtttgtgcttctgagatatggggatacctttctgtggtcaggatcatggtgtactcaagcatgtatttcaggggttaaactggaattcccctgcatggggatatgtgtgtcttagggttataggtccatttctgtagtgtgctgtccacatgattgcccaagagacttgggccacaaagtccacaccagcagctctcatgtgggtcactgggttcaagtatgtactcccttgttgcagagctcacatatgtcaaagcatgtatcctgtggggtgtgtgggcctcagggtctcagaatgtggatccgtgctatgcccgtgctcacagttgtctgtatgtctcaaaagcacatagatccccagttatttttctgtattgtggttctcatatacacgtacctccatagctcagtatatgtttctgtactatacacctgttcctgagggagtgatagggttctcgtgtcatggggtccacatttttgtatgcaaacctcctaacacctgggttttacaggtaaagggaagctgaggactgattctagggcagtttgcaggcaatttgcaattctggaagcagacagtgaaaatataattgtggtcctcccttgttctgttctggaacctagagggttaacaggcagctcttccggtccacccccctccttccagcctgtagcttcttgttgccgtggagatggtggccccgccccgatgcagcacctgcccccccattggctgcagtggtgactgtggggctgaggggggagcccaggcctgggcagccattctggagctggagccggagcttggcatccccccacttacattctcttccagcccctcggcccctctaaattcccttgcagccgagcctcagcttcctttttcagcgcttgccatccctctaggctcttggcagactgagctgcatccgcattcacctcccctcctcctcctttccctatccttacttgggagtcccgagaacccccactgtccatccttcctgctccctgcccattcccctgcattctttgcttttcccctccccccaccaaccttctgagcccctgccactgcagtgcacgtggaaccggctccttctcccttccccccacctgccccttccttggattttctgtccccagcttctccccctgctactcttcacaggtctcttccaagacctccccctccagtccagggagggggtcatgggaggcagccctggccctccagacagacaggggttccaggaggtggggggcaggtggaagatgtgcccaccagggggaagaggaaagcctgcctatgggcaatgacctttaacccatctttccccccagctagccccttctggggtgggtgggcaccagggacctagcctccctggatctttggtgtccttcattactggggttttactgaccctctcagccatgctcccctgctgactgccagccccagtcatgggcctaaggcctcccaccccatccccctcagggggctcctgctcaggttccttgccccctccttcccgctgccagcctctccgccgtcgctgctcttcctgctgctttccggggggtaggtgaggccggagctgaggggcagagggaggtgggggcatgcactggggtcaggggtgggaacctgggttaacagcttcccttctggccccctccccaacttcccttctggccatttcctcccctccagaataccacttgggtcgctcgaggaggaagagtgtcccaggggg

SEQ ID NO: 14334 - DNA, 100 bp, Homo sapiens
gtttccatgggaacagtgaggggagatgaaggcagagaacagagatctgcagccaagaataccacttgggtcgctcgaggaggaagagtgtcccaggggg

SEQ ID NO: 14335 - DNA, 3970 bp, Homo sapiens
ggggaagccgcggtggcggcggcggcggcggcagctgctccctccgcatgttctcgctgcatcttccgagtggggggagttatggtaaccggagggggacagcggaggacgggagggtcggggaccggcctcgtgcggacagggtcttgagcacgcgggggcggccggtgtgtgtgggatcttggagcccctggtggaaggggcagcccgtgtgtccgcgtgtgtgttcgtgcccatgctcgtgtctcctgtgtgtcggtgccatgtgcacacgggggcccagttcctcgtgcacacatgtgcagccatccttgtgcaagtgtgtcctgtcttatcttgcctctgcctgtttcctgcctagggggctgttgggccagccacgggcttgtggggcagtccgcggccttgctggtccatgtcacctctgaccctgagcatgcatatccctggctggggctcacctcctgtcaggcttctgtgtgtgggaatgtgtggccctatgagcaggattttctgtgtccctggtggcaggtgtgtgtctttgcatgtgtgttccagcactggcctgagtatctgtgtcaatcccagcatgggtgtccagggcgtgtctggatgtgggtggtgtggctggggggagtaagtgtgtgaatgtgttccttggaattctactgtgtatgaaacacctttgggctgggcaggtgtaagccctgcttggtcagtaagtggggacagaaaagcttaaaaagggaagaaatggggtaaagaggaaaagtggggaggggataggagagaaggaatgagagaggcttgaagaagagagcagagagcagcaggccagggagaaagaatagctggagaatgggaatgtgggagaaagccaagccagacttagaagagagaacaggggataagagcttaagatggggaactggatagagatggtgggagaagaaggggtctgggagctggggaggcagtggggaggagagagtcaggccttctggtaaagtgatctctgaaagaagaaagggaagaagatgggagaaggcactggattcttgtaggccttgcaggatcaggcttggttttggatcagggaaggccactcaggcatacgggctggctcacagtgaggcctgtcatagcagggactgtcattagaggttcatatccccagcacagagctctgtctcccatttctctgctctgtgtccaaccctgttcttcgcccttctctggcaacctccctcctctggctccccttgagagctgccagctgggtgtggagaggaagaaaggccaaagggaaggttagggatttggagggcagggggagattctgtgggtgatggcaagattagagatgttggaggggcaggagtccaagcccttgctgtgtgtgtgtgagtgccattgtgtgtgtacacagggtgtgtacatgtgtgggtgtgtgcacaatgcctgtgttacgggtttgtgtaggtggctgttatgtgtgtgcatgcgtgtatacatcgtgcaggcatgggacatggagacccaggatcacagtttgtgcttttcaggtttgctgtgtgtgtgtgtacacgggtgtgtgttgttttctctgtacatgtcactgcatgcagcattaataacaggatgttctgtgtttctgtcactctgccccccctttcctctgtgtttctgctattcttttcctgcggcaacaaaagtgtttaataagcatatgtgtatgtggcctctgtgtacctgtgacttatgagtgagttcatggatcttagttcttggtaatatgtgtaaggttatattacttccaagaaccaagcaagccaattagcaaatttgttcttctgttaatgctttagttccaaagcggaattttaatgcatttaaagttagactttatgcctttattagatgagcttgcacatgaaaataatggctgagctcggttccctgaaatgagagtgaggcagccatacctgagaaatgcagaaaaaatgttactagggaagagatatcctgaaccattggatgcattgcttagtgtgtaccagaaggataattaacacatttgctcctggtttttctttactctggtggcaatctcggatgcctgtgttagagtgagagaagggctgggggaggaaagggggttgtcctgagacagagtggatgtggttgtacttttcacgtgaatgaaaggatgtttgtgcttctgagatatggggatacctttctgtggtcaggatcatggtgtactcaagcatgtatttcaggggttaaactggaattcccctgcatggggatatgtgtgtcttagggttataggtccatttctgtagtgtgctgtccacatgattgcccaagagacttgggccacaaagtccacaccagcagctctcatgtgggtcactgggttcaagtatgtactcccttgttgcagagctcacatatgtcaaagcatgtatcctgtggggtgtgtgggcctcagggtctcagaatgtggatccgtgctatgcccgtgctcacagttgtctgtatgtctcaaaagcacatagatccccagttatttttctgtattgtggttctcatatacacgtacctccatagctcagtatatgtttctgtactatacacctgttcctgagggagtgatagggttctcgtgtcatggggtccacatttttgtatgcaaacctcctaacacctgggttttacaggtaaagggaagctgaggactgattctagggcagtttgcaggcaatttgcaattctggaagcagacagtgaaaatataattgtggtcctcccttgttctgttctggaacctagagggttaacaggcagctcttccggtccacccccctccttccagcctgtagcttcttgttgccgtggagatggtggccccgccccgatgcagcacctgcccccccattggctgcagtggtgactgtggggctgaggggggagcccaggcctgggcagccattctggagctggagccggagcttggcatccccccacttacattctcttccagcccctcggcccctctaaattcccttgcagccgagcctcagcttcctttttcagcgcttgccatccctctaggctcttggcagactgagctgcatccgcattcacctcccctcctcctcctttccctatccttacttgggagtcccgagaacccccactgtccatccttcctgctccctgcccattcccctgcattctttgcttttcccctccccccaccaaccttctgagcccctgccactgcagtgcacgtggaaccggctccttctcccttccccccacctgccccttccttggattttctgtccccagcttctccccctgctactcttcacaggtctcttccaagacctccccctccagtccagggagggggtcatgggaggcagccctggccctccagacagacaggggttccaggaggtggggggcaggtggaagatgtgcccaccagggggaagaggaaagcctgcctatgggcaatgacctttaacccatctttccccccagctagccccttctggggtgggtgggcaccagggacctagcctccctggatctttggtgtccttcattactggggttttactgaccctctcagccatgctcccctgctgactgccagccccagtcatgggcctaaggcctcccaccccatccccctcagggggctcctgctcaggttccttgccccctccttcccgctgccagcctctccgccgtcgctgctcttcctgctgctttccggggggtaggtgaggccggagctgaggggcagagggaggtgggggcatgcactggggtcaggggtgggaacctgggttaacagcttcccttctggccccctccccaacttcccttctggccatttcctcccctccagaataccacttgggtcgctcgaggaggaagagtgtcccag

SEQ ID NO: 14336 - DNA, 123 bp, Homo sapiens
ggggaagccgcggtggcggcggcggcggcggcagctgctccctccgcatgttctcgctgcatcttccgagtggggggagttatgaataccacttgggtcgctcgaggaggaagagtgtcccag

SEQ ID NO: 14337 - DNA, 398 bp, Homo sapiens
agaatggaggaactgaaggtcaagggaaaactggattcaggaagtagctaacttctgaggagttgcagaagagctgagtagggtttgggagaattctccggaaggtgtttcaagacaaatggagggagaaaagagggtgggacggcaaagaatgagagagagagactgggggagagaagggagagatccagtcaccaagtgtggaggggccggggcagaaaaagtgggcaggcttagggggaaaaggaggcccgcccttcctgggaggaggcggaggggggaagagggaggggaggggcggcgtgggccagggaggtctgacacacccccacctcccctagatacaccccctactgatccgggaccggaggagcgagtccagtcgcaacaaactgctg

SEQ ID NO: 14338 - DNA, 100 bp, Homo sapiens
agaatggaggaactgaaggtcaagggaaaactggattcaggaaatacaccccctactgatccgggaccggaggagcgagtccagtcgcaacaaactgctg

SEQ ID NO: 14339 - DNA, 3877 bp, Homo sapiens
aatcatcatctcagggtctggagtctaagatatctgtaggtatggagaaccctttttagactggattttcagattttgatattgagcttctctctctgggggatctggggtcgttttttcctcaaatcaggagtctcttttcctctagattttggccctgtgtctcaaattaccccacagtggggggtggtgaagtatctttctctgtgggtctagggtctctctgtctcagggtctggggtctgcatctttaggacctctgtctctctctggtgtgtttttgagtcaggggtctctctctctctcacaatctgggcctcccggagtaggggtgggggctgcagagtctctccctcctcctcctcctcctgctctcttcgctctcgctcgctcccccgccccccctctctctcggctgccgctgctgccgttggctcttattctcctcctcctcctcctctctcctcctctctgcttctctctgctcctctctcctcctctctcctcctcctcctcctccacctcctcctccttctccccctctttctccccctctttctctcttctttctcccccgtccccccgccccctccccccaggcctgatgagcaggtctcgagcctccatccatcgggggagcatccccgcgatgtcctatgcccccttcagaggtacgtggtggggggagggggagggccatatggggggcaacagggggaggggcagggggcgggggagagtcggggccgagggaagggagcggctgaaatggagggagaggggaggaccgggaaggcaggggtgggagcaaccgggaaggagggattggaggccagagggataggggtagataagggatggaggggccaggaaatgggccttgaaagggggctgaagggaaaatgatgaaggggaaagaaagcgccagaaaggggtgggaaggtagaaggattgggttggggaaaaagctgcagaaataatttgggggtgggagctgagtgatgaggaaaacatcaaggaaatagagggacagagtcttgggagaggggctaggaaggagaaatgaaaacataggggtgaaaagagaagccaagaagatgtggggggataatttggtgggggactcagagtatggtaaggggcggaaaaagagaggaggatggagggagagaaggggccagatggagagagagggaggcagtggggggtggggggatggagggtccagatggagggaagagagaagagagagggaacggtgggggaggggagaccagggcagggggagggccaaattatgtgtgcttgggggggtggcagtacaagtaagatgaaatgatgggagtaggggacaggttaggatcctgccccagactctgaccctcttaaaggctcttgaccagtaaaatgtaacctctggggtcttaatgctgtcttcacttcatcacttttacccccttcccccacccctccaatccttatttccattccccctccctcctctgctgtccatcacctatatctttccccccatatggtgtccgttccttatatgagtcccccttctgtccttcccctatatcagtcccctctctggtgttcattgcctctctcttatctcttttctatgtggtcgctcccttatatctctatcacttctttactagtccgtcttgaccccttctcatagcctccgcattaggtctgcctcctttgctctgacacatgtccagtcgagcccttcaggtgtattcccttgcccctgggcatttaccatcatttctgcctccttttctatctactcctattatttgtctcccagaccattccttgtcaccacaagtctgtgcctacccactttcccttaatacctcaactcttattatcatttctcttttcttgtctcctctacttattggggtgttggagatttggggtacaaagacacaggttttgatgattagaacaagggatccccatctcagcccttgagggatttctcatcctagtaaaaatttcccgtttctcagccatgttgctctgcctcttgcatctgcctcccagaatcattcttcaccaagtccagacagtatgtgtgtgtgtgtttctagagttgttcctaagttccctgctgccaggagaaagatgccctctgaagtctaacccgcctcccttggctgcagcctgaaccagccctttccccaaatgcttatgtgtatcaacagatttctcctctgggtataccaagtgtctaagtgcggtgggcatgttgcctgcaatgtctgtagtttcagaggctaggtattggtgatctctgtatctagagaacattagttagtctctgagatgggttgagatagagtttcaaagtatgtggtttctaaatggtggacattctgagggttcatcgctcactgtgatctggaggttgggtaaatttgagagacatatttatagacagaaaagggctgaatttgcaaaactctgctactcagtgcattctgttggaatgaagctcaaagaccagttctcctgcagtatactcatggttatcccataaaggtgacagagtttgatcttttttccatctaaaatctgataccttaagcctaatttctagctctttgctgtcgccaatgtgacatctctcttacttcaatagggcctgtgtggcattggggtttaaaggagaggcagtttgcagggagagcggcatggcaagaacaacagagctggggaaggaggaccctggtctcatctcagccataggcgacacttggtctactgttctctcttctcaaagttttgttcccatctccagctcttgtctttggaggcccctctgtgtcaccaggcctggatattccattctttccccctgacatctttcttcctcaagctcctcactgtgccttgagaaggctcctgacctatggagtggcttccatcctgtccactgagactaggtggggtgaggtggtgggggcagtgttgaatctctgggcactgaatgggagaagagataaatttggtctctacttgtccaaacaagggcatatttcccaccttctgccctggggcctccacagccagatgccgacaaaagccatcttctccttaccaccagaagaaccagaactttccctaaaggatgagcagggttgaactaggggaggagggcacagaggagggaagagttgggaggggaggccctctcatgtctctgactgtgaacaggtaagctccccgacttcttcttttctagatatttagccctcagaatctcatgatcccaatgttcctacacacacaccccatccttctttcccacagccatgtagctttcctcatactcttttatagaggggtggtgccaccttccaagtccttgtcttctgcagctatttggatgccttcctctacccagatatctgacaccaacttctctgtttttctcctgccaattttgcggcacctctaccttattttcctgaagtagatggagagctccttcatctttctctgcccccaaacgtgtaccttctctgtcatataattcccatccctgaacctctgcatttcttcccccaagtctccagagccttctgtgatgtgatcctctcctcttttcccctttgtataaatgcttgtcttgtgttcctttagagttgccaggtgtctcactttcaactgtgatctcctgaaggccggtagggtccccttctcactttgtggactctcttcttgccattttaggcctctgcttccaaatgcatagagcctcccttactgtttctgtgtgtctctgtcctccagatgtacggggaccctctatgcaccgaacccaatacgttcattccccgtatgatcgtcctgg

SEQ ID NO: 14340 - DNA, 100 bp, Homo sapiens
aatcatcatctcagggtctggagtctaagatatctgtagatgtacggggaccctctatgcaccgaacccaatacgttcattccccgtatgatcgtcctgg

SEQ ID NO: 14341 - DNA, 238 bp, Homo sapiens
ttgccaggtgtctcactttcaactgtgatctcctgaaggccggtagggtccccttctcactttgtggactctcttcttgccattttaggcctctgcttccaaatgcatagagcctcccttactgtttctgtgtgtctctgtcctccagatgtacggggaccctctatgcaccgaacccaatacgttcattccccgtatgatcgtcctggttggaaccctcggttctgcatcatctcgg

SEQ ID NO: 14342 - DNA, 132 bp, Homo sapiens
ttgccaggtgtctcactttcaactgtgatctcctgaaggccgatgtacggggaccctctatgcaccgaacccaatacgttcattccccgtatgatcgtcctggttggaaccctcggttctgcatcatctcgg

SEQ ID NO: 14343 - DNA, 475 bp, Homo sapiens
ccgtgacaggctcggagggagagaagggggtaagggaggtgggaggttgggaggaaagcagggagaatggaggaactgaaggtcaagggaaaactggattcaggaagtagctaacttctgaggagttgcagaagagctgagtagggtttgggagaattctccggaaggtgtttcaagacaaatggagggagaaaagagggtgggacggcaaagaatgagagagagagactgggggagagaagggagagatccagtcaccaagtgtggaggggccggggcagaaaaagtgggcaggcttagggggaaaaggaggcccgcccttcctgggaggaggcggaggggggaagagggaggggaggggcggcgtgggccagggaggtctgacacacccccacctcccctagatacaccccctactgatccgggaccggaggagcgagtccagtcgcaacaaactgctgagacgcacagtctc

SEQ ID NO: 14344 - DNA, 100 bp, Homo sapiens
ccgtgacaggctcggagggagagaaggggatacaccccctactgatccgggaccggaggagcgagtccagtcgcaacaaactgctgagacgcacagtctc

SEQ ID NO: 14345 - DNA, 190 bp, Homo sapiens
gggggccatcggctgagatgcagggctacatgatgcgggacctcaacaggtgagcaccctgggacagccaggcctgtgccctaggagcccttctcctattctagatactcctcactgggccccacatgcatctctctagggcttgaaagaagggaggaaaaagcaccaagttctcaggggagacgataag

SEQ ID NO: 14346 - DNA, 100 bp, Homo sapiens
gggggccatcggctgagatgcagggctacatgatgcgggacctcaacagggcttgaaagaagggaggaaaaagcaccaagttctcaggggagacgataag

SEQ ID NO: 14347 - DNA, 4220 bp, Homo sapiens
ccgccccctctccctccgcaccccgcccttcccccgcgcaggggcggggcccctcccccaccggggacacccctggcccccccggggggcggtgcgaggtaagggcggggccgggcggactaggagcgcgcgtagaggggggggcgccgcgcgcgtggggcgggggcgcgcgtgtgcgtgggcgcggggaggggggtggggaagccgcggtggcggcggcggcggcggcagctgctccctccgcatgttctcgctgcatcttccgagtggggggagttatggtaaccggagggggacagcggaggacgggagggtcggggaccggcctcgtgcggacagggtcttgagcacgcgggggcggccggtgtgtgtgggatcttggagcccctggtggaaggggcagcccgtgtgtccgcgtgtgtgttcgtgcccatgctcgtgtctcctgtgtgtcggtgccatgtgcacacgggggcccagttcctcgtgcacacatgtgcagccatccttgtgcaagtgtgtcctgtcttatcttgcctctgcctgtttcctgcctagggggctgttgggccagccacgggcttgtggggcagtccgcggccttgctggtccatgtcacctctgaccctgagcatgcatatccctggctggggctcacctcctgtcaggcttctgtgtgtgggaatgtgtggccctatgagcaggattttctgtgtccctggtggcaggtgtgtgtctttgcatgtgtgttccagcactggcctgagtatctgtgtcaatcccagcatgggtgtccagggcgtgtctggatgtgggtggtgtggctggggggagtaagtgtgtgaatgtgttccttggaattctactgtgtatgaaacacctttgggctgggcaggtgtaagccctgcttggtcagtaagtggggacagaaaagcttaaaaagggaagaaatggggtaaagaggaaaagtggggaggggataggagagaaggaatgagagaggcttgaagaagagagcagagagcagcaggccagggagaaagaatagctggagaatgggaatgtgggagaaagccaagccagacttagaagagagaacaggggataagagcttaagatggggaactggatagagatggtgggagaagaaggggtctgggagctggggaggcagtggggaggagagagtcaggccttctggtaaagtgatctctgaaagaagaaagggaagaagatgggagaaggcactggattcttgtaggccttgcaggatcaggcttggttttggatcagggaaggccactcaggcatacgggctggctcacagtgaggcctgtcatagcagggactgtcattagaggttcatatccccagcacagagctctgtctcccatttctctgctctgtgtccaaccctgttcttcgcccttctctggcaacctccctcctctggctccccttgagagctgccagctgggtgtggagaggaagaaaggccaaagggaaggttagggatttggagggcagggggagattctgtgggtgatggcaagattagagatgttggaggggcaggagtccaagcccttgctgtgtgtgtgtgagtgccattgtgtgtgtacacagggtgtgtacatgtgtgggtgtgtgcacaatgcctgtgttacgggtttgtgtaggtggctgttatgtgtgtgcatgcgtgtatacatcgtgcaggcatgggacatggagacccaggatcacagtttgtgcttttcaggtttgctgtgtgtgtgtgtacacgggtgtgtgttgttttctctgtacatgtcactgcatgcagcattaataacaggatgttctgtgtttctgtcactctgccccccctttcctctgtgtttctgctattcttttcctgcggcaacaaaagtgtttaataagcatatgtgtatgtggcctctgtgtacctgtgacttatgagtgagttcatggatcttagttcttggtaatatgtgtaaggttatattacttccaagaaccaagcaagccaattagcaaatttgttcttctgttaatgctttagttccaaagcggaattttaatgcatttaaagttagactttatgcctttattagatgagcttgcacatgaaaataatggctgagctcggttccctgaaatgagagtgaggcagccatacctgagaaatgcagaaaaaatgttactagggaagagatatcctgaaccattggatgcattgcttagtgtgtaccagaaggataattaacacatttgctcctggtttttctttactctggtggcaatctcggatgcctgtgttagagtgagagaagggctgggggaggaaagggggttgtcctgagacagagtggatgtggttgtacttttcacgtgaatgaaaggatgtttgtgcttctgagatatggggatacctttctgtggtcaggatcatggtgtactcaagcatgtatttcaggggttaaactggaattcccctgcatggggatatgtgtgtcttagggttataggtccatttctgtagtgtgctgtccacatgattgcccaagagacttgggccacaaagtccacaccagcagctctcatgtgggtcactgggttcaagtatgtactcccttgttgcagagctcacatatgtcaaagcatgtatcctgtggggtgtgtgggcctcagggtctcagaatgtggatccgtgctatgcccgtgctcacagttgtctgtatgtctcaaaagcacatagatccccagttatttttctgtattgtggttctcatatacacgtacctccatagctcagtatatgtttctgtactatacacctgttcctgagggagtgatagggttctcgtgtcatggggtccacatttttgtatgcaaacctcctaacacctgggttttacaggtaaagggaagctgaggactgattctagggcagtttgcaggcaatttgcaattctggaagcagacagtgaaaatataattgtggtcctcccttgttctgttctggaacctagagggttaacaggcagctcttccggtccacccccctccttccagcctgtagcttcttgttgccgtggagatggtggccccgccccgatgcagcacctgcccccccattggctgcagtggtgactgtggggctgaggggggagcccaggcctgggcagccattctggagctggagccggagcttggcatccccccacttacattctcttccagcccctcggcccctctaaattcccttgcagccgagcctcagcttcctttttcagcgcttgccatccctctaggctcttggcagactgagctgcatccgcattcacctcccctcctcctcctttccctatccttacttgggagtcccgagaacccccactgtccatccttcctgctccctgcccattcccctgcattctttgcttttcccctccccccaccaaccttctgagcccctgccactgcagtgcacgtggaaccggctccttctcccttccccccacctgccccttccttggattttctgtccccagcttctccccctgctactcttcacaggtctcttccaagacctccccctccagtccagggagggggtcatgggaggcagccctggccctccagacagacaggggttccaggaggtggggggcaggtggaagatgtgcccaccagggggaagaggaaagcctgcctatgggcaatgacctttaacccatctttccccccagctagccccttctggggtgggtgggcaccagggacctagcctccctggatctttggtgtccttcattactggggttttactgaccctctcagccatgctcccctgctgactgccagccccagtcatgggcctaaggcctcccaccccatccccctcagggggctcctgctcaggttccttgccccctccttcccgctgccagcctctccgccgtcgctgctcttcctgctgctttccggggggtaggtgaggccggagctgaggggcagagggaggtgggggcatgcactggggtcaggggtgggaacctgggttaacagcttcccttctggccccctccccaacttcccttctggccatttcctcccctccagaataccacttgggtcgctcgaggaggaagagtgtcccaggggggaagcagtacagcatggagggtgcccctgctgcgcccttccggccctcg

SEQ ID NO: 14348 - DNA, 190 bp, Homo sapiens
ccgccccctctccctccgcaccccgcccttcccccgcgcaggggcggggcccctcccccaccggggacacccctggcccccccggggggcggtgcgagaataccacttgggtcgctcgaggaggaagagtgtcccaggggggaagcagtacagcatggagggtgcccctgctgcgcccttccggccctcg

SEQ ID NO: 14349 - DNA, 736 bp, Homo sapiens
gggaggagggcacagaggagggaagagttgggaggggaggccctctcatgtctctgactgtgaacaggtaagctccccgacttcttcttttctagatatttagccctcagaatctcatgatcccaatgttcctacacacacaccccatccttctttcccacagccatgtagctttcctcatactcttttatagaggggtggtgccaccttccaagtccttgtcttctgcagctatttggatgccttcctctacccagatatctgacaccaacttctctgtttttctcctgccaattttgcggcacctctaccttattttcctgaagtagatggagagctccttcatctttctctgcccccaaacgtgtaccttctctgtcatataattcccatccctgaacctctgcatttcttcccccaagtctccagagccttctgtgatgtgatcctctcctcttttcccctttgtataaatgcttgtcttgtgttcctttagagttgccaggtgtctcactttcaactgtgatctcctgaaggccggtagggtccccttctcactttgtggactctcttcttgccattttaggcctctgcttccaaatgcatagagcctcccttactgtttctgtgtgtctctgtcctccagatgtacggggaccctctatgcaccgaacccaatacgttcattccccgtatgatcgtcctggttggaaccctcggttctgcatcatctcgg

SEQ ID NO: 14350 - DNA, 157 bp, Homo sapiens
gggaggagggcacagaggagggaagagttgggaggggaggccctctcatgtctctgactgtgaacagatgtacggggaccctctatgcaccgaacccaatacgttcattccccgtatgatcgtcctggttggaaccctcggttctgcatcatctcgg

SEQ ID NO: 14351 - DNA, 5199 bp, Homo sapiens
atccaggttccccattcctccaacccccaggtgacccctttttcccaccagctccccctcccttcaggaattcaagctaccagtttctctcccttagagagccagtgacctgtccccatcctttggctccttccagccttctgataggtccaggccctactagccttgtgggccggtttggggaccttgggtgggtgggtgggtggtcagggatgtgtgtcattgtcatggaaaccccataccatcggggtgtgtgggtagcacatctctgtgaggcaaagtcaggtggtggtggagtgtatacagagaatgtgtgtgatgtctgtcacatctgtgtgtatatgtatatgtgtgtatgtcatgttcatgtctggggaagatgtgtgtgtttgtgtgcatgtgtgtacacctgcgtttccaggccagaatggtcacatgctcacagagcatgtttatcatgtgtcctgtggttggcagatctgcccacttattccccatctttctccttatcctgagtcctcagggtctaggggtctctggcgggggtctcccgtgtgttttgggtggggacaccgtgtgtgtttggagttgaggtggcatgtggaggttgctgtattggggttcagtaggggctgggaggggttccaggggcatatgtatttggggggagggcttagtgaaagttgatgggggtgaacgtttagggtcttcaggcagacatggaatgtgtaaagggcatggaggatgtgcagtggacataggggtcgttgggaccttggggacttggcaatgccaaggtgtttgctgaggctgtggactctccagcccgggagaggtcgccggacctttgaggggcattggaatcctgggctcctcctctgctgggtggagccgcgaaccctcgttctctccgcggttttgtgtgtgtgggggggtcctgctcaggaggggatggtgggtggcctggtttgttttgggggtccccttgcccccctcccccgtctctctcgcgctgtctccgggcgacagggctcgtgacagaggcggccacggcagcagcggtcgcctagcaacggcggcggggcccgggcaacggcggcagcggcgggagcggcggcggagggagccgttcccgcggccgtcaccgcgcggccgtcccggccgtcccgggccccgccgccgcccccaccgcgccgggcggcgcgagccgggccgtaccgccccctctccctccgcaccccgcccttcccccgcgcaggggcggggcccctcccccaccggggacacccctggcccccccggggggcggtgcgaggtaagggcggggccgggcggactaggagcgcgcgtagaggggggggcgccgcgcgcgtggggcgggggcgcgcgtgtgcgtgggcgcggggaggggggtggggaagccgcggtggcggcggcggcggcggcagctgctccctccgcatgttctcgctgcatcttccgagtggggggagttatggtaaccggagggggacagcggaggacgggagggtcggggaccggcctcgtgcggacagggtcttgagcacgcgggggcggccggtgtgtgtgggatcttggagcccctggtggaaggggcagcccgtgtgtccgcgtgtgtgttcgtgcccatgctcgtgtctcctgtgtgtcggtgccatgtgcacacgggggcccagttcctcgtgcacacatgtgcagccatccttgtgcaagtgtgtcctgtcttatcttgcctctgcctgtttcctgcctagggggctgttgggccagccacgggcttgtggggcagtccgcggccttgctggtccatgtcacctctgaccctgagcatgcatatccctggctggggctcacctcctgtcaggcttctgtgtgtgggaatgtgtggccctatgagcaggattttctgtgtccctggtggcaggtgtgtgtctttgcatgtgtgttccagcactggcctgagtatctgtgtcaatcccagcatgggtgtccagggcgtgtctggatgtgggtggtgtggctggggggagtaagtgtgtgaatgtgttccttggaattctactgtgtatgaaacacctttgggctgggcaggtgtaagccctgcttggtcagtaagtggggacagaaaagcttaaaaagggaagaaatggggtaaagaggaaaagtggggaggggataggagagaaggaatgagagaggcttgaagaagagagcagagagcagcaggccagggagaaagaatagctggagaatgggaatgtgggagaaagccaagccagacttagaagagagaacaggggataagagcttaagatggggaactggatagagatggtgggagaagaaggggtctgggagctggggaggcagtggggaggagagagtcaggccttctggtaaagtgatctctgaaagaagaaagggaagaagatgggagaaggcactggattcttgtaggccttgcaggatcaggcttggttttggatcagggaaggccactcaggcatacgggctggctcacagtgaggcctgtcatagcagggactgtcattagaggttcatatccccagcacagagctctgtctcccatttctctgctctgtgtccaaccctgttcttcgcccttctctggcaacctccctcctctggctccccttgagagctgccagctgggtgtggagaggaagaaaggccaaagggaaggttagggatttggagggcagggggagattctgtgggtgatggcaagattagagatgttggaggggcaggagtccaagcccttgctgtgtgtgtgtgagtgccattgtgtgtgtacacagggtgtgtacatgtgtgggtgtgtgcacaatgcctgtgttacgggtttgtgtaggtggctgttatgtgtgtgcatgcgtgtatacatcgtgcaggcatgggacatggagacccaggatcacagtttgtgcttttcaggtttgctgtgtgtgtgtgtacacgggtgtgtgttgttttctctgtacatgtcactgcatgcagcattaataacaggatgttctgtgtttctgtcactctgccccccctttcctctgtgtttctgctattcttttcctgcggcaacaaaagtgtttaataagcatatgtgtatgtggcctctgtgtacctgtgacttatgagtgagttcatggatcttagttcttggtaatatgtgtaaggttatattacttccaagaaccaagcaagccaattagcaaatttgttcttctgttaatgctttagttccaaagcggaattttaatgcatttaaagttagactttatgcctttattagatgagcttgcacatgaaaataatggctgagctcggttccctgaaatgagagtgaggcagccatacctgagaaatgcagaaaaaatgttactagggaagagatatcctgaaccattggatgcattgcttagtgtgtaccagaaggataattaacacatttgctcctggtttttctttactctggtggcaatctcggatgcctgtgttagagtgagagaagggctgggggaggaaagggggttgtcctgagacagagtggatgtggttgtacttttcacgtgaatgaaaggatgtttgtgcttctgagatatggggatacctttctgtggtcaggatcatggtgtactcaagcatgtatttcaggggttaaactggaattcccctgcatggggatatgtgtgtcttagggttataggtccatttctgtagtgtgctgtccacatgattgcccaagagacttgggccacaaagtccacaccagcagctctcatgtgggtcactgggttcaagtatgtactcccttgttgcagagctcacatatgtcaaagcatgtatcctgtggggtgtgtgggcctcagggtctcagaatgtggatccgtgctatgcccgtgctcacagttgtctgtatgtctcaaaagcacatagatccccagttatttttctgtattgtggttctcatatacacgtacctccatagctcagtatatgtttctgtactatacacctgttcctgagggagtgatagggttctcgtgtcatggggtccacatttttgtatgcaaacctcctaacacctgggttttacaggtaaagggaagctgaggactgattctagggcagtttgcaggcaatttgcaattctggaagcagacagtgaaaatataattgtggtcctcccttgttctgttctggaacctagagggttaacaggcagctcttccggtccacccccctccttccagcctgtagcttcttgttgccgtggagatggtggccccgccccgatgcagcacctgcccccccattggctgcagtggtgactgtggggctgaggggggagcccaggcctgggcagccattctggagctggagccggagcttggcatccccccacttacattctcttccagcccctcggcccctctaaattcccttgcagccgagcctcagcttcctttttcagcgcttgccatccctctaggctcttggcagactgagctgcatccgcattcacctcccctcctcctcctttccctatccttacttgggagtcccgagaacccccactgtccatccttcctgctccctgcccattcccctgcattctttgcttttcccctccccccaccaaccttctgagcccctgccactgcagtgcacgtggaaccggctccttctcccttccccccacctgccccttccttggattttctgtccccagcttctccccctgctactcttcacaggtctcttccaagacctccccctccagtccagggagggggtcatgggaggcagccctggccctccagacagacaggggttccaggaggtggggggcaggtggaagatgtgcccaccagggggaagaggaaagcctgcctatgggcaatgacctttaacccatctttccccccagctagccccttctggggtgggtgggcaccagggacctagcctccctggatctttggtgtccttcattactggggttttactgaccctctcagccatgctcccctgctgactgccagccccagtcatgggcctaaggcctcccaccccatccccctcagggggctcctgctcaggttccttgccccctccttcccgctgccagcctctccgccgtcgctgctcttcctg

SEQ ID NO: 14352 - DNA, 100 bp, Homo sapiens
atccaggttccccattcctccaacccccagggggctcctgctcaggttccttgccccctccttcccgctgccagcctctccgccgtcgctgctcttcctg

SEQ ID NO: 14353 - DNA, 21851 bp, Homo sapiens
ctttaggacctctgtctctctctggtgtgtttttgagtcaggggtctctctctctctcacaatctgggcctcccggagtaggggtgggggctgcagagtctctccctcctcctcctcctcctgctctcttcgctctcgctcgctcccccgccccccctctctctcggctgccgctgctgccgttggctcttattctcctcctcctcctcctctctcctcctctctgcttctctctgctcctctctcctcctctctcctcctcctcctcctccacctcctcctccttctccccctctttctccccctctttctctcttctttctcccccgtccccccgccccctccccccaggcctgatgagcaggtctcgagcctccatccatcgggggagcatccccgcgatgtcctatgcccccttcagaggtacgtggtggggggagggggagggccatatggggggcaacagggggaggggcagggggcgggggagagtcggggccgagggaagggagcggctgaaatggagggagaggggaggaccgggaaggcaggggtgggagcaaccgggaaggagggattggaggccagagggataggggtagataagggatggaggggccaggaaatgggccttgaaagggggctgaagggaaaatgatgaaggggaaagaaagcgccagaaaggggtgggaaggtagaaggattgggttggggaaaaagctgcagaaataatttgggggtgggagctgagtgatgaggaaaacatcaaggaaatagagggacagagtcttgggagaggggctaggaaggagaaatgaaaacataggggtgaaaagagaagccaagaagatgtggggggataatttggtgggggactcagagtatggtaaggggcggaaaaagagaggaggatggagggagagaaggggccagatggagagagagggaggcagtggggggtggggggatggagggtccagatggagggaagagagaagagagagggaacggtgggggaggggagaccagggcagggggagggccaaattatgtgtgcttgggggggtggcagtacaagtaagatgaaatgatgggagtaggggacaggttaggatcctgccccagactctgaccctcttaaaggctcttgaccagtaaaatgtaacctctggggtcttaatgctgtcttcacttcatcacttttacccccttcccccacccctccaatccttatttccattccccctccctcctctgctgtccatcacctatatctttccccccatatggtgtccgttccttatatgagtcccccttctgtccttcccctatatcagtcccctctctggtgttcattgcctctctcttatctcttttctatgtggtcgctcccttatatctctatcacttctttactagtccgtcttgaccccttctcatagcctccgcattaggtctgcctcctttgctctgacacatgtccagtcgagcccttcaggtgtattcccttgcccctgggcatttaccatcatttctgcctccttttctatctactcctattatttgtctcccagaccattccttgtcaccacaagtctgtgcctacccactttcccttaatacctcaactcttattatcatttctcttttcttgtctcctctacttattggggtgttggagatttggggtacaaagacacaggttttgatgattagaacaagggatccccatctcagcccttgagggatttctcatcctagtaaaaatttcccgtttctcagccatgttgctctgcctcttgcatctgcctcccagaatcattcttcaccaagtccagacagtatgtgtgtgtgtgtttctagagttgttcctaagttccctgctgccaggagaaagatgccctctgaagtctaacccgcctcccttggctgcagcctgaaccagccctttccccaaatgcttatgtgtatcaacagatttctcctctgggtataccaagtgtctaagtgcggtgggcatgttgcctgcaatgtctgtagtttcagaggctaggtattggtgatctctgtatctagagaacattagttagtctctgagatgggttgagatagagtttcaaagtatgtggtttctaaatggtggacattctgagggttcatcgctcactgtgatctggaggttgggtaaatttgagagacatatttatagacagaaaagggctgaatttgcaaaactctgctactcagtgcattctgttggaatgaagctcaaagaccagttctcctgcagtatactcatggttatcccataaaggtgacagagtttgatcttttttccatctaaaatctgataccttaagcctaatttctagctctttgctgtcgccaatgtgacatctctcttacttcaatagggcctgtgtggcattggggtttaaaggagaggcagtttgcagggagagcggcatggcaagaacaacagagctggggaaggaggaccctggtctcatctcagccataggcgacacttggtctactgttctctcttctcaaagttttgttcccatctccagctcttgtctttggaggcccctctgtgtcaccaggcctggatattccattctttccccctgacatctttcttcctcaagctcctcactgtgccttgagaaggctcctgacctatggagtggcttccatcctgtccactgagactaggtggggtgaggtggtgggggcagtgttgaatctctgggcactgaatgggagaagagataaatttggtctctacttgtccaaacaagggcatatttcccaccttctgccctggggcctccacagccagatgccgacaaaagccatcttctccttaccaccagaagaaccagaactttccctaaaggatgagcagggttgaactaggggaggagggcacagaggagggaagagttgggaggggaggccctctcatgtctctgactgtgaacaggtaagctccccgacttcttcttttctagatatttagccctcagaatctcatgatcccaatgttcctacacacacaccccatccttctttcccacagccatgtagctttcctcatactcttttatagaggggtggtgccaccttccaagtccttgtcttctgcagctatttggatgccttcctctacccagatatctgacaccaacttctctgtttttctcctgccaattttgcggcacctctaccttattttcctgaagtagatggagagctccttcatctttctctgcccccaaacgtgtaccttctctgtcatataattcccatccctgaacctctgcatttcttcccccaagtctccagagccttctgtgatgtgatcctctcctcttttcccctttgtataaatgcttgtcttgtgttcctttagagttgccaggtgtctcactttcaactgtgatctcctgaaggccggtagggtccccttctcactttgtggactctcttcttgccattttaggcctctgcttccaaatgcatagagcctcccttactgtttctgtgtgtctctgtcctccagatgtacggggaccctctatgcaccgaacccaatacgttcattccccgtatgatcgtcctggttggaaccctcggttctgcatcatctcggggaaccagctgctcatgctggatgaggatgaggtgagtgtggtgagaaggctgggaaaacgcatgtgggagaatggggagagtcctcattagtgaaggggagagagacacaaagaaggcagacaaagaagaaacatttgcaaatggcaggagggtggccattgagacttgggttggagtgtgacaagaggggtagtcattctctcatcttgggcagggagtctttgagggttatgagctgtgttggggaggagatgtggttctgaagatttcgggggtggggaggctcctgttttcacactgtccatattgtaggataggttagaatggggaaggggaactgaagggtttggagaaggggtgaagacatggaaggccctcccaaccaaagcaatcctcaggacccctctctgctttgcccactgagcaagactcccagtcctttctccatcagggggcagagtgcaagaagagaaattgcaggacgcagagaaaaggcaggggatagaggaggttttaggtagctggaggatactgggaaagaagactgaggtcagtggatcttggcatgatggggtgaagactgggagagtgattgagatcaaggtttagagagacactgagagggcttctgcaagggagtggttggacatcaggaaggaatataagggaggggaactgggagtatgtggagttatctaaaggagtacaagtggagtaggggcagggactagccagagtaaaggagatgaaacggacagaggcctcttatgggaggtggtggccaggtatggagatctgagagccagggaagtgtgggttctgatttgggagctgggtcagcaggagtgtccattggaggaaatagaggataaaaactggaatggtgccccacaagtgtgagtcagggaatgggggtgatttgggggacaagctttaaaaaatggtagggtagcctggaaaaccaaacgtggtgagagatggaccctgaaagttattgggaatggtgtgatgaggaagggttagaatttgagtcagggctaactagagtgtcaagggacctatgggggcaggtgagagtgtggagagatggctgggtagacagcttccaggccacagagtaaagtagaggtgttaaggagaggatatggtgactttgaaaggagaggtggcttggggagtctaagttttggacaccattgggagacatttgagtgactgtggtcaaacccctagatcaaggtttggagtctgtaggagaaatgggggaaactggaacccagagtggggactgttatagggatgaagagggaagacaatggattggggtaatgaaggaatgacagagatagggacagactgaagggaccagtggccagcaagttgaggggcaataggaatggccggtctggagcaggaagggcgtgtgtgtgggaggaggagtagatagaattgggaaaatgagcagcctgaacagacgcagggagttggaattggatgggtggtggaactggggctgggggatagtgaggggtctgttcctgtggctctttgtagaggtggaggagactgcaggggtggaggtgtatggaggtagggatggaggtggacagggggagctgggtgtgaagcttagggaaaggtgatggctgaggggaagaagggaactgagagatgctgggtcgggtgatggaaggagatgaaaggtgggggaaggtgaccaggccctctggcgggaggggaggttgggtcccagtctggccgcaagccgggccgtgggagggagacaagctgtggatcctgattataaatgcagcttctgctacccccgtgacaggctcggagggagagaagggggtaagggaggtgggaggttgggaggaaagcagggagaatggaggaactgaaggtcaagggaaaactggattcaggaagtagctaacttctgaggagttgcagaagagctgagtagggtttgggagaattctccggaaggtgtttcaagacaaatggagggagaaaagagggtgggacggcaaagaatgagagagagagactgggggagagaagggagagatccagtcaccaagtgtggaggggccggggcagaaaaagtgggcaggcttagggggaaaaggaggcccgcccttcctgggaggaggcggaggggggaagagggaggggaggggcggcgtgggccagggaggtctgacacacccccacctcccctagatacaccccctactgatccgggaccggaggagcgagtccagtcgcaacaaactgctgagacgcacagtctccgtgccggtggaggggcggccccacggcgagcatggtacggcggccgagcaggctctcatgacccggacaggcgcggggagagggctgaagatggaccgggctggcggggcgggggcgtcggggagcggcgggagctggccgggggcgggagaaggcggagacaaagtcttgcttcccgaggggagatggcgccctcctctggaaggtggagcgggacaggggctgtgggtgagaggcccctgtgggtcctcgctcggcttcgctccctttctcctctccagcagtgaagtttgactattttcctggtgcttgtaaaaatagtctccttagatctttagcttccagtccgtgtgttcctgcccctgcccctcccagcccctggtctgggatcttggaaagaatgacctagttcctgccctccccccagacctcttccccacccctatgctcctgattcttcttccggaccttcagtccttgaggtctccttttattaccccctgttttctcctctcatcagctgcttctattttctgcaattgtatcaccctttctctttcctccctgatttctcttattttctgtacccctcttgattaccccgtccctcccctctgctcccggcgaaagtccatcagactcccatctcatctcctttctgtctgtagagctatctgcgcggtctgtctctccaactctctccctctctccatctgtctcttcccctccctccccctttctgcccccccaaccccctctttagtcatttaaaaaaagatttttgtcttcctgagaagttcgcttaaaaggtttccatgggaacagtgaggggagatgaaggcagagaacagagatctgcagccaaggtgcagagagacgccctcagcccccggaaaccccctcgtcactgcccccttccacttcatttcccttcccggacctagcgatccaggttccccattcctccaacccccaggtgacccctttttcccaccagctccccctcccttcaggaattcaagctaccagtttctctcccttagagagccagtgacctgtccccatcctttggctccttccagccttctgataggtccaggccctactagccttgtgggccggtttggggaccttgggtgggtgggtgggtggtcagggatgtgtgtcattgtcatggaaaccccataccatcggggtgtgtgggtagcacatctctgtgaggcaaagtcaggtggtggtggagtgtatacagagaatgtgtgtgatgtctgtcacatctgtgtgtatatgtatatgtgtgtatgtcatgttcatgtctggggaagatgtgtgtgtttgtgtgcatgtgtgtacacctgcgtttccaggccagaatggtcacatgctcacagagcatgtttatcatgtgtcctgtggttggcagatctgcccacttattccccatctttctccttatcctgagtcctcagggtctaggggtctctggcgggggtctcccgtgtgttttgggtggggacaccgtgtgtgtttggagttgaggtggcatgtggaggttgctgtattggggttcagtaggggctgggaggggttccaggggcatatgtatttggggggagggcttagtgaaagttgatgggggtgaacgtttagggtcttcaggcagacatggaatgtgtaaagggcatggaggatgtgcagtggacataggggtcgttgggaccttggggacttggcaatgccaaggtgtttgctgaggctgtggactctccagcccgggagaggtcgccggacctttgaggggcattggaatcctgggctcctcctctgctgggtggagccgcgaaccctcgttctctccgcggttttgtgtgtgtgggggggtcctgctcaggaggggatggtgggtggcctggtttgttttgggggtccccttgcccccctcccccgtctctctcgcgctgtctccgggcgacagggctcgtgacagaggcggccacggcagcagcggtcgcctagcaacggcggcggggcccgggcaacggcggcagcggcgggagcggcggcggagggagccgttcccgcggccgtcaccgcgcggccgtcccggccgtcccgggccccgccgccgcccccaccgcgccgggcggcgcgagccgggccgtaccgccccctctccctccgcaccccgcccttcccccgcgcaggggcggggcccctcccccaccggggacacccctggcccccccggggggcggtgcgaggtaagggcggggccgggcggactaggagcgcgcgtagaggggggggcgccgcgcgcgtggggcgggggcgcgcgtgtgcgtgggcgcggggaggggggtggggaagccgcggtggcggcggcggcggcggcagctgctccctccgcatgttctcgctgcatcttccgagtggggggagttatggtaaccggagggggacagcggaggacgggagggtcggggaccggcctcgtgcggacagggtcttgagcacgcgggggcggccggtgtgtgtgggatcttggagcccctggtggaaggggcagcccgtgtgtccgcgtgtgtgttcgtgcccatgctcgtgtctcctgtgtgtcggtgccatgtgcacacgggggcccagttcctcgtgcacacatgtgcagccatccttgtgcaagtgtgtcctgtcttatcttgcctctgcctgtttcctgcctagggggctgttgggccagccacgggcttgtggggcagtccgcggccttgctggtccatgtcacctctgaccctgagcatgcatatccctggctggggctcacctcctgtcaggcttctgtgtgtgggaatgtgtggccctatgagcaggattttctgtgtccctggtggcaggtgtgtgtctttgcatgtgtgttccagcactggcctgagtatctgtgtcaatcccagcatgggtgtccagggcgtgtctggatgtgggtggtgtggctggggggagtaagtgtgtgaatgtgttccttggaattctactgtgtatgaaacacctttgggctgggcaggtgtaagccctgcttggtcagtaagtggggacagaaaagcttaaaaagggaagaaatggggtaaagaggaaaagtggggaggggataggagagaaggaatgagagaggcttgaagaagagagcagagagcagcaggccagggagaaagaatagctggagaatgggaatgtgggagaaagccaagccagacttagaagagagaacaggggataagagcttaagatggggaactggatagagatggtgggagaagaaggggtctgggagctggggaggcagtggggaggagagagtcaggccttctggtaaagtgatctctgaaagaagaaagggaagaagatgggagaaggcactggattcttgtaggccttgcaggatcaggcttggttttggatcagggaaggccactcaggcatacgggctggctcacagtgaggcctgtcatagcagggactgtcattagaggttcatatccccagcacagagctctgtctcccatttctctgctctgtgtccaaccctgttcttcgcccttctctggcaacctccctcctctggctccccttgagagctgccagctgggtgtggagaggaagaaaggccaaagggaaggttagggatttggagggcagggggagattctgtgggtgatggcaagattagagatgttggaggggcaggagtccaagcccttgctgtgtgtgtgtgagtgccattgtgtgtgtacacagggtgtgtacatgtgtgggtgtgtgcacaatgcctgtgttacgggtttgtgtaggtggctgttatgtgtgtgcatgcgtgtatacatcgtgcaggcatgggacatggagacccaggatcacagtttgtgcttttcaggtttgctgtgtgtgtgtgtacacgggtgtgtgttgttttctctgtacatgtcactgcatgcagcattaataacaggatgttctgtgtttctgtcactctgccccccctttcctctgtgtttctgctattcttttcctgcggcaacaaaagtgtttaataagcatatgtgtatgtggcctctgtgtacctgtgacttatgagtgagttcatggatcttagttcttggtaatatgtgtaaggttatattacttccaagaaccaagcaagccaattagcaaatttgttcttctgttaatgctttagttccaaagcggaattttaatgcatttaaagttagactttatgcctttattagatgagcttgcacatgaaaataatggctgagctcggttccctgaaatgagagtgaggcagccatacctgagaaatgcagaaaaaatgttactagggaagagatatcctgaaccattggatgcattgcttagtgtgtaccagaaggataattaacacatttgctcctggtttttctttactctggtggcaatctcggatgcctgtgttagagtgagagaagggctgggggaggaaagggggttgtcctgagacagagtggatgtggttgtacttttcacgtgaatgaaaggatgtttgtgcttctgagatatggggatacctttctgtggtcaggatcatggtgtactcaagcatgtatttcaggggttaaactggaattcccctgcatggggatatgtgtgtcttagggttataggtccatttctgtagtgtgctgtccacatgattgcccaagagacttgggccacaaagtccacaccagcagctctcatgtgggtcactgggttcaagtatgtactcccttgttgcagagctcacatatgtcaaagcatgtatcctgtggggtgtgtgggcctcagggtctcagaatgtggatccgtgctatgcccgtgctcacagttgtctgtatgtctcaaaagcacatagatccccagttatttttctgtattgtggttctcatatacacgtacctccatagctcagtatatgtttctgtactatacacctgttcctgagggagtgatagggttctcgtgtcatggggtccacatttttgtatgcaaacctcctaacacctgggttttacaggtaaagggaagctgaggactgattctagggcagtttgcaggcaatttgcaattctggaagcagacagtgaaaatataattgtggtcctcccttgttctgttctggaacctagagggttaacaggcagctcttccggtccacccccctccttccagcctgtagcttcttgttgccgtggagatggtggccccgccccgatgcagcacctgcccccccattggctgcagtggtgactgtggggctgaggggggagcccaggcctgggcagccattctggagctggagccggagcttggcatccccccacttacattctcttccagcccctcggcccctctaaattcccttgcagccgagcctcagcttcctttttcagcgcttgccatccctctaggctcttggcagactgagctgcatccgcattcacctcccctcctcctcctttccctatccttacttgggagtcccgagaacccccactgtccatccttcctgctccctgcccattcccctgcattctttgcttttcccctccccccaccaaccttctgagcccctgccactgcagtgcacgtggaaccggctccttctcccttccccccacctgccccttccttggattttctgtccccagcttctccccctgctactcttcacaggtctcttccaagacctccccctccagtccagggagggggtcatgggaggcagccctggccctccagacagacaggggttccaggaggtggggggcaggtggaagatgtgcccaccagggggaagaggaaagcctgcctatgggcaatgacctttaacccatctttccccccagctagccccttctggggtgggtgggcaccagggacctagcctccctggatctttggtgtccttcattactggggttttactgaccctctcagccatgctcccctgctgactgccagccccagtcatgggcctaaggcctcccaccccatccccctcagggggctcctgctcaggttccttgccccctccttcccgctgccagcctctccgccgtcgctgctcttcctgctgctttccggggggtaggtgaggccggagctgaggggcagagggaggtgggggcatgcactggggtcaggggtgggaacctgggttaacagcttcccttctggccccctccccaacttcccttctggccatttcctcccctccagaataccacttgggtcgctcgaggaggaagagtgtcccaggggggaagcagtacagcatggagggtgcccctgctgcgcccttccggccctcggtgagtggtgcctaccagatgtggctcagttgggccccctcccctccagccccaactggggccctaggagtctgagaaagagggcaggagggggagagagggagtgagagtgagaaaaagagtgtgtgtctgtgtgtgtctccccacctctttggtttcccccttcttggctctgcccccctgcttctgagaccagccctcccaccttctccaagctgtgtgtgtgtgtatatgtgtgtgtgtgtgtgcttgcactgtacccgtgggagcaaggaagacaaactggtattagggttcctatccccctttcctcgcctctggagacttcccttttccccatcccactttcatccaggggctctctaccagctgagggatgagtaggtagaactgaccctgccccaacccaccccatccccatttcccccccagcaaggcttcctgagccgacggctaaaaagctccatcaaacgaacgaagtcacaacccaaacttgaccggaccagcagctttcgccagatcctgcctcgcttccgaagtgctgaccatgaccggtacaggggctggagcatgtgggatgagattgatgtaatgtagggtctcctgtgtgagatgcagagggagggggttatctgtgtgcaaaggttgaaggattcaactcaagttggttgggggatgtcatggcacaggggacagaacagaaaagaactagaatagggatctgtgagcagcaggagaggggtagggtggcagagagaagacagacagacaggctggaaagggaatgaaggtgaagccaaggagggactcctcagggactcctcaggccaagaaggatgggctctagcccaggatcaaaggagctgtacaggaggagagtgaccctggaggaatgtttaaggaatgcagggaaggggttggtaggtgagtgagcaataggctgtaggtggaagggtgtcagggaaggtcaggaaatacaggggcagcaggttggagtggggctgggggtggctgaatgaatggatgatggctagggctcaaggacctcatcagtgagggaagagacagtatagagcatggcagagaaggggaggctgggacaggtgtgcagggtgacagaatgggaagcaacccatggactgaggcatgaagaagcagccagcggagaagtccagaaggcactgtccctgagaccaggctgaaggagacctccactgtttgcctttgttgcctgccatttggggttcctctctgggtttccccctcacccagtcactccccagggagaaccatgccctccctttcccccatgtctggccacccccaggattgggcaggtagggaggttgggataaagtgagtcacacctttccctgcccccctcccatgttgccagagctggatttggggccggcagggggtgagggcatggtattcctggccgcgggggcgggggggggggtccgggggccgggggagcgtcgcgctgacggcagccagagcctgcgatgacggggctgctataaataacttcttggaggctcccacacccaagctcccctcccgctttcccactgctctctactcttcatcccctgcccatctccataccgcttttgtattgctatcctacccctcattattccatgcccctagccccctttatcttctgccctcctgcagtgatttttttgcattccatcccctcttagccctcacctcggttctcccggccatctctccagttggccttcctcctcttctcctgtcctctgtcttgctgcacatacctttgtctccccctttcttcttcttgccctacctcctcttcttccctagtccgtgtattctgtcttttatcctctttgagctcttttctgcccacagctttctcctatttcttatgcttttccctcactctttcccctgcttctgctaaaacttgtcctcttatgctgtgttcattcattctttgaatcattaaatgtttatcaggcactagccgtgtgccaggcccaggctagacatatctcttctctgtgccttcacttctttacttccactttttcctttatactgaggctctggtttctggggttacctggaggtactacctagaagtgccccaggcccactttgttctctccttttttttttttcttttctgccatggtccatttctgggttgagatatttctagatgtccccagtcctcgcaatcccttaggtgtgagatggtgggagtttcttttttttcctttttttttttttaaatagaaatagggtctcactgtgttgcccagactggtcttgaactcctgggctcaagtgaccctcccacctcggcctttgaaatgttgggattacaggtgtgagccaccaggcccaggtggagcaggggagttccttaaaggattctgatttttctcacatccctcacgtccttcctgataggcagggtttctttctgtgtctgtttgggaagggtgttcagggggccttctctccaagtctccatcctggaacagactgatgatgcagggtacctatgtgtctaagaagagtaggggggccgggcgcggtggctcatgcctgtaatcccagcactttgggaggctgaatcacttgaggtcaggagtttgagaccagcctgaccaacagggtgaaaccccgtctcagctaaaaatacaaaaaaaaaaaagaaaaaaaaattagctgggtgtgctgaggcaggagagacgcttgagcccaggaggcagaagttgcagcaagccgagatcacaccactgtactccagcctgggcgacagagcaagactgtctcaaaaaaaaaaaaaaaaaaaaaaaaggaagagtgggaagccctgatcccttcctctcctgaacctcctgcctgccagggcccggctgatgcaaagctttaaggagtcacactctcatgagtccttgctgagtcctagcagtgcagctgaggcattggagctcaacttggatgaagattccattatcaagccagtgcacagctccatcctgggccaggagttctgttttgaggtactgggtctggtgggctggggagggccaaaggacaggggtgatggaaggtggggggcagagaggtctagagaaagtggcacaggtggggacatcaaggaaacagaaacttctgggactggaggaaagggtaggccagggaggaagagaaggtagcagagtctcctcccctctgtagccctttccctcaactccacactcctttctaggtaacaacttcatcaggaacaaaatgctttgcctgtcggtctgcggccgaaagagacaaatggattgagaatctgcagcgggcagtaaagcccaacaaggtattggggaataaaggggacacaacctgtgcagggcaaaggttgcaccaacacgggaagctgggggcctagggaggaaagtgagttaaaggaggagaggcttggggaaggagaggattgaggtacagtgtatctggacaagcagggggagacccccattattctgagtcccccatttcttttcgctttctgtactgctaccctgccttacgatctctttccctgccatagaagtcatagacttacagagttgatggggctctggaaattctttagtctagcttccctgcaggcaggaatgcttcactaataccccgcaggacacatcaaatacacttagccaagtttctgtaccttggtttcctctctaagacagagggaactggtggcaatgggttggattaaatgatctctaaggtccctttggcacataaattctatgagtctgttcttcccaaaacttcatgcttccagttctgtcagctattctctgtatcccagtttctagcaagcttacagtcctagtcacactcctctggggggaactcttgtgtcttgatgtccttaaagaactcaacccaagatgctgacatgatctgacctatgcagagtacaaacaccatgttccctttcaacacactgcaatatcacctgagccttaccattagcttgtgctcaattgtatccccccaggcccttactgattcttttttttttttttttgagacagagtctcactctgtcacccaggctggagtgcagtggcgtgatcttggctcactgcaacctccgcctcctgggtttaagcaattcctgtgcctcagcctccccagtagctgggattacaggcatgcaccaccacacccgactaatttttgtatttttagtagagacgaggtttcaccatgttggccaggctagtctcaaactcctgacctcaggttgtctgcctgcctcagcctcccaaagtgctaggattacaggcatgagccaccacatctggccaagctttacccattctatatgcaattcttttttcacaatttctgatagtctctgcaggactttccagttcccttcaaattctacattaatatttttggcttgttattccagcttttgaaatctttccaatactgtttgtgttgtctagtgtatgtctacgcttctacagtagcttcctggggctgctataacaaactgctacaaactgggtcacgtaaaacaacagaaatttattctctcacagttcaggaggctggaagtccaaaagcaaggtatcagcagggccacgctctctttgatgctgtagcagggaatccttccttgcctcttcctagcttccggaggttgccagcagtccttggcattcctgggcttataactgcatccgtctaatttctgcctccatcttcatgtagctggcttccttctgtgtgtctctgtatcctgtatctctgtgtctccaaatctccctctccatataaagacaccagtttttataaggtgggttaagggtccactctaattcagtatggcctcttttttttgagatggaatatcgctcttgtttcccaggcttggagtgcaatggcatgagctcagctcactgcaacctccgccttccaggttcaagtgattctcctgcctcagcctcctgagtagctgggattacaggcacgtgccactatgcccagctaatttgtttttgtatttttattagagacggggtttcactatgttggccaggctggctcgaactcctgacctcaggcaatccacccacctcggcctcccaaagtgctgggattacaggaatgagataccatggctggcctcttcttagtttgattacatttgcagggatcctgtttccaaataagatcacattcacaggttcagggtagacatgagttttggtgggatactattcaacccagtacaccgtctcaccttatgattgctgtctgtatcccactttcttactgtctctcctcttttggtgtctctctgtcccttccccctttaacatcatgcccaccccaccatgccaggacaacagccgccgggtagacaatgtgctaaagctgtggatcatagaggcccgggagctgccccccaagaagcggtactactgtgagctctgcctggatgacatgctgtatgcacgcaccacctccaagccccgctctgcctctggggacaccgtcttctggggcgagcacttcgagtttaacaacctgccggctgtccgtgccctgcggctgcatctgtaccgtgactcagacaaaaagcgcaagaaggacaaggcaggctatgtcggcctggtgactgtgccagtggccaccctggctgggcgccacttcacagagcagtggtaccctgtaaccctgccaacaggcagtgggggatctgggggcatgggttcgggagggggagggggctcggggggtggctcagggggcaagggcaaaggaggttgcccggctgtgcggctgaaagcacgttaccagacaatgagcatcttgcccatggagctatataaagagtttgcagagtatgtcaccaaccattatcggatgctgtgtgcagtcttggagcccgccctgaatgtcaaaggcaaggaggaggttgccagtgcactagttcacatcctgcagagtacaggcaaggccaaggtgagtgttgtgccctcagggaaaggtgacttgggaatgggcacttgcttgggggttagtgaggacagggcaaattcacgagattgggttgtgcagaggctgacacttggattttcctgggcctcaggacttcctttcagacatggccatgtctgaggtagaccggttcatggaacgggagcacctcatattccgcgagaacacgcttgccactaaagccatagaagagtatatgagactgattggtcagaaatacctcaaggatgccattggtatggcccacactcaggccctcttcttcccaaacctgccagatgtccaccccagaccccaagtccacccttccacagcttgatacttcctaacccagagtcctaggactccagcctccaacacctgattctgaaatttccccaaccctggccacccccttccctgcccttggaaagtgtgaccacaccctcttgtgcccccaccccccaggagaattcatccgtgctctgtatgaatctgaggaaaactgcgaggtagaccctatcaagtgcacagcatccagtttggcagagcaccaggccaacctgcgaatgtgctgtgagttggccctgtgcaaggtggtcaactcccactggtgagactgggaacgctgggctggggggccagggtcgggggaattatgtgttcatctgttcatctatctgtccatcctcaaagaggactgagcaccatttatgggcaaagcattgttctaggcgctatagagcaaacaggtgaaagaggcctggtccctgccctcagagggcctccaccagaatggggacaaattagaagaaaaaaaaaaaaagccacagagccataatggtgtgtaagtgctgagtaagggtccccccaacctctgtgtgacataaggtcagagagaaggcagagctttgagataagtggggaagaggtgcccccttgggtaggctttgaagactggtttaggttctgatatatggacatagttggcaagaaagacatttcagaagaaggctgtgagaaaggcacatgtgtgatggtgaaaaggcccaggagttttcaggggacattaaagtaggttagtagcaattacatcaggtttagtggagcatgtgcctcataatggggagtggcgggagagatgtctgggcaggaagattagctttagaaactggaaggcctcaaggagtctgaggtcattggtaggccttgggatgccattaaaggtgtcagaaatattgtgatttagaagattaatccataggctgggcacggtggctcacacctgtaataccagcactttgggaggctgaggcgggcagaccacctgaggtcaggagtttgagaccaggctgaccaacatggagaaaccctgtctctactaaaaatacaaaattagccagatgtggtggcacatgcctgtaatcccagctattcgggaggctaaggcaggagaatcacttgaatctgggaggtggaggttgtagtgagccgagatcacacgattgcactctagcctgggcaacaagagtgaaactccatctcaaaaaaaaaaaattaatccataagtagagtgtatgtagtagagtagagggatgtatgttgggggatgactggaatagagccagctgggggctcggaggcatgaaagtcagatcctgaatcagaacagtgacagaagttaggaaggagctactggaaggaccctctcgggaaaggatcagtaggaattgtcagcttattggaaaggagggagcatgtctgtggggagtcacggatgactcaagaggccatgaggctggtggttgggagaccggtggcctcattgacaaccaggaaagtcaggaggaggagccagttggaggtgtgggggcgatggtgagctctgctttacaccagccgagtttaaggtgtcagtgggacattgaagtggaactgggaggtgcggggagtgagctctgagccattccagggactggggatcatgcctggggcacctccatccccatttccctggaatccagaagagttggggggtccgagctccctgtacctcaagtgaccctccatctctctcccatctctgtctctccctggtgtctgtttttcttctcctcctctccttgtctctctcccacacccctccatctctctcccacgtgtctctcccctcaccttctctccccctccatttctctctccctaatctgtctgttccctctgccatggcccccttcttcaagcagcctcccatcttgctcctgcggtccctccttccctgtctctctcacccctgtttccacaccctcacctcctaccacccccctcagcatgttccctggaagctgagggtctctggggctcagtcccggtctctctctttctctctctctctctctgtctccccgacccttccccccagcgtgttcccgagggagctgaaggaggtgtttgcttcgtggcggctgcgctgcgcagagcgaggccgggaggacatcgcagacaggcttatcagcgcctcactcttcctgcgcttcctctgcccagcgattatgtcgcccagtctctttgggcttatgcaggagtacccagatgagcagacctcacgaaccctcaccctcattgccaaggtcatccagaacctggccaacttttccaagtgagggaagcttcaggagtgggcagggcagggagtggcagggcagggagtggcagggctgggggtcggcaagaagggtctcctgagtccccagagatcctgagatggggaggctatgataccttgtgtgtgtgtgtatgtgtgtgtatgtgtgtgtgtgtgtgtgtgtgtgtgtatgtgacctttatcttctgcattcttggctaggtttacctcaaaggaggactttctgggcttcatgaatgagtttctggagctggaatggggttccatgcagcagtttttgtatgagatctccaatctggacacgctaaccaacagcagtagctttgagggttacatcgacttgggccgagagctctccacactgcatgccctactctgggaggtgctgccccagctcagcaaggtcagcagatcccctctttgccctatccccagatggctccagaggttcctggagcctgagaaactaccctttgaagattttttttctccccttgtttctcgaggtgtcaccactactatcccaactcaggccccctccacctgcaccctcagaggccctcttagagctgggcactgagcccccaggtaacagcctcacccttccaggaagccctcctgaagctgggtccactgccccggctcctcaacgacatcagcacagctctgaggaaccccaacatccaaaggcagccaagccgccagagtgagcggccccggcctcagcctgtggtactgcgggggccatcggctgagatgcagggctacatgatgcgggacctcaacag

SEQ ID NO: 14354 - DNA, 2499 bp, Homo sapiens
ctttaggacctctgtctctctctggcctgatgagcaggtctcgagcctccatccatcgggggagcatccccgcgatgtcctatgcccccttcagagatgtacggggaccctctatgcaccgaacccaatacgttcattccccgtatgatcgtcctggttggaaccctcggttctgcatcatctcggggaaccagctgctcatgctggatgaggatgagatacaccccctactgatccgggaccggaggagcgagtccagtcgcaacaaactgctgagacgcacagtctccgtgccggtggaggggcggccccacggcgagcatgaataccacttgggtcgctcgaggaggaagagtgtcccaggggggaagcagtacagcatggagggtgcccctgctgcgcccttccggccctcgcaaggcttcctgagccgacggctaaaaagctccatcaaacgaacgaagtcacaacccaaacttgaccggaccagcagctttcgccagatcctgcctcgcttccgaagtgctgaccatgaccgggcccggctgatgcaaagctttaaggagtcacactctcatgagtccttgctgagtcctagcagtgcagctgaggcattggagctcaacttggatgaagattccattatcaagccagtgcacagctccatcctgggccaggagttctgttttgaggtaacaacttcatcaggaacaaaatgctttgcctgtcggtctgcggccgaaagagacaaatggattgagaatctgcagcgggcagtaaagcccaacaaggacaacagccgccgggtagacaatgtgctaaagctgtggatcatagaggcccgggagctgccccccaagaagcggtactactgtgagctctgcctggatgacatgctgtatgcacgcaccacctccaagccccgctctgcctctggggacaccgtcttctggggcgagcacttcgagtttaacaacctgccggctgtccgtgccctgcggctgcatctgtaccgtgactcagacaaaaagcgcaagaaggacaaggcaggctatgtcggcctggtgactgtgccagtggccaccctggctgggcgccacttcacagagcagtggtaccctgtaaccctgccaacaggcagtgggggatctgggggcatgggttcgggagggggagggggctcggggggtggctcagggggcaagggcaaaggaggttgcccggctgtgcggctgaaagcacgttaccagacaatgagcatcttgcccatggagctatataaagagtttgcagagtatgtcaccaaccattatcggatgctgtgtgcagtcttggagcccgccctgaatgtcaaaggcaaggaggaggttgccagtgcactagttcacatcctgcagagtacaggcaaggccaaggacttcctttcagacatggccatgtctgaggtagaccggttcatggaacgggagcacctcatattccgcgagaacacgcttgccactaaagccatagaagagtatatgagactgattggtcagaaatacctcaaggatgccattggagaattcatccgtgctctgtatgaatctgaggaaaactgcgaggtagaccctatcaagtgcacagcatccagtttggcagagcaccaggccaacctgcgaatgtgctgtgagttggccctgtgcaaggtggtcaactcccactgcctcccatcttgctcctgcggtccctccttccctgtctctctcacccctgtttccacaccctcacctcctaccacccccctcagcatgttccctggaagctgagggtctctggggctcagtcccggtctctctctttctctctctctctctctgtctccccgacccttccccccagcgtgttcccgagggagctgaaggaggtgtttgcttcgtggcggctgcgctgcgcagagcgaggccgggaggacatcgcagacaggcttatcagcgcctcactcttcctgcgcttcctctgcccagcgattatgtcgcccagtctctttgggcttatgcaggagtacccagatgagcagacctcacgaaccctcaccctcattgccaaggtcatccagaacctggccaacttttccaagtttacctcaaaggaggactttctgggcttcatgaatgagtttctggagctggaatggggttccatgcagcagtttttgtatgagatctccaatctggacacgctaaccaacagcagtagctttgagggttacatcgacttgggccgagagctctccacactgcatgccctactctgggaggtgctgccccagctcagcaaggaagccctcctgaagctgggtccactgccccggctcctcaacgacatcagcacagctctgaggaaccccaacatccaaaggcagccaagccgccagagtgagcggccccggcctcagcctgtggtactgcgggggccatcggctgagatgcagggctacatgatgcgggacctcaacag

SEQ ID NO: 14355 - DNA, 4051 bp, Homo sapiens
ctctttctccccctctttctctcttctttctcccccgtccccccgccccctccccccaggcctgatgagcaggtctcgagcctccatccatcgggggagcatccccgcgatgtcctatgcccccttcagagatgtacggggaccctctatgcaccgaacccaatacgttcattccccgtatgatcgtcctggttggaaccctcggttctgcatcatctcggggaaccagctgctcatgctggatgaggatgagatacaccccctactgatccgggaccggaggagcgagtccagtcgcaacaaactgctgagacgcacagtctccgtgccggtggaggggcggccccacggcgagcatgaataccacttgggtcgctcgaggaggaagagtgtcccaggggggaagcagtacagcatggagggtgcccctgctgcgcccttccggccctcgcaaggcttcctgagccgacggctaaaaagctccatcaaacgaacgaagtcacaacccaaacttgaccggaccagcagctttcgccagatcctgcctcgcttccgaagtgctgaccatgaccgggcccggctgatgcaaagctttaaggagtcacactctcatgagtccttgctgagtcctagcagtgcagctgaggcattggagctcaacttggatgaagattccattatcaagccagtgcacagctccatcctgggccaggagttctgttttgaggtaacaacttcatcaggaacaaaatgctttgcctgtcggtctgcggccgaaagagacaaatggattgagaatctgcagcgggcagtaaagcccaacaaggacaacagccgccgggtagacaatgtgctaaagctgtggatcatagaggcccgggagctgccccccaagaagcggtactactgtgagctctgcctggatgacatgctgtatgcacgcaccacctccaagccccgctctgcctctggggacaccgtcttctggggcgagcacttcgagtttaacaacctgccggctgtccgtgccctgcggctgcatctgtaccgtgactcagacaaaaagcgcaagaaggacaaggcaggctatgtcggcctggtgactgtgccagtggccaccctggctgggcgccacttcacagagcagtggtaccctgtaaccctgccaacaggcagtgggggatctgggggcatgggttcgggagggggagggggctcggggggtggctcagggggcaagggcaaaggaggttgcccggctgtgcggctgaaagcacgttaccagacaatgagcatcttgcccatggagctatataaagagtttgcagagtatgtcaccaaccattatcggatgctgtgtgcagtcttggagcccgccctgaatgtcaaaggcaaggaggaggttgccagtgcactagttcacatcctgcagagtacaggcaaggccaaggacttcctttcagacatggccatgtctgaggtagaccggttcatggaacgggagcacctcatattccgcgagaacacgcttgccactaaagccatagaagagtatatgagactgattggtcagaaatacctcaaggatgccattggagaattcatccgtgctctgtatgaatctgaggaaaactgcgaggtagaccctatcaagtgcacagcatccagtttggcagagcaccaggccaacctgcgaatgtgctgtgagttggccctgtgcaaggtggtcaactcccactgcgtgttcccgagggagctgaaggaggtgtttgcttcgtggcggctgcgctgcgcagagcgaggccgggaggacatcgcagacaggcttatcagcgcctcactcttcctgcgcttcctctgcccagcgattatgtcgcccagtctctttgggcttatgcaggagtacccagatgagcagacctcacgaaccctcaccctcattgccaaggtcatccagaacctggccaacttttccaagtttacctcaaaggaggactttctgggcttcatgaatgagtttctggagctggaatggggttccatgcagcagtttttgtatgagatctccaatctggacacgctaaccaacagcagtagctttgagggttacatcgacttgggccgagagctctccacactgcatgccctactctgggaggtgctgccccagctcagcaaggaagccctcctgaagctgggtccactgccccggctcctcaacgacatcagcacagctctgaggaaccccaacatccaaaggcagccaagccgccagagtgagcggccccggcctcagcctgtggtactgcgggggccatcggctgagatgcagggctacatgatgcgggacctcaacagctccatcgaccttcagtccttcatggctcgaggcctcaacagctctatggacatggctcgcctcccctccccaaccaaggaaaagccacccccaccaccgcctggtggtggtaaagacctgttctatgtaagccgtccacccctggcccgttcctcaccagcatactgcacgagcagctcggacatcacagagccagagcagaagatgctgagtgtcaacaagagtgtgtccatgctggacttacagggtgatgggcctggtggccgcctcaacagcagcagtgtttcgaacctggcggccgtaggggacctgctgcactcaagccaggcctcgctgacagcagccttggggctacggcctgcgcctgccggacgcctctcccaggggagtggctcatccatcacggcggctggcatgcgcctcagccagatgggtgtcaccacagacggtgtccctgcccagcaactgcgaatccccctctccttccagaaccctctcttccacatggctgctgatgggccaggtcccccaggcggccatggagggggcggtggccatggcccaccttcctcccatcaccaccaccaccaccatcaccaccaccgaggtggagagccccctggggacacctttgccccattccatggctatagcaagagtgaggacctctcttccggggtccccaagccccctgctgcctccatccttcatagccacagctacagtgatgagtttggaccctctggcactgacttcacccgtcggcagctttcactccaggacaacctgcagcacatgctgtcccctccccagatcaccattggtccccagaggccagccccctcagggcctggaggtgggagcggtgggggcagcggtgggggtggcgggggccagccgcctccattgcagaggggcaagtctcagcagttgacagtcagcgcagcccagaaaccccggccatccagcgggaatctattgcagtccccagagccaagttatggccccgcccgtccacggcaacagagcctcagcaaggagggcagcattgggggcagcgggggcagcggtggcggagggggtggggggctgaagccctccatcaccaagcagcattctcagacaccatccacattgaaccccacaatgccagcctctgagcggacagtggcctgggtctccaacatgcctcacctgtcggctgacatcgagagtgcccacatcgagcgggaagagtacaagctcaaggagtactcaaaatcgatggatgagagccggctggatagggtgaaggagtacgaggaggagattcactcactgaaagagcggctgcacatgtccaaccggaagctggaagagtatgagcggaggctgctgtcccaggaagaacaaaccagcaaaatcctgatgcagtatcaggcccgactggagcagagtgagaagaggctaaggcagcagcaggcagagaaggattcccagatcaagagcatcattggcaggctgatgctggtggaggaggagctgcgccgggaccaccccgccatggctgagccgctgccagaacccaagaagaggctgctcgacgctcagagaggcagcttccccccttgggtccaacaaacccgcgtgtgacgctggccccaccgtggaatggcctggcccccccagccccaccacccccaccccggctgc

SEQ ID NO: 14356 - DNA, 20182 bp, Homo sapiens
atgggcctaaggcctcccaccccatccccctcagggggctcctgctcaggttccttgccccctccttcccgctgccagcctctccgccgtcgctgctcttcctgctgctttccggggggtaggtgaggccggagctgaggggcagagggaggtgggggcatgcactggggtcaggggtgggaacctgggttaacagcttcccttctggccccctccccaacttcccttctggccatttcctcccctccagaataccacttgggtcgctcgaggaggaagagtgtcccaggggggaagcagtacagcatggagggtgcccctgctgcgcccttccggccctcggtgagtggtgcctaccagatgtggctcagttgggccccctcccctccagccccaactggggccctaggagtctgagaaagagggcaggagggggagagagggagtgagagtgagaaaaagagtgtgtgtctgtgtgtgtctccccacctctttggtttcccccttcttggctctgcccccctgcttctgagaccagccctcccaccttctccaagctgtgtgtgtgtgtatatgtgtgtgtgtgtgtgcttgcactgtacccgtgggagcaaggaagacaaactggtattagggttcctatccccctttcctcgcctctggagacttcccttttccccatcccactttcatccaggggctctctaccagctgagggatgagtaggtagaactgaccctgccccaacccaccccatccccatttcccccccagcaaggcttcctgagccgacggctaaaaagctccatcaaacgaacgaagtcacaacccaaacttgaccggaccagcagctttcgccagatcctgcctcgcttccgaagtgctgaccatgaccggtacaggggctggagcatgtgggatgagattgatgtaatgtagggtctcctgtgtgagatgcagagggagggggttatctgtgtgcaaaggttgaaggattcaactcaagttggttgggggatgtcatggcacaggggacagaacagaaaagaactagaatagggatctgtgagcagcaggagaggggtagggtggcagagagaagacagacagacaggctggaaagggaatgaaggtgaagccaaggagggactcctcagggactcctcaggccaagaaggatgggctctagcccaggatcaaaggagctgtacaggaggagagtgaccctggaggaatgtttaaggaatgcagggaaggggttggtaggtgagtgagcaataggctgtaggtggaagggtgtcagggaaggtcaggaaatacaggggcagcaggttggagtggggctgggggtggctgaatgaatggatgatggctagggctcaaggacctcatcagtgagggaagagacagtatagagcatggcagagaaggggaggctgggacaggtgtgcagggtgacagaatgggaagcaacccatggactgaggcatgaagaagcagccagcggagaagtccagaaggcactgtccctgagaccaggctgaaggagacctccactgtttgcctttgttgcctgccatttggggttcctctctgggtttccccctcacccagtcactccccagggagaaccatgccctccctttcccccatgtctggccacccccaggattgggcaggtagggaggttgggataaagtgagtcacacctttccctgcccccctcccatgttgccagagctggatttggggccggcagggggtgagggcatggtattcctggccgcgggggcgggggggggggtccgggggccgggggagcgtcgcgctgacggcagccagagcctgcgatgacggggctgctataaataacttcttggaggctcccacacccaagctcccctcccgctttcccactgctctctactcttcatcccctgcccatctccataccgcttttgtattgctatcctacccctcattattccatgcccctagccccctttatcttctgccctcctgcagtgatttttttgcattccatcccctcttagccctcacctcggttctcccggccatctctccagttggccttcctcctcttctcctgtcctctgtcttgctgcacatacctttgtctccccctttcttcttcttgccctacctcctcttcttccctagtccgtgtattctgtcttttatcctctttgagctcttttctgcccacagctttctcctatttcttatgcttttccctcactctttcccctgcttctgctaaaacttgtcctcttatgctgtgttcattcattctttgaatcattaaatgtttatcaggcactagccgtgtgccaggcccaggctagacatatctcttctctgtgccttcacttctttacttccactttttcctttatactgaggctctggtttctggggttacctggaggtactacctagaagtgccccaggcccactttgttctctccttttttttttttcttttctgccatggtccatttctgggttgagatatttctagatgtccccagtcctcgcaatcccttaggtgtgagatggtgggagtttcttttttttcctttttttttttttaaatagaaatagggtctcactgtgttgcccagactggtcttgaactcctgggctcaagtgaccctcccacctcggcctttgaaatgttgggattacaggtgtgagccaccaggcccaggtggagcaggggagttccttaaaggattctgatttttctcacatccctcacgtccttcctgataggcagggtttctttctgtgtctgtttgggaagggtgttcagggggccttctctccaagtctccatcctggaacagactgatgatgcagggtacctatgtgtctaagaagagtaggggggccgggcgcggtggctcatgcctgtaatcccagcactttgggaggctgaatcacttgaggtcaggagtttgagaccagcctgaccaacagggtgaaaccccgtctcagctaaaaatacaaaaaaaaaaaagaaaaaaaaattagctgggtgtgctgaggcaggagagacgcttgagcccaggaggcagaagttgcagcaagccgagatcacaccactgtactccagcctgggcgacagagcaagactgtctcaaaaaaaaaaaaaaaaaaaaaaaaggaagagtgggaagccctgatcccttcctctcctgaacctcctgcctgccagggcccggctgatgcaaagctttaaggagtcacactctcatgagtccttgctgagtcctagcagtgcagctgaggcattggagctcaacttggatgaagattccattatcaagccagtgcacagctccatcctgggccaggagttctgttttgaggtactgggtctggtgggctggggagggccaaaggacaggggtgatggaaggtggggggcagagaggtctagagaaagtggcacaggtggggacatcaaggaaacagaaacttctgggactggaggaaagggtaggccagggaggaagagaaggtagcagagtctcctcccctctgtagccctttccctcaactccacactcctttctaggtaacaacttcatcaggaacaaaatgctttgcctgtcggtctgcggccgaaagagacaaatggattgagaatctgcagcgggcagtaaagcccaacaaggtattggggaataaaggggacacaacctgtgcagggcaaaggttgcaccaacacgggaagctgggggcctagggaggaaagtgagttaaaggaggagaggcttggggaaggagaggattgaggtacagtgtatctggacaagcagggggagacccccattattctgagtcccccatttcttttcgctttctgtactgctaccctgccttacgatctctttccctgccatagaagtcatagacttacagagttgatggggctctggaaattctttagtctagcttccctgcaggcaggaatgcttcactaataccccgcaggacacatcaaatacacttagccaagtttctgtaccttggtttcctctctaagacagagggaactggtggcaatgggttggattaaatgatctctaaggtccctttggcacataaattctatgagtctgttcttcccaaaacttcatgcttccagttctgtcagctattctctgtatcccagtttctagcaagcttacagtcctagtcacactcctctggggggaactcttgtgtcttgatgtccttaaagaactcaacccaagatgctgacatgatctgacctatgcagagtacaaacaccatgttccctttcaacacactgcaatatcacctgagccttaccattagcttgtgctcaattgtatccccccaggcccttactgattcttttttttttttttttgagacagagtctcactctgtcacccaggctggagtgcagtggcgtgatcttggctcactgcaacctccgcctcctgggtttaagcaattcctgtgcctcagcctccccagtagctgggattacaggcatgcaccaccacacccgactaatttttgtatttttagtagagacgaggtttcaccatgttggccaggctagtctcaaactcctgacctcaggttgtctgcctgcctcagcctcccaaagtgctaggattacaggcatgagccaccacatctggccaagctttacccattctatatgcaattcttttttcacaatttctgatagtctctgcaggactttccagttcccttcaaattctacattaatatttttggcttgttattccagcttttgaaatctttccaatactgtttgtgttgtctagtgtatgtctacgcttctacagtagcttcctggggctgctataacaaactgctacaaactgggtcacgtaaaacaacagaaatttattctctcacagttcaggaggctggaagtccaaaagcaaggtatcagcagggccacgctctctttgatgctgtagcagggaatccttccttgcctcttcctagcttccggaggttgccagcagtccttggcattcctgggcttataactgcatccgtctaatttctgcctccatcttcatgtagctggcttccttctgtgtgtctctgtatcctgtatctctgtgtctccaaatctccctctccatataaagacaccagtttttataaggtgggttaagggtccactctaattcagtatggcctcttttttttgagatggaatatcgctcttgtttcccaggcttggagtgcaatggcatgagctcagctcactgcaacctccgccttccaggttcaagtgattctcctgcctcagcctcctgagtagctgggattacaggcacgtgccactatgcccagctaatttgtttttgtatttttattagagacggggtttcactatgttggccaggctggctcgaactcctgacctcaggcaatccacccacctcggcctcccaaagtgctgggattacaggaatgagataccatggctggcctcttcttagtttgattacatttgcagggatcctgtttccaaataagatcacattcacaggttcagggtagacatgagttttggtgggatactattcaacccagtacaccgtctcaccttatgattgctgtctgtatcccactttcttactgtctctcctcttttggtgtctctctgtcccttccccctttaacatcatgcccaccccaccatgccaggacaacagccgccgggtagacaatgtgctaaagctgtggatcatagaggcccgggagctgccccccaagaagcggtactactgtgagctctgcctggatgacatgctgtatgcacgcaccacctccaagccccgctctgcctctggggacaccgtcttctggggcgagcacttcgagtttaacaacctgccggctgtccgtgccctgcggctgcatctgtaccgtgactcagacaaaaagcgcaagaaggacaaggcaggctatgtcggcctggtgactgtgccagtggccaccctggctgggcgccacttcacagagcagtggtaccctgtaaccctgccaacaggcagtgggggatctgggggcatgggttcgggagggggagggggctcggggggtggctcagggggcaagggcaaaggaggttgcccggctgtgcggctgaaagcacgttaccagacaatgagcatcttgcccatggagctatataaagagtttgcagagtatgtcaccaaccattatcggatgctgtgtgcagtcttggagcccgccctgaatgtcaaaggcaaggaggaggttgccagtgcactagttcacatcctgcagagtacaggcaaggccaaggtgagtgttgtgccctcagggaaaggtgacttgggaatgggcacttgcttgggggttagtgaggacagggcaaattcacgagattgggttgtgcagaggctgacacttggattttcctgggcctcaggacttcctttcagacatggccatgtctgaggtagaccggttcatggaacgggagcacctcatattccgcgagaacacgcttgccactaaagccatagaagagtatatgagactgattggtcagaaatacctcaaggatgccattggtatggcccacactcaggccctcttcttcccaaacctgccagatgtccaccccagaccccaagtccacccttccacagcttgatacttcctaacccagagtcctaggactccagcctccaacacctgattctgaaatttccccaaccctggccacccccttccctgcccttggaaagtgtgaccacaccctcttgtgcccccaccccccaggagaattcatccgtgctctgtatgaatctgaggaaaactgcgaggtagaccctatcaagtgcacagcatccagtttggcagagcaccaggccaacctgcgaatgtgctgtgagttggccctgtgcaaggtggtcaactcccactggtgagactgggaacgctgggctggggggccagggtcgggggaattatgtgttcatctgttcatctatctgtccatcctcaaagaggactgagcaccatttatgggcaaagcattgttctaggcgctatagagcaaacaggtgaaagaggcctggtccctgccctcagagggcctccaccagaatggggacaaattagaagaaaaaaaaaaaaagccacagagccataatggtgtgtaagtgctgagtaagggtccccccaacctctgtgtgacataaggtcagagagaaggcagagctttgagataagtggggaagaggtgcccccttgggtaggctttgaagactggtttaggttctgatatatggacatagttggcaagaaagacatttcagaagaaggctgtgagaaaggcacatgtgtgatggtgaaaaggcccaggagttttcaggggacattaaagtaggttagtagcaattacatcaggtttagtggagcatgtgcctcataatggggagtggcgggagagatgtctgggcaggaagattagctttagaaactggaaggcctcaaggagtctgaggtcattggtaggccttgggatgccattaaaggtgtcagaaatattgtgatttagaagattaatccataggctgggcacggtggctcacacctgtaataccagcactttgggaggctgaggcgggcagaccacctgaggtcaggagtttgagaccaggctgaccaacatggagaaaccctgtctctactaaaaatacaaaattagccagatgtggtggcacatgcctgtaatcccagctattcgggaggctaaggcaggagaatcacttgaatctgggaggtggaggttgtagtgagccgagatcacacgattgcactctagcctgggcaacaagagtgaaactccatctcaaaaaaaaaaaattaatccataagtagagtgtatgtagtagagtagagggatgtatgttgggggatgactggaatagagccagctgggggctcggaggcatgaaagtcagatcctgaatcagaacagtgacagaagttaggaaggagctactggaaggaccctctcgggaaaggatcagtaggaattgtcagcttattggaaaggagggagcatgtctgtggggagtcacggatgactcaagaggccatgaggctggtggttgggagaccggtggcctcattgacaaccaggaaagtcaggaggaggagccagttggaggtgtgggggcgatggtgagctctgctttacaccagccgagtttaaggtgtcagtgggacattgaagtggaactgggaggtgcggggagtgagctctgagccattccagggactggggatcatgcctggggcacctccatccccatttccctggaatccagaagagttggggggtccgagctccctgtacctcaagtgaccctccatctctctcccatctctgtctctccctggtgtctgtttttcttctcctcctctccttgtctctctcccacacccctccatctctctcccacgtgtctctcccctcaccttctctccccctccatttctctctccctaatctgtctgttccctctgccatggcccccttcttcaagcagcctcccatcttgctcctgcggtccctccttccctgtctctctcacccctgtttccacaccctcacctcctaccacccccctcagcatgttccctggaagctgagggtctctggggctcagtcccggtctctctctttctctctctctctctctgtctccccgacccttccccccagcgtgttcccgagggagctgaaggaggtgtttgcttcgtggcggctgcgctgcgcagagcgaggccgggaggacatcgcagacaggcttatcagcgcctcactcttcctgcgcttcctctgcccagcgattatgtcgcccagtctctttgggcttatgcaggagtacccagatgagcagacctcacgaaccctcaccctcattgccaaggtcatccagaacctggccaacttttccaagtgagggaagcttcaggagtgggcagggcagggagtggcagggcagggagtggcagggctgggggtcggcaagaagggtctcctgagtccccagagatcctgagatggggaggctatgataccttgtgtgtgtgtgtatgtgtgtgtatgtgtgtgtgtgtgtgtgtgtgtgtgtatgtgacctttatcttctgcattcttggctaggtttacctcaaaggaggactttctgggcttcatgaatgagtttctggagctggaatggggttccatgcagcagtttttgtatgagatctccaatctggacacgctaaccaacagcagtagctttgagggttacatcgacttgggccgagagctctccacactgcatgccctactctgggaggtgctgccccagctcagcaaggtcagcagatcccctctttgccctatccccagatggctccagaggttcctggagcctgagaaactaccctttgaagattttttttctccccttgtttctcgaggtgtcaccactactatcccaactcaggccccctccacctgcaccctcagaggccctcttagagctgggcactgagcccccaggtaacagcctcacccttccaggaagccctcctgaagctgggtccactgccccggctcctcaacgacatcagcacagctctgaggaaccccaacatccaaaggcagccaagccgccagagtgagcggccccggcctcagcctgtggtactgcgggggccatcggctgagatgcagggctacatgatgcgggacctcaacaggtgagcaccctgggacagccaggcctgtgccctaggagcccttctcctattctagatactcctcactgggccccacatgcatctctctagggcttgaaagaagggaggaaaaagcaccaagttctcaggggagacgataaggagacaggtacagtcagtggtaggctgagagccctttacagcctgagggagtgagagatttggagctctaggaatagggctgaggctccaccaactcacggcttagttgtaagcctagagcatccctgctgcaagctctgatttgctgtccctctgcctgcccatgctagtccccaggctgaggttcagccagcatgtcatgtcagccatgtgtcaaaatgttcaaacatctcagtaatagctagtgaataagcacttcccccagcccccgaccacaaccccacagacctccccatgatccagcacttagagcagtgacagcagaagcctagcagggcctgcagcctgctccagagtcccagcctccattctgataggtggtgcccgtgcttcatttgctgctcattattttgatgatggccctgctttttcctctgcccgtgtcttcctccatgacaccatacccatcccaccattcccgcctctcctttcatttgtccacatctctctccttctctgtctgtgctcgcccctctttccatctctctccagctccatcgaccttcagtccttcatggctcgaggcctcaacaggtgaggggctctcccctcccccgccctcctctcctctcctgtctgttccctctcccactccactggccttcgccctactcctctcctctcctcctccatggacctcatctcctccatatgtgcccagccctgcccccatcccttctcttgctgcccccatctcccctcctctaggcctcacccccttcccggaggggccctgtcctttccctttactcacctgtcccctcccatcctccctgcctgccctcttcagggctgccaccgctagctctcagcccttccctctgggtcccacttttcaccccaaggcctgtgccagaccacagcaaggttcaattgctaggagccctgaccttaccttctgcttgtgtgcccccttcccttctgacagctctatggacatggctcgcctcccctccccaaccaaggaaaagccacccccaccaccgcctggtggtggtaaagacctgttctatgtaagccgtccacccctggcccgttcctcaccagcatactgcacgagcagctcggacatcacagagccagagcagaagatgctgagtgtcaacaagagtgtgtccatgctggacttacagggtgatgggcctggtggccgcctcaacagcagcagtgtttcgaacctggcggccgtaggggacctgctgcactcaagccaggcctcgctgacagcagccttggggctacggcctgcgcctgccggacgcctctcccaggggagtggctcatccatcacggcggctggcatgcgcctcagccagatgggtgtcaccacagacggtgtccctgcccagcaactgcgaatccccctctccttccagaaccctctcttccacatggctgctgatgggccaggtcccccaggcggccatggagggggcggtggccatggcccaccttcctcccatcaccaccaccaccaccatcaccaccaccgaggtggagagccccctggggacacctttgccccattccatggctatagcaagagtgaggacctctcttccggggtccccaagccccctgctgcctccatccttcatagccacagctacagtgatgagtttggaccctctggcactgacttcacccgtcggcagctttcactccaggacaacctgcagcacatgctgtcccctccccagatcaccattggtccccagaggccagccccctcagggcctggaggtgggagcggtgggggcagcggtgggggtggcgggggccagccgcctccattgcagaggggcaagtctcagcagttgacagtcagcgcagcccagaaaccccggccatccagcgggaatctattgcagtccccagagccaagttatggccccgcccgtccacggcaacagagcctcagcaaggagggcagcattgggggcagcgggggcagcggtggcggagggggtggggggctgaagccctccatcaccaagcaggtaggtgaaggcaggaggaaggcgggctgggtcacaacagggagggaagaaggagatggggggtggggttgaaacagagtctgtggcctgaagttacaatcttcttgcctccttttggccattaaacaaatgtgtatagagggcctgctatgtgccatgtgctatgccaggcactaaggatacggcactgaaccctcttagcactctcattccagaggggattaatccataagtagaatgggggtgactggaatagggccagctgggggcttggaggcatgaagatcagatcctgaatcagaacaacaggagaaattctctggcattcaactcacatctctggcattcagaggtgataaaggctacagcagggcaataggactgggactgtcgtctcctttggctgtgctgttgccctctaaatgtaccctgctttttcccaccttttctttctctgttcgccctcactgtgccttgtcccagcattctcagacaccatccacattgaaccccacaatgccagcctctgagcggacagtggcctgggtctccaacatgcctcacctgtcggctgacatcgagagtgcccacatcgagcgggaagagtacaagctcaaggagtactcaaaatcgatggatgagagccggctggatagggtacgatgggctctaccagctccaagccccagtgtttccttttacccacaggggagatctctagtcacttccaagggaaacctccagggtcagttatggtggtaagaaaaggcaaagacctgatcacctcttgagaagccttccgtccatctggggagaccagatacacacagttgttaaaagtcactttcaactctattttgtaggttatatatatcatagactatctggggatcatctattttaggcttacctccatgttcttccccaggaggaacataagccctggctcctgtgactgcttaggaaaggaaatgttactttactggcagtaggagctaataaattggatggggatggagggggttgcagctatattacaagtgatgtctggcctacccagtcactgtcccatgggcataagtgacagtcagtgggcagggaatgcatgtggtaaagtagtatgtatcagtcatgtgtgaaaagaccatccagaccctcacttggtggaggctgagggcaaagggcaccaagagctctggggctaacacagataacttagcagaaagttacttgaggaagctgttgttcctagggcctgaggaagagggcggctgcaggattaggtcatatataaagaacatatgatcctaacacggggaagtggtctttgagcataggaaatgttgggactgactcagatgggcttgaccagcaaatttaatgagaattaaaccctaatattagccccaaggcagccaccgtaggaagttaattcacatctctcctctgcatgtagaagggttggtgatatatgtatgtatcctcttcagagaatgaggaaatagtcttttgaatcatttttttttctgtgcttcagatgaggaaaccttgttgagaaaggctgtagactagcactatccaatataactttctgcagtgatgaaatgttctgtaatctgtagtgttcacatgtgtctagttgtgattcaggaactgaatttttagatctatttaattttaattttgtaatttttttgagacagggtcttgctctgtcacccaggctggagtgcagtggtgcaaacatggctcgaggcaacctccgcctcctgggctcaagacatcctcccacctcagccccctgagtagctaggactacagggtcgtgctaccatgcctggctagttttttttcttttcttttttttttttttttttttttgtagagacggggttttgccatgttgcccaggctggtctagaacttgtgagctcaagtgatctacctgcctcagccttccaaagtgctgggattacaggtgttgagccactgtgcctggcctaaattttaaatagctacatgtgggctggtggctaccatattagacagcacagctgtagactctagagccaatagggcagataaaatgactcttctgagctcttccagctctggaattcctagattctcagcctagaattcacttgtagacctcctatccttggcaccttgacagagccaaggagagggtcacatggaggacagcacctgcctttcccccgtcaattgccttttcttcctatgtctccagcatgtgttctggggcctggcttagggctgaagagtcaccctatttttaatttctgagcacagttactcaaggtgtgtttgtgagtgtaggtttctgtgtgggtcttcatgaggggccatacatagacctcagggtgtgggagtctgtgaccttgctccattttgagggaacctcagcaccatggcagggtcttctcaaaagcaggtgtgtggatatgatccacaggcagggaaggggttggggaaggcagctggatgtccctcaacatgcagtggctgtgcttggcagacagggatggaggctgggtggtgggcttggggtggggcgcccctcatagtgcggggtcgtgtgcccggcgggcaggtgaaggagtacgaggaggagattcactcactgaaagagcggctgcacatgtccaaccggaagctggaagagtatgagcggaggctgctgtcccaggaagaacaaaccagcaaaatcctgatgcagtatcaggcccgactggagcagagtgagaagaggctaaggcagcagcaggcagagaaggattcccagatcaagagcatcattggcaggtgaggggcggcctggggagggggttgtgagggagagcctgaggctggagagagcaagtgggtgagctactccgctgactcccatccccaaactcaggagcccaccaggagagcccaccactctcctccccaggaagccacccactcactcatcaccagatggagagaaaccccaacctgcttagtgcattaaatatctctttaccaaaccctgacctctcttctgatagagtagcttcggaagcccttggaaaatgtacctgttcctgtccaaccatcactgcatttgcatttaccctaggccagagctccccactagttattctcaacttaacctgtgatgttcactccaaacctaagcagggctccctagccagagtaggccctgcccttcctgggtggaccctccctctctagccttggaaaggtgttctgttagaaagggtcttttagcctgtgtatgttttcagctgctccagcaagtcctgggctccaaagagggtatcctcagcaaagaggtcaattatcttcagagtggtggggtcggggtgggggggaccctgggcgcactccaaccagagccacctccattttgatccattctaaatgtattttatgtaagatttaattagaagaaaagggcttcttgaaatattttttgaaaaccactgctctaattgatatcctttatgataaatcacctcgaggatcttcacagtgaggtgacatgggggatgcagaagccaggtcctcagccatggaaggtctggggaaggggcactgctgtcctgattgggacgatggaggcctggaggtgtctggatggtagaagtctttgaggcacagaaagctgccttagcagggaggtgtaagggttcctgggaggaaggtggagagcatgatcctgaggaacagggagtcttgcatcacggcaatggagggactctgattctaagggataaggatgcctgaggtttttccagagagctatggggttccatgggcaggctctgagcctgtgcccgccactaaccccactgaagcccgtcccttcaggctgatgctggtggaggaggagctgcgccgggaccaccccgccatggctgagccgctgccagaacccaagaagaggctgctcgacgctcaggtggaaattacaatgtcatttatcttctccgtgtcccatccccatccatcccactgtctttcgtgcactcactacaccagccacctagccccatcaccatctgtctctcatagtctgctgtttgtccactggctgctcctggcagccccctagtgaccccatcttcatcccatcgtctgtgcctttgtcactcctggcagcgtcagcccaactcctgtgccttcccatccagtcttcccactcctctctgcatctcaggaccttctctaccagaaccttggtctttctgcccctagaccccacctagttccaagaacccctgccccttctttgctcactcctattcaagccacgttgttcagcttcctctgcgctcttgggccagagggctagaagctgccgttttctggaatagagcacagggcagtatgatctgtagtttctccaggccctggccggtaccctgaaaacttggggacccatcacctctgttctcttggctccctaattttcctgtctccttggcagctcctgcatagcttcctcttcctgactcttcagatcttgaaggccttccatcctgtaacctccctttgccctcagtatttaagtccagcctccctctggcctccctcccactctggccctcagaccttcccagctgcctgctgcccagcctctcttctcacaagccagcttctaggacctcccttctgcacccttaccccttgctttcccaaaattctgctcattttcctacccatactcctctttgctctgactgctaggctccccccgcctgccatccccccaccaaggctcctgaccccatgaccccactctctcccactgcagctcctcatcaggtaattctcctggttccgctttggccacgggcggaggacacagggggaggtgactccggaccactgcaggttggtcgtgaagcccactccctccaacacctccggagcctctcccctctcactgctgccctccacacccagagaacctccacagactccagccctccgacacctgcacagatccatctcccaagacaccacccaaagagagcatttgctgctgcttcccagaactgtccaacaataccttagcaacaccaagagttgggccctagatgggcccagcacattcacaggtcacacccacttccctgcaaaacccaccccctcccagcctcctcctgactctaagccctcctcttcctctacctctccagtgtatgtctgtcaccccccatttcaccagagcgtccttaggggctgggggtgggtttgttaatggggtggaggcaatgatgggttggaggatcttggctataggggctgtgctgactgcagcaggtaggttgggtttccctcttccttccctaatcttggttctctaccctcctttccactcctcacctgattctctctcttcctcctccttatatctgtgaggcagaaggcatctgaagctcatattagcccccattgggtgggaattaggagtgggtagttaactcagggagacttgagataccctggaaaaaatgctattgagatgtcctgacattaggcagggtggatggaacaagaaggagcaagaaaggaacctcaggcagatgttaggacatggacttgatcatgtggcctgggagtttagaaatggggagagacatcctcctagatcagatcgtgggctcagtaggcatgttgattcccagggagaggtgccaggaacagcatggtaaagaatgtactcttcacagctcacatccccaggttgctgatgccactcactccccctctcctgccatcgagtggccttgccggacacatcaccctacctaaaaagccagtaaatgagaacctgtcagctatagccatcatttctgagatgcgattttctttgggattgagctgcagtgggcagtggctccttacactgtaattttaattctctgcctgcccagcctctctgtcaaagtagctggtgatctataaagatgctaaaaggcaccaggggactttgccatttaaaggactcctgcagtgaattcttttgtaaaatgaataatggcaccctaatttatccactttctaaatttgggtccatgggggtgtccagggcatgcttatgtgctgtcaccagcagacaaacagagggaatggaatctgggggttccttccctgctctcccgccatactcaggataccctaccataagtgatttcctctcactgacttgcagaaaatgtgtgagatacccagcaagctaagaaggcagttttgctgggtatctcatacccaaggctggggtttgggtgatctgagaggttagctccttgatcctaggatggaagggagagcttatatagaagcttttacttggaaggttttgtatcctaaggtcagacatagctatattaccaagcctaaatgccatgtggcccaggaaataatttggacatttgttctaaaccacttgtggtaggtattggtctctctgcaactcagccattaattagaaattagttttgagcctgaattttaaaaagccaagtgttgcccccagcccacacacacacacacggacatgtacagtacaaaccccagataattacaacagccaaagagagaaggaagtgaatttcccaaccagaagcgtagggaaattcagatggctttcttttctcccagcagaggaacagaaggcggagctaagggcaggaaccaggagttggtcaaggagctataggaggtgatgagagtagaaccaggggtaggagctggtctggtacccctcaccctctaattgggagcccagggagaaggactgaaaagaagatgggagtggaaaagaataaagccagtttctgcttcccagggatgcagagattggggcatgctgtgtctgcagaagctcctagtcatttccgccataattgtgagagagaggggcagccctcccacaagatttttcccttcccatatcacttccctgaatccccttcctttccccccagtacagttaaacctctctctaatttggaatgttatatttgagaagatggccactgtgaataagtgacaaacggaatgacagtgtctatttaatgaaatgcatgtcttcaaaatatatacagaactcgatgaacaaggctttttccactcctcagggagcatgcattaatgaatagataggattcaaaagtctgttttctggtatgggttaaatatcccctcctacagacatatttccaccactaatttgcttagtacaccttttcttcacagataaaggaaaatgcaagctcagtttttcttcagattatgaagaaattccaaatccacaggggtttggattaatgaggttttgctgtactgcctccccttattcctcaacatgaagttcccacctcggattggggatgggtgggagggggtttcaagaggaggagggtgggatgggcaaggaatatacacaggtgaagccagagaagggttaggttgggggtgcggtgggaacttgctgttttgatctggtttcctggtgtgacactctgggttaaaggcttgaaggcccctgttaggagtctaggggtgagattctcttctctctgatcccagaggacgttaacttctactgcaggtgagaaacaaaataggaggatggtggggactgtcctgggaggagggggtggtccatggcttgtggtgtgggctggctataggggaggccactgctaggggactggcatccaggcccccttgaagcgtctcaataagtccgcgctctcctttttggtgtcttgcaggagaggcagcttccccccttgggtccaacaaacccgcgtgtgacgctggccccaccgtggaatggcctggcccccccagccccaccacccccaccccggctgcagattacggagaacggcgagttccgaaacaccgcagaccactagcccacccagcatcagagaccttctcttcctttcctgtgcaccccaccctgtaacagcaccaaccaccaggattggacatcaccgaggaacagcgggattgcctccccgaatgcctccctgggaggcacactgattgcccacccccaccactgcaccatttccaggagggagagtggggaccctcag

SEQ ID NO: 14357 - DNA, 4040 bp, Homo sapiens
atgggcctaaggcctcccaccccatccccctcagggggctcctgctcaggttccttgccccctccttcccgctgccagcctctccgccgtcgctgctcttcctgctgctttccgggggaataccacttgggtcgctcgaggaggaagagtgtcccaggggggaagcagtacagcatggagggtgcccctgctgcgcccttccggccctcgcaaggcttcctgagccgacggctaaaaagctccatcaaacgaacgaagtcacaacccaaacttgaccggaccagcagctttcgccagatcctgcctcgcttccgaagtgctgaccatgaccgggcccggctgatgcaaagctttaaggagtcacactctcatgagtccttgctgagtcctagcagtgcagctgaggcattggagctcaacttggatgaagattccattatcaagccagtgcacagctccatcctgggccaggagttctgttttgaggtaacaacttcatcaggaacaaaatgctttgcctgtcggtctgcggccgaaagagacaaatggattgagaatctgcagcgggcagtaaagcccaacaaggacaacagccgccgggtagacaatgtgctaaagctgtggatcatagaggcccgggagctgccccccaagaagcggtactactgtgagctctgcctggatgacatgctgtatgcacgcaccacctccaagccccgctctgcctctggggacaccgtcttctggggcgagcacttcgagtttaacaacctgccggctgtccgtgccctgcggctgcatctgtaccgtgactcagacaaaaagcgcaagaaggacaaggcaggctatgtcggcctggtgactgtgccagtggccaccctggctgggcgccacttcacagagcagtggtaccctgtaaccctgccaacaggcagtgggggatctgggggcatgggttcgggagggggagggggctcggggggtggctcagggggcaagggcaaaggaggttgcccggctgtgcggctgaaagcacgttaccagacaatgagcatcttgcccatggagctatataaagagtttgcagagtatgtcaccaaccattatcggatgctgtgtgcagtcttggagcccgccctgaatgtcaaaggcaaggaggaggttgccagtgcactagttcacatcctgcagagtacaggcaaggccaaggacttcctttcagacatggccatgtctgaggtagaccggttcatggaacgggagcacctcatattccgcgagaacacgcttgccactaaagccatagaagagtatatgagactgattggtcagaaatacctcaaggatgccattggagaattcatccgtgctctgtatgaatctgaggaaaactgcgaggtagaccctatcaagtgcacagcatccagtttggcagagcaccaggccaacctgcgaatgtgctgtgagttggccctgtgcaaggtggtcaactcccactgcgtgttcccgagggagctgaaggaggtgtttgcttcgtggcggctgcgctgcgcagagcgaggccgggaggacatcgcagacaggcttatcagcgcctcactcttcctgcgcttcctctgcccagcgattatgtcgcccagtctctttgggcttatgcaggagtacccagatgagcagacctcacgaaccctcaccctcattgccaaggtcatccagaacctggccaacttttccaagtttacctcaaaggaggactttctgggcttcatgaatgagtttctggagctggaatggggttccatgcagcagtttttgtatgagatctccaatctggacacgctaaccaacagcagtagctttgagggttacatcgacttgggccgagagctctccacactgcatgccctactctgggaggtgctgccccagctcagcaaggaagccctcctgaagctgggtccactgccccggctcctcaacgacatcagcacagctctgaggaaccccaacatccaaaggcagccaagccgccagagtgagcggccccggcctcagcctgtggtactgcgggggccatcggctgagatgcagggctacatgatgcgggacctcaacagctccatcgaccttcagtccttcatggctcgaggcctcaacagctctatggacatggctcgcctcccctccccaaccaaggaaaagccacccccaccaccgcctggtggtggtaaagacctgttctatgtaagccgtccacccctggcccgttcctcaccagcatactgcacgagcagctcggacatcacagagccagagcagaagatgctgagtgtcaacaagagtgtgtccatgctggacttacagggtgatgggcctggtggccgcctcaacagcagcagtgtttcgaacctggcggccgtaggggacctgctgcactcaagccaggcctcgctgacagcagccttggggctacggcctgcgcctgccggacgcctctcccaggggagtggctcatccatcacggcggctggcatgcgcctcagccagatgggtgtcaccacagacggtgtccctgcccagcaactgcgaatccccctctccttccagaaccctctcttccacatggctgctgatgggccaggtcccccaggcggccatggagggggcggtggccatggcccaccttcctcccatcaccaccaccaccaccatcaccaccaccgaggtggagagccccctggggacacctttgccccattccatggctatagcaagagtgaggacctctcttccggggtccccaagccccctgctgcctccatccttcatagccacagctacagtgatgagtttggaccctctggcactgacttcacccgtcggcagctttcactccaggacaacctgcagcacatgctgtcccctccccagatcaccattggtccccagaggccagccccctcagggcctggaggtgggagcggtgggggcagcggtgggggtggcgggggccagccgcctccattgcagaggggcaagtctcagcagttgacagtcagcgcagcccagaaaccccggccatccagcgggaatctattgcagtccccagagccaagttatggccccgcccgtccacggcaacagagcctcagcaaggagggcagcattgggggcagcgggggcagcggtggcggagggggtggggggctgaagccctccatcaccaagcagcattctcagacaccatccacattgaaccccacaatgccagcctctgagcggacagtggcctgggtctccaacatgcctcacctgtcggctgacatcgagagtgcccacatcgagcgggaagagtacaagctcaaggagtactcaaaatcgatggatgagagccggctggatagggtgaaggagtacgaggaggagattcactcactgaaagagcggctgcacatgtccaaccggaagctggaagagtatgagcggaggctgctgtcccaggaagaacaaaccagcaaaatcctgatgcagtatcaggcccgactggagcagagtgagaagaggctaaggcagcagcaggcagagaaggattcccagatcaagagcatcattggcaggctgatgctggtggaggaggagctgcgccgggaccaccccgccatggctgagccgctgccagaacccaagaagaggctgctcgacgctcagagaggcagcttccccccttgggtccaacaaacccgcgtgtgacgctggccccaccgtggaatggcctggcccccccagccccaccacccccaccccggctgcagattacggagaacggcgagttccgaaacaccgcagaccactagcccacccagcatcagagaccttctcttcctttcctgtgcaccccaccctgtaacagcaccaaccaccaggattggacatcaccgaggaacagcgggattgcctccccgaatgcctccctgggaggcacactgattgcccacccccaccactgcaccatttccaggagggagagtggggaccctcag

SEQ ID NO: 14358 - DNA, 6015 bp, Homo sapiens
ctctctctcggctgccgctgctgccgttggctcttattctcctcctcctcctcctctctcctcctctctgcttctctctgctcctctctcctcctctctcctcctcctcctcctccacctcctcctccttctccccctctttctccccctctttctctcttctttctcccccgtccccccgccccctccccccaggcctgatgagcaggtctcgagcctccatccatcgggggagcatccccgcgatgtcctatgcccccttcagagatgtacggggaccctctatgcaccgaacccaatacgttcattccccgtatgatcgtcctggttggaaccctcggttctgcatcatctcggggaaccagctgctcatgctggatgaggatgagatacaccccctactgatccgggaccggaggagcgagtccagtcgcaacaaactgctgagacgcacagtctccgtgccggtggaggggcggccccacggcgagcatgaataccacttgggtcgctcgaggaggaagagtgtcccaggggggaagcagtacagcatggagggtgcccctgctgcgcccttccggccctcgcaaggcttcctgagccgacggctaaaaagctccatcaaacgaacgaagtcacaacccaaacttgaccggaccagcagctttcgccagatcctgcctcgcttccgaagtgctgaccatgaccgggcccggctgatgcaaagctttaaggagtcacactctcatgagtccttgctgagtcctagcagtgcagctgaggcattggagctcaacttggatgaagattccattatcaagccagtgcacagctccatcctgggccaggagttctgttttgaggtaacaacttcatcaggaacaaaatgctttgcctgtcggtctgcggccgaaagagacaaatggattgagaatctgcagcgggcagtaaagcccaacaaggacaacagccgccgggtagacaatgtgctaaagctgtggatcatagaggcccgggagctgccccccaagaagcggtactactgtgagctctgcctggatgacatgctgtatgcacgcaccacctccaagccccgctctgcctctggggacaccgtcttctggggcgagcacttcgagtttaacaacctgccggctgtccgtgccctgcggctgcatctgtaccgtgactcagacaaaaagcgcaagaaggacaaggcaggctatgtcggcctggtgactgtgccagtggccaccctggctgggcgccacttcacagagcagtggtaccctgtaaccctgccaacaggcagtgggggatctgggggcatgggttcgggagggggagggggctcggggggtggctcagggggcaagggcaaaggaggttgcccggctgtgcggctgaaagcacgttaccagacaatgagcatcttgcccatggagctatataaagagtttgcagagtatgtcaccaaccattatcggatgctgtgtgcagtcttggagcccgccctgaatgtcaaaggcaaggaggaggttgccagtgcactagttcacatcctgcagagtacaggcaaggccaaggacttcctttcagacatggccatgtctgaggtagaccggttcatggaacgggagcacctcatattccgcgagaacacgcttgccactaaagccatagaagagtatatgagactgattggtcagaaatacctcaaggatgccattggagaattcatccgtgctctgtatgaatctgaggaaaactgcgaggtagaccctatcaagtgcacagcatccagtttggcagagcaccaggccaacctgcgaatgtgctgtgagttggccctgtgcaaggtggtcaactcccactgcgtgttcccgagggagctgaaggaggtgtttgcttcgtggcggctgcgctgcgcagagcgaggccgggaggacatcgcagacaggcttatcagcgcctcactcttcctgcgcttcctctgcccagcgattatgtcgcccagtctctttgggcttatgcaggagtacccagatgagcagacctcacgaaccctcaccctcattgccaaggtcatccagaacctggccaacttttccaagtttacctcaaaggaggactttctgggcttcatgaatgagtttctggagctggaatggggttccatgcagcagtttttgtatgagatctccaatctggacacgctaaccaacagcagtagctttgagggttacatcgacttgggccgagagctctccacactgcatgccctactctgggaggtgctgccccagctcagcaaggaagccctcctgaagctgggtccactgccccggctcctcaacgacatcagcacagctctgaggaaccccaacatccaaaggcagccaagccgccagagtgagcggccccggcctcagcctgtggtactgcgggggccatcggctgagatgcagggctacatgatgcgggacctcaacagctccatcgaccttcagtccttcatggctcgaggcctcaacagctctatggacatggctcgcctcccctccccaaccaaggaaaagccacccccaccaccgcctggtggtggtaaagacctgttctatgtaagccgtccacccctggcccgttcctcaccagcatactgcacgagcagctcggacatcacagagccagagcagaagatgctgagtgtcaacaagagtgtgtccatgctggacttacagggtgatgggcctggtggccgcctcaacagcagcagtgtttcgaacctggcggccgtaggggacctgctgcactcaagccaggcctcgctgacagcagccttggggctacggcctgcgcctgccggacgcctctcccaggggagtggctcatccatcacggcggctggcatgcgcctcagccagatgggtgtcaccacagacggtgtccctgcccagcaactgcgaatccccctctccttccagaaccctctcttccacatggctgctgatgggccaggtcccccaggcggccatggagggggcggtggccatggcccaccttcctcccatcaccaccaccaccaccatcaccaccaccgaggtggagagccccctggggacacctttgccccattccatggctatagcaagagtgaggacctctcttccggggtccccaagccccctgctgcctccatccttcatagccacagctacagtgatgagtttggaccctctggcactgacttcacccgtcggcagctttcactccaggacaacctgcagcacatgctgtcccctccccagatcaccattggtccccagaggccagccccctcagggcctggaggtgggagcggtgggggcagcggtgggggtggcgggggccagccgcctccattgcagaggggcaagtctcagcagttgacagtcagcgcagcccagaaaccccggccatccagcgggaatctattgcagtccccagagccaagttatggccccgcccgtccacggcaacagagcctcagcaaggagggcagcattgggggcagcgggggcagcggtggcggagggggtggggggctgaagccctccatcaccaagcagcattctcagacaccatccacattgaaccccacaatgccagcctctgagcggacagtggcctgggtctccaacatgcctcacctgtcggctgacatcgagagtgcccacatcgagcgggaagagtacaagctcaaggagtactcaaaatcgatggatgagagccggctggatagggtgaaggagtacgaggaggagattcactcactgaaagagcggctgcacatgtccaaccggaagctggaagagtatgagcggaggctgctgtcccaggaagaacaaaccagcaaaatcctgatgcagtatcaggcccgactggagcagagtgagaagaggctaaggcagcagcaggcagagaaggattcccagatcaagagcatcattggcaggctgatgctggtggaggaggagctgcgccgggaccaccccgccatggctgagccgctgccagaacccaagaagaggctgctcgacgctcaggagaggcagcttccccccttgggtccaacaaacccgcgtgtgacgctggccccaccgtggaatggcctggcccccccagccccaccacccccaccccggctgcagattacggagaacggcgagttccgaaacaccgcagaccactagcccacccagcatcagagaccttctcttcctttcctgtgcaccccaccctgtaacagcaccaaccaccaggattggacatcaccgaggaacagcgggattgcctccccgaatgcctccctgggaggcacactgattgcccacccccaccactgcaccatttccaggagggagagtggggaccctcagccgcccccttttccttcccattggggtgctgccctctctttgacccccagggacccttgccccaggacaccgcctaccccgtacagaccccttcactccggggtgctatccccatcctctgcctcatcgttcccctgagcactgggggacagaccctcacccccaccctgggggtgtggcacctccaaactttcaacttcagggtgatttttttagcagtaaccagagctgacaatctaactcccctccaccgccccattttggcctcccctgccccccttgttatggggaggggaccccgggtgagggggccctattaccccttgatttctcaggagcgtctgggggggctcagcacgcacaaactccttctccttctaccactcttaaatttactccctccccacccagaacccagatggggtggagggggccaccggggcagggagggggcggcaaggggggaatgggagttgtctccccttctccccacacctgatctgctctcggctggtcccagagcggggtgagggggcttatgcccccccctcccccagtgtgttgggtggggtggaattgaggttagggtgaggggtcagggtttaggagggtgtgtatgttgggaggacaggctagttgatctgtcctactctgacacacagtcccctctgccccttccttctctcttcttggtctctactcccagggggaggggggaacttactctaggaaaagccatgtctctctcccccagggtggggggacctgtgttggaggaggggtgttggggggcccccttccatgactctgtcccctgggggaggtaggacagggctgggcttccctctcatcctccccctcccaatctccttccacctccctccctcccgccagctccacgatttttcggtgtttctctgtacatagttttctggcgggataggggaggtaggatggatggggtttggggtgggtaggccatgggaggggagaagcccctccttggcaccccctcttccctgactgctgtcccctacccagccttgcccccttcatccttttgcgtttggtattgagactctcctagactctactcctctttcttttgtatggacagttccccttcagtcccatccccctacacatacacccagccggggccaaatttatacttatataaaagttgtaaatatgtgaaattttatccctgtgccctttccccacctcaggccctacccctggaccctccccaaccttccttctctcttctttggctgttgtaattatctggggtttgtactgtacatatccggggtgtgtgtgtgtgggctgggggcaacccttctgtacagagcttcctggccccctccccccccgcccctctgcttccctccccacccaccacctcaagggtagggagttgctcttcctacctgttttattttgttttctcgttctccctccccaccccactcccagccttatctatcccccctcactgtccccttttctccactcccagccccatttcctttttttctggagtgtgtggtgaaacagaaaaaaacatgtttaataaacggagattgttctttta

SEQ ID NO: 14359 - DNA, 7402 bp, Homo sapiens
gaaactctggcaagttgcgggcgcgcggggagctgtcgcgggcagcgcgccctcgggaggacgtggccccggcccccgcccgcagtgggcccgaccctcatggccctgagcaaagggctgcggctgctggggcgcctgggggccgagggggactgtagcgtgctgctggaggcgcgcggccgcgacgactgcctgctgttcgaggccggcacggtggccacgctggctccagaagaaaaggaagtcattaaaggacagtatggcaagctcacggacgcgtacggctgcctgggggagctgaggctgaaatctggtggcacgtctctgagcttcctggtgttggtgacaggctgcacatctgtgggcagaattccagatgctgaaatctacaaaatcactgccactgacttttaccctcttcaggaagaggccaaggaggaggaacgcctcatagctttgaagaaaatcctcagctcgggggtgttctatttctcatggccaaacgatgggtctcgctttgacctgactgtccgcacgcagaagcagggggatgacagctctgaatgggggaactccttcttctggaaccagctgttgcacgtgcccttgaggcagcaccaggtgagctgctgtgactggctgctgaagatcatctgcggggtggtcaccatccgcaccgtgtatgcctcccacaagcaggccaaggcctgcctcgtctctcgcgttagctgtgagcgcacaggcactcgcttccacacccgtggcgtgaacgacgacggccatgtgtccaacttcgtggagacagagcagatgatttacatggacgatggagtgtcatcttttgtccagatcagaggctccgttccgctgttctgggaacagccagggcttcaggttggctcccatcatctgagactccacagaggcctggaagccaatgcccctgctttcgacaggcacatggtgcttctgaaggagcagtacgggcagcaggtggtcgtgaaccttctgggaagcagaggcggagaggaggtgctcaacagagccttcaagaagctgctctgggcttcttgccacgcgggcgacacgcctatgatcaattttgacttccatcagtttgccaaaggtgggaagctagagaaattggagaccctcttgaggccacagttaaagctgcactgggaagacttcgatgtgttcacaaagggggagaacgtcagtccacgttttcagaaaggcactttgcggatgaactgtcttgactgcctggaccgaaccaacactgtgcagagcttcatcgcgctcgaggtcctgcatctgcagctcaagaccctggggctgagttcaaaacccatcgttgaccgctttgtggagtccttcaaagccatgtggtctctgaatggccacagcctgagcaaggtgttcacaggcagcagagccctggaagggaaggccaaggtggggaagctgaaggatggagcccggtccatgtctcgaaccatccagtccaacttcttcgacggggtgaagcaggaggccatcaagctgctgctggttggggacgtctacggcgaggaggtggcagacaaagggggcatgctgctggacagcacggcgctcctggtgactcccaggatcctgaaagctatgactgagcgtcagtccgaattcacaaatttcaagcggatccggattgctatggggacctggaacgtgaacggaggaaagcagttccggagcaacgtgctcaggacggcggagctgacagactggctgctcgactcgccccagctctcgggagctaccgactcccaggatgacagcagcccagctgacatatttgctgtggggtttgaagagatggtggaattgagcgcagggaatattgtcaatgccagtactaccaacaagaagatgtggggtgaacagcttcagaaagccatctcacgctctcatagatacattctgttgacttcggcacagctggtgggcgtctgtctttatatctttgtacgtccataccatgtcccgttcatcagggacgtagccatcgacacagtgaagacgggcatggggggcaaggcggggaacaagggcgccgtcggcatccgcttccagttccacagcaccagcttctgcttcatatgtagtcacctgacggccgggcagtcccaggtgaaggagcggaatgaagactacaaggagatcacccagaaactctgcttcccaatggggagaaatgttttttctcatgattatgtattttggtgtggcgatttcaactaccgcattgatcttacttatgaagaagtcttctattttgttaaacgccaagactggaagaaacttctggaatttgatcaactacagctacagaaatcaagtggaaaaatttttaaggactttcacgaaggagccattaactttggacccacctacaagtatgacgttggctcagccgcctacgatacaagcgacaaatgccgcacccccgcctggacagacagggtgctgtggtggaggaagaaacatccctttgataaaacagctggagaactcaaccttctagacagtgatctagatgttgacaccaaagtcagacacacctggtctcctggtgccctgcagtattatggtcgtgcggagctacaagcgtctgatcacagacctgtgctggcgatcgtggaggtggaagttcaggaagtcgatgtgggtgctcgggagagggttttccaggaagtgtcctccttccagggccccctggatgccactgttgtagtaaaccttcaatcaccgaccttagaagagaaaaacgagtttccagaggacctgcgtactgagctcatgcagaccttggggagttatgggacaattgttcttgtcaggatcaaccaagggcagatgctggtaacttttgcagacagtcactcggctctcagtgtcctggacgtggacggtatgaaggtgaaaggcagagcagtgaagattagaccgaagaccaaggactggctgaaaggtttgcgagaggagatcattcggaaacgagacagcatggcccccgtgtctcccactgccaactcctgtttgctggaggaaaactttgacttcacaagtttggactatgagtcagaaggggatattcttgaagacgatgaagactacttggtggatgaattcaatcagcctggagtctcggacagtgaactcgggggagacgacctctctgatgtccccggccccacagcactggctcctcccagcaagtcacctgctctcaccaaaaagaagcagcatccaacgtacaaagatgacgcggacctggtggagctcaagcgggagctggaagccgtcggggagttccgccaccgttctccgagcaggtctctgtcggtccccaaccggcctcggccacctcaacccccgcagagacccccccctccaaccggtttaatggtgaaaaagtcggcttcagatgcgtccatctcctccggcacccatggacagtattcaattttgcagacggcaagacttctaccaggagcacctcagcaacctcccaaggctcggactggaataagtaaaccttataatgtcaagcagatcaaaaccaccaatgcccaggaggcagaagcagcaatccggtgtctcctggaagccagaggaggtgcctccgaagaagccctaagtgccgtggccccaagggaccttgaagcatcctctgaaccagagcccacaccgggggcagccaaaccagagaccccacaggcgcccccactccttccccgtcggcccccacccagagttcctgccatcaagaagccaaccttgagaaggacaggaaagcccctgtcaccggaagaacagtttgagcaacagactgtccattttacaatcgggcccccggagacaagcgttgaggcccctcctgtcgtgacagcccctcgagtccctcctgttcccaaaccaagaacatttcagcctgggaaagctgcagagaggccaagccacaggaagccagcatcagacgaagcccctcctggggcaggagcctctgtgccaccacctctggaggcgccgcctcttgtgcccaaggtacccccgaggaggaagaagtcagcccccgcagccttccacctgcaggtcctgcagagcaacagccagcttctccagggcctcacttacaatagcagtgacagcccctctgggcacccacctgccgcgggcaccgtcttcccacaaggggactttctcagcacttcatctgctacaagccccgacagcgatggcaccaaagcgatgaagccagaggcagccccacttcttggtgattatcaggaccccttctggaaccttcttcaccaccctaaactgttgaataacacttggctttctaagagctcagaccctttggactcaggaaccaggagccccaaaagagatcccatagacccagtgtcagctggcgcttcagctgccaaggcagagctgccaccagatcatgaacacaaaaccttaggtcactgggtgacaatcagtgaccaagaaaagaggacagcactgcaggtgtttgacccactggcaaaaacatgactgagcagctttgaaggctgcagtcctatagaatgcataccttcctccctctagacatccctccaccagaagagacatctatttaaaggcacactggccaaaacgtttgtgcatctgtcactctcgtgtagtttacaaaaatcgtgtctcttattcagtaagatggttactcagccaccaaaatatatttcactcaaggcttgtacatctgaagtttgctcttcaaggaatgggaaccttcctgttaaattcggtgtatggattttaagaaaggaatctagccaatgaggtccaagaagttctcacccattgaatttttaaatggctgttcagttcatgttgtacgtgatggagatttgtcttttgttttatttgcattttacagatttggtataacattttggggagccacctgaaggttgatgtataaagtaaggattagagaaagaggtcgttgtgaccattagtagctgtcctggcccacttaaacaaggttacaaaaaatcagagtcggaagcagccaaataggtcaacctaatgactagactgtacattcccatgagccttcatgtttaagtgtgtacatgtgcgttaaccttgatgatgcgtgaatcccgagggagccggtggcatacaccgttagcttaaccttagcttaaactagctgaaggctcctgtgccatgtcttagacattgcatgccctatcaattactataatcctgagccatggtgtgctactgaaaccaatttttatccaccatctagtccttattaaatgaaacctcacggatcctttgttccgcttatattccatgcataccacataaaagcacacagtgcgaaaactcttgctgatacgcgatattgattctcattgttagaatatggagagtgtttcagcctcgtctgtccggctggagcttcgggatggaaagtgctatgtgtccctgcatataagaatcaccaggccagtgtttctgggtttgcttgtctatatgtttgtctatattttttgcctatacatttttcccacgtttccaacagcacttctcacctattcaataactgaaaaagacattaccatagtgctttacatttttaaagtaatgttacaaggtctggaatccatttggagcagataccgtgttttcgctatttaataagaagttcagtagtgaaatcttactgtaccgcctgttgtatctgggagcctcgtacagaggctcgcacagcagtgatcaagtgtcatcccttacgtgactgggggatgtctgtcctaaaagctgactgctaggatagtaaggatcatcttgcctgggctatgccactgtcttgttaccaattagacatctggaatttcataattagttttcattgtcactgtcaagatatattgcagattacttaaatatggccatcaaaacaaaagttacaacacgtatctcttttcatctgaaaactaatacctggaaaaggataaaaaaaaaaaggaatccgtgacccacagagctagacagataagatgcatagttgaccagtcataaaaggcggtgtttaggtgatcaggatgccgttggtggcatttacgtgctttatatgatttttacctctgtaacaaacacaagaaataaacagaatggtccttaacagagtttgggggagagagcaagatgggttccttggagaagctgatttgccaagatgcacatcgctattaacagccagagtcataaatgaaatgaaattgaagaattcattcaaatgctcttttccctataacctcttttctcaccaaaaaggagataaatttgaaaacagataaatgtaacaaccagtcaaagaagcaggggaaaagtaagctcctccaaagttgcttgcagtgctggaaatagatctcatttttaggttttctcttcgttccagataccaaataaatgggacagagaataaaatttttgttaaaatatgtgctcatctcctaagtagctcttcagagtctgaccgtaagtaaaaacacacagaattgtgttgactgggggaggtgaatcacaaaaaagttacgaggagtttaagagttaaatattatttgatcgtggctgtcaaatttagtgaacaacatagattggatttggagttggtagtaggtatggttctcataccagaattctcttaaaaaaaaaaaaaaggacaattggaattgccttatttatttttaaaatcaatgcttactagttggtaggattcccaggtcagcagcagggttgattaaataatcttgacaatgagcagctgccatcttgggggatttcattctgtggttttttaaatgtttcgtctttgatgctaccatccagggcttcttattgtgaccttgtagcctattttgttcctgctgttctctaacatggtgcagttcacgcagactggtttaggtacttcacaactcaccattgtctctctgaccccaagcctagtcccttttacatcaccatcttctcagacttcttgcctattcttaaaatatgttttggttaatgattgaattaggacatcagcttaagcaattcctgtaacggtttaacgttgttgaagttcaaggcacataataaaattctccctgatgtgtgtgtaagtataaacaaagtaatgtatcaaagcgttcactttataatgaagtcatttcattgggaaggaaagctgcaaagattattgggggactagtgattaataaaatcctgtaatatttttgaagtgaaaatttgtactgaaattgtacatgatacctattaaatgtttttgtctttttttaaa

SEQ ID NO: 14360 - DNA, 20175 bp, Homo sapiens
cctaattacacattttgggagagcatagccaggaaattgcatctgtgaaaagaaaatacaaattttcctctagatgagtttgtgaacgcctgtgtggccccagcgctctgagaggtggggcctagaatgagtccgagtgttctcagctcctgcagctcttaccataccaattgctgccaaccttctgggattcctgggtcctggaaacccggcagcaacactgtgtctcaagcctacagtgggcatgctggcgaggactgcaggcatggtcatgactgttttgaataattatatgcgaggaatgtttttaaccaaaggccccaaagcatccgaagcctggcttcaaggtggaggagtaaggaggatgagtctgggacgtggggtggttcgtggcgcagacctctattgtggaagtgtcatgatcgcattcttggatattgactcgattctatatgggtctctcgaatggaacccctgcgagtagctggagaactcaaccttctagacagtgatctagatgttgacaccaaagtcagacacacctggtctcctggtgccctgcagtattatggtcgtgcggagctacaagcgtctgatcacaggtgaggtcctgacttccatggcgttttctcctgtgctgggcaaggcagcgtctccctctccgcaggaaaatgcatgctgtccccataaggatgtgtgtgcgcatgggggtgcattttgtgtgcatacaatacaccaaagaacaaagaatgatggaacaaatatctgtggacccaccaccaagaactaattaatcttagcattttgtcattgctccatatcataaatgacatcattgatgaaaatttcaaagatgcaacctacgtattttgcggcttttatattttcttaaatgatgtcgttgtgcaacttgcttttttgttactatttttgagatacagtcgtgttgatgttatagctctggtgcattcatttgtaactgctgtctagtatcccactaaatatatccatggaacttacaacttatccattcacctcttgatgaatattttctccaggattttatgattacaaacaccatagggtttttaaatctgggatgcacaaccttttttttttttttttttttgagagagagtcttgctctattgcccaggctggatggagtacagtggtgtgatctcagctcactgcaacctccgcttcccagattcaagcaattctcctgcctcagcctcccaagtagctgggattacaggtgcacaccaccatgcctggctaatttttgtgtttttagtagagacggggtttcaccatgttggccaggctggtcccaaactcctgacctcaggtgatccacccaccttggcctctcaaagtgttgggattacaggcgtgagccaccgcacctggccctaggatgcagggctttttaaatgctctgtgcatcatgcattgaggatagagtggaggcagcagagggagcaccgtgggcaccagcacctgtgccctgggattgctgcagaggaagactcaccctgcagaatgtctttaaagacagaggagaggatggcatttgagggtgtgaagaaggaagagtttgatcttcccaaggctgctgcctaaactctcatgtcagtttcaacttttacaaggaaagaaattaagaaaaagaaggtaagaacagttggtcaacgaaaaaaccttttttttttttttttgagacagagtcctccaggctggagtgcagtggcacaatcttggctcattgcaacctccacccccagggtataagtgattttcatgtctcagcctcccaagtagctgggattacaggcgtgcatcaccatgcccggctgatttttgtatttttagtagaaacggttttgccatgttagccaggctggtctccaactcctggcctccagtgatgtgcccgcctcagcctcccaaagtactgggattacagccaccatgcccagactctttagataattctaaattctttagatacctgttgttgcaaatacatacctagaagtgaatcttgaggaatcttcagatatgtgacatcaaggtttgctagctcaatgtattttgaaaccttaatttaaccaatatttcttgaggggcccttacatgccaggccctgttgctggcctggagaaaagcagtgaacaaaacagatgagaccatgttatcatggaattttctggacaggacaaacagacaataaacaaacatgtgtgctatgaaagaaaaaaagtagtggcaggagtcaggccagagtcgagctattttcaatcaggctgtgtaattttcgtaatataggattttctggaaatttatagagtaataaccatccctgtgtcagaattactataaggattgcattatttcctgctggactgttttcctgtttacatcattgatttttacattattcctaatgattgcgtagggtattatatgaaggtatcataactgtttccccattaagaaacagagcattttggcctggcgcagtggctcacgcctttatcccagcactttgggaggctgaggcaggcggatcacctaaagtcaggagttcaagaccagcctagccaacacagcaaaaccccatctctaccaaaaatacaaaaattagctggtcatggtggcatgcgcctgtaatcccagctacttgggaagctgaggcaggagaatcacttgagcccgggaggcggaggttgcagtgggctgagatcgcgccactgcactccagcctggacaacagagggagactctgactcaaaataaaaaaaaaaaaaaaaacgagcatttccctttttttttttccctcccatcaacaatgctgtaaatgatcaacctcatgcattaaatctttgtctgaatccctggtcatttccttagaataaagtccgagaagtgagattactaggtgaaaagagatgaacaattttggaactctatgtaaagtgccaagtaaccctctgaaaagcttgcacccctggcagagtgcagatgtctgcttccccacctccttggtggtactgaggattaccatgtcaaaaatctttgctgatggctggttattttccaagtactgggatacatctttaaggtgccacactttattttccccctcaaatcatctttagataaaaatgccaaggtgatactaaggttaaggaaagatgaagactaaaacgccagagcagggcagctagcctgcaaatccacctgctggtggccacattcgcaggttgttggtgttgactgtttacaaagagccctgggggacagcagctggggactgggggctggagatgtggacatctgtcccaggctaactggggactggaggccgggggtgtggacatctgtcccaggctaactgtcatccctcttttgttcctaacgcagacctgtgctggcgatcgtggaggtggaagttcaggaagtcgatgtgggtgctcgggagagggttttccaggaagtgtcctccttccagggccccctggatgccactgttgtagtaaaccttcaatcaccgaccttagaagagaaaaacgagtttccagaggacctgcgtactgagctcatgcagaccttggggagttatgggacaattgttcttgtcaggtaactgctcccctggctgatgtgggttccaggggatgtcgatgaggatccgtgagagctgccaggtcgttcttggcattgacttggagtatcatttattccaggatcaaccaagggcagatgctggtaacttttgcagacagtcactcggctctcagtgtcctggacgtggacggtatgaaggtacgctgtacttggccacactgtggagtggggtctgatcaatccctctttttatgtgggcatgtcttcttcctcctcttgccctgacctgtgccttttttttttttttttttttttttttttttctctgagacaaagtcttgctctgtcattcaggctggagtacagtgatgcaatcacagctcgctgcagccttgaactgccaggcttaagcaatcctcccatctcagcctctcaagtagctgggaccgcaggcacgtgccaccacacccagctaattttttttaaattttgtagagagaggatctcactctgtagccccggctggagtgcattgggacagttatggctcactataacctcagcctcctgggctccagtcatcctcccgcctcgatctcccaatgtgttgagattacaggcatgagctttcatgcctggccaccaatctgtctttatgtatagacgccatatgcgggagggagtttggattcttcactctggttctaaggtgtctcatgtccggctctagctacttgcaaaatagggcggaagggtgggcgcagtggcttatgcttgtaatcccagcactttgtcaggccaaggtgggtagatcacccaaggtcaggagatcgagaccagcctggccaacatggcgaaatcctgtctctagtaaaaatacaaaaattagccaggcgctgggtgtggtggcttacgcctgtaatctcagcactttgggaggctgaggcgggcaaatcatgaggtcaggatttcgagaccagcctggccaacatagtgaaaccccgtctccactaaaaatacaaaaattagccaggcatagtggcaggtgcctgtaatcccagctacttgggaggctgaggcaggagaatcacttgaacccaggaggcagaggttgcagtgagccgagatcgcaccattgcactccagcccaggcaacagtgtgagactctgtctccaaaaaaaaaaaaaaaaaaaaaaaaagtagccagacatggtggcgcgtgcctctagtcccagctactcaggaggctgaggcaggagaatcgcttgaacctgggaggcagaggttacagtgagctgagatcgtgccactgcactccagcctgggtgacagcgagaccctgtctcaaaaaaccaaacaaacagaatggggaagaagaatgtcagtcactgtgtctcacgttggaaggcagctctaccagcagctgcagaagcttagccattttagagtgtagttctcgccgagttacttgatctgtctatgctcgcactgccatgtgggagactattccagtctttctctttagagtatgtattttggaatatgcagctcatagatagtttccgtttttatagtatcttggctttaaatctgtaccaaatgggaagctggagatgagagttcaactttttttttttgagatggagtcttgctctgtcacccaggctagagtgcagtggtgcaatctcggctcaccgcagcttccgcctcccgggttcaagcgattctcctgcctcagcctcccgagtagctgggactacaggcactcaccaccacgcccagctaatttttgtatttttagtacagatcgggtttcaccgtgttggtcaggctggtctcaaactcctgacctcaagggatctacctgcttcggcctctcagagtgctgggattacaggtgtgagccaccgcacccagcccagttcaacttttttttcaaccagatgtatgagagctatgctgagcctgcgtgaggtctggacccttggtttttcagggccaaatgtgaagattggcctcgttgagggtgtgtgggttttggtgagaagcattgtgtgatcaacaggaggggtcatgatttttatttattcctgggtggccgctctgccctcccaggtgaaaggcagagcagtgaagattagaccgaagaccaaggactggctgaaaggtttgcgagaggagatcattcggaaacgagacagcatggcccccgtgtctcccactgccaactcctgtttgctggaggaaaactttgacttcacaagtttggactatgagtcagaaggttagtgaccctgcagggagggacaggcaagccgttcttctagcaacaggcctgagcttttaaggacaccttctaaagcctcccttgcagaagtgacggaggacacccgcagggcaagccctctgtcccatgtgatgagcatgtttgtatgtgtggacgatgcatgccatgctacctgggacccgaggcatctaaacttaggctacaaacagtggctatgaggatatcagggctgtgggtgtaccaatggaactggggtaccgtccctgctggcgcctgggccctgagctgcagggcagggtgcacgtgtcctgacaggagctgaaccagtcccactgatggaagactgagcctttccccctcattgttttcacccgaattgtgattcatttccttctcccaggggatattcttgaagacgatgaagactacttggtggatgaattcaatcagcctggagtctcggacagtgaactcgggggagacgacctctctgatgtccccggccccacagcactggctcctcccagcaagtcacctgctctcaccaaaaagaagcagcatccaacgtacaaaggtagcctgacccttcttttctcaggagcctcagcgatggagtcagctcaggacagactttcctttttctcttggcgattgggcactgtgtgatatcaagtatgcaggtcccaggagagacctcaaccaggcaggccaagcgaggggtagggactgagccctgtggaggtagccagctccaacaccctgatttcctctagttagtttatttttttacaataacttgtacccccataacacaccagattcaagataattcttgtttcctctggatattcaaatggccacggttctgaactggttttatatttgtgattatttcccgcccccaacaaaactcttctgattcagccaggcgcagtggctcacacctgtaatcccagcactttgggaggccgagacaggtggatcgcttgaggtcaggagttcaagaccagcctggccaacatggtgaaaccctgtctctactaaaaatattttttaaaaattagcagggcatggtggtgcacatgcctgtaatcccagctactcaggcagctgaagcaggagaatcgcttgagctggggaggcagaggctgcaatgagccgagatcgccccactgcactccagcttgggtgacaaagtgagattccgtctcaaaacaacaacaacaaaaaaacttctgattcaatcccagtagagacataatccatatctatgtcctgagttgctggcgtatggtcacactcatataatatcatattattatacagtcatgtcatacggtcacatcattgtatcattttagacttcagagggcctgaaaggtcacattgattgaaccacacacccctagattaaataatacaactttttttttttttttgagacagggtctcactgtctcccaggctggagtgcagtgatacaatctcagctcactacaacctccacctcccaggctcaagcgatcctcccacctcagcctcccaagtagctgggactacagggttgcaccagcatgcccagataattttttgcattttttgtagagacggggtctcactatgttgtccaagctggtctcaaactcctgggctcaagtgaccctcctacctgggccttccaaagtgctggaattacaggtgtgagccactgcacctggccagtaactgttctgagtaacttttaaagcccactaatgttacgtggctggcaggtcgggtagttcatatttcagtgtcagctacattgatgctgttccattcatagccaggcatgcctctagctgtcaatcactgagccccgagttggaggacagctctaaccagcaggtgcaggagcttagccacgcattgggcccattgagctggggctgagagcagagaacagggctgaaagtggattaaggtacctctcagggagggtactttgccaggagaggtgcgaagacctccagcccctttgaccgtacgctggtccccacactgaccaataacttgcctataccgaaccatcaggagcttttaaacttatggatttttgagccctaccagagagatctggatttggtaggagtggggtgggaccctggaagcctggcgtttcaccaagctttccaggtggtttggacgcacagctaggtttggggacttctgcccaagactgaagcagcagccttcgccggagcatcgcggtggttctgcacgttgctcctgccaggggcttctgcccgggagttgaagtggctggagggatgtgctcttcccataagaaggacctttctctcgggggtggccgtcatgcaggcagcctctggagccagtgcaggtgtgagcacagatagtcctttgcatgaagaaactaatagcgcaacacgggacacgtgggtggctttgctacctggtgggcattgagagggtcttcccttgatgctgtggggtgttcagccattcccatttgtaggagaaatcctgcctttccccagttccagtctccaggacacatggggtggagctgctggatacagggagtggggtgtccgagtcaaagtgaaatggagaggcccatgctttgggggagccctagggctgctgatttgatctgtaaggaagcaggagctgtgcctcctgaaaacccctcagcctcttggaaggtgtgtgcagggcaggtcaagatggcagacccttgggagtggccagccatgggcccacagggtttgggatttgatgagtaagcaggacccctggtcctaggcactggccactgcatgccaggctgctctgctgccagagcagggagaacaccctcagcttcctcagccggtgtgttctagagtgaggaattgaaaacatctgcctgtggttggttgactcttcaggggttgtggtttgcaactgtctcctccactctgcccaagtcttgttatttcacaagaaaacacactttgaaatagctcagtgtctctcaagtctgagaaatacccattatccatggttcactgaatgttccaagcaggcactgggtgccctccccgcccccgcccctcgccggcagacagaggtgcccgtttctggacagagccttcagctgtcctacagcaggtccccctgccacagtcggcctcctgtgctcagatccgtgtctgacacgctcacgtgtggaacagaccattgtactcatgccccgccatgtcctccagatgacgcggacctggtggagctcaagcgggagctggaagccgtcggggagttccgccaccgttctccgagcaggtctctgtcggtccccaaccggcctcggccacctcaacccccgcagagacccccccctccaagtaagactctgcttgctttcagctccctggatgcctgccaggaataaccgcgcgttccctgctactgaaaacacggctccgaatccacttctccccggccttccggtccccacagggcttcctcctccttgggctccgttttgttgtaaatccaggacacgtttgacgtcagggctggttgtgtttctcatggcaaatgaaacagctcctttccaaagctgctgttcaccctggagctgtgctattgcttcaaactgctctcccttggcagcattagaggatgcagaatgggggccgcagccatgggagggacgtgagcttcgcagtcagaagtctctcctcagctgctgcgcagtcctccctctacttatgaggaatctggtaaacccaggtccccgcctggaggtgacctggtcacccctctgcgctccgaggcctcctgttccccgggctcagaacaagttcccccttatcctgggtctaggagcattttcttctggttgttcgaacaatgctttgcccgtccagccctccctgataacctgaaagcaaagctgtgatgtgcttttgatccacttgcattttcccaccactgtttacttctccctccccaaaaatgtgatgatcagacttagatcttcctaagccattacttcagaattgggctcattgtggctgacgtcacggtagtaaccaatggcaagccacaagcccagatataaaaataacccaaaaataaaatgcataagtcatgtattattgtggaaattttagagataactacaaagaagaacaaaattttaaaattcacttgatgacctacgggtcgtagttgttgaaaaaagtcttctttttccagtttcatgtatctgcagcaacatacttctttttttttttttttttttttaacaaaattaatacccattttctctggtcggttgtcttttatttaatgggttatattttctgtgtcattgaatgttctaaaacatgatttgttaatggctgcaagtatattttaacagtttattcccctgctttggaattttttttttttttttttttttttttttttttttttttttttttgagatgggctcattctgtcccccgggctggagtgcagtggtgcgatctcacagctcactgaagccttgacctccccggctcaagcaatcctcctacctcagcctgccaagtagctaggactgcaggcgcataccatcaggcttggctatttttattcatttatttatttattttgtagagacagtttcaccatgttgcccaggctggggtttttgaaatattttttccccacaaaatattttaaaaatctggtcctagcaatagtatttggaaccatttcaaaatcaattggtttttatatcagatctgaatcccccaagatgttaaagtttgcattctagtaatgcttctccagatcatctacatcaataggcacacactggtagaatcaagtgagaaactccatagagagtcaaggaaggcctggctctgtgggtgccctaagtgccgagtgagtattcggacctcaccgtgtctgtggtctgctgggacatccgcctcgtctagtcgggctcctggcagctggctgggaagttgtgccttcactgagattgagactctgccctcgttggtttttacagccggtttaatggtgaaaaagtcggcttcagatgcgtccatctcctccggcacccatggacagtattcaattttgcagacggcaagacttctaccaggagcacctcagcaacctgtgagttcttctgcatacatttcaatcccaagggttttgcccccgggatagtgtgggatctctcttctcagtgaatatatagatttatgtgtctttaaccctctacctgctcaccatctcatctccaaaccccataacccttcctcgcaggttctccatagggcttttaaatggttgtatggagtgttctagaaaaaatcacttttgatgaaaaatcccaaatatccctggtttccatactcatccatttctctctcttcccattcttgcctctgaccttggtgtatgggcagagcattgcttggtagaagggaaaatgggagaaattcaggtcgttatcctgggaaaatgatgatcattctggagtgaagttggttgagagaagaggctaaaaagagatgtaaataatgaagttggggaacacactaggaagactaacagccatagaggattgtggaggtgcctggttccagagggtaccatgagctgctggggaagagagcaggtgaaggcagggaagtagaggggagagaggggaagctgggtgctagggggaaactgctatgaccgggatgcctctggggtgctgggcctggttaagtgcttgtgcggccccagcaggtggaggggtgactggaggccagtgttttacagtagtgaaaataggtcataaaggcaacccacatgctggatgaagaagtagaaaaagcacttttaaggaaggtattttaacaactcagtgggaccatggaaagagtggcctcttattttgctttctggctttcacctggttattgaaaaaaagatagaagatggtctgtccatatgcaaaaatctgtaatcacccggctttgaagaccagggtcatcaggtctaagtagtatggcactcttggaaagagagtgctccaggaaagagaggattgcagggtgtggtggaggctggagtttgtatggtcagcatcgtctggtggagccctgcacagacccacgggtagcagatacgtcccacgaggctgtcctcctgcctctgctgatactctgctcttcctcattctgtcctcaagcccaaggctcggactggaataagtaaaccttataatgtcaagcagatcaaaaccaccaatgcccaggaggcagaagcagcaatccggtgtctcctggaagccagaggaggtaggtgctttcctgggggcaggggaaaaaccaattctccttttctttttatctccctgctaaaagtggtctagaaacgaaaataactctttttattcttctggaggcaatattaaatgaaaacatcctttagcaacattttatataaatctatactaagattgattgtccatttaaaattgtattttcaaaattctgtgtgtatataaaaatcatcccagggctattaagcggcgtctaaaggagagaccgaaaaaaaccaaaatgagtttttaaaaaaggtgaatgctgccggcatgaagtcattctgccagctttataaaacagagacagttatagtgtttgtcctaatttcaggcacaaaatctaccttttaaatcactggcaagtggaaataaagtttttagtgtcaggcagggacctctttcccaccacattattttttgttgctgttacttaaaccatgttagttaccttgggctctcccccacttcattcataatcactggtaatttacacttttagttttggccttggctttgttccagaatctcctagagaggagagtgtgcccttttcttcgtttttttttttgttttttttttttttttttttgagactgagtttcactctgtcagctggactggagtgcagtggctcaatcccaggtcactgcaacctccgcctcccaggttcgagcaaatatcctgcctcagccacctgagtagctgggactacaggcgcgcagccccatgatgagccaatttttgtattttcagtagaaatgtgatttcaccttgttggccaggctggtcttgaactcccaacctcaggtgattcatccaccttggcctcctaaagtgctgggattacaggtgtgagccaccacacctggccgagtgtgccctttaaaaaggtgtaagcaatcaccattgcttaatttgcttttagtcagcatgtttaacttctttggaattctcaaataatatttaagggggcatgagttaaaaggtcgagaactactgttgtagaatgatactgctacaaatgctttctttttttttattttagaaaaataactaaaactaggccgggcgcggtggctcacgcctgtaatcccagcactttgggaggccgaggcgggtggatcacgaggacaggaaatcgagaccatcctggctaacacggtgaaaccccgtctctactaaaaattcaaaaaattagccgggcgtgatggtgggtgactgtagtcccagctactcaggaggctgaggcaggagaatggctgagcccgggaggtggagctcgcagtgagccaagattgcaccactgcactccagcctgggtgacagagcaagactccgtctcaaaaaaagaaaaaagaaagaaagaaaaataactaaaactatggatataacaacccaagtgtccatcagctgataaatggataaacaaaatgtggtccatcaatacaatggaatattgttcagccattaaaaaaaaaaagaatggggctgggtgctgggtgcagtggctcacgcctgtaatcccagcgctttgggaggccgaggcaggcggatcacgaggttaggagatcgagaccatcctggctaacacagtgaaactccatctctactaaaaatacaaaaaaattagccgggcgtggtggcacgtgcctgttagtcccagttactcgggaggctgaggcagaagaatcatttgaactggggaggcagaggttgcagtgagccaagataacgccactgcactccagcctgggtgacagagctagactctgtctcataaaaaaaaaaaaaaaaaagaatgaagtgctgatacatactacttcatgggtggaccttgaagacattatactatgtgaaagaaagaaaaaaaggccacatagtgtaccatcccctttttatgaaatggccacagcaggcaaattcatggggtcagaaagttcttcttgctttccagggactggaaggaggcctgggtggggagtggctgctgtggggcttcttttttgtgtgatgaaaatgttctggagttagatcgtatgatggttgcacaactttgtggatacactaaaaaccaatgaatggtacacttagaaagggtgaatttcacggtatgtgaattatgtcacaataaagctgttaaaaaaaaaaaaactctagagatgtagatgttagtagaggtgtgaaatctacctacagtcccggcttaacactttcttggtcatggccccattgagattttgatgtctttggatcatctaccctgagaaatgtaagtacacatgagactttgcatatgatctcagggtctcactggtccccatccaaactatccacagaccccagatcaccacccctgctaggaaggtgagcatgaaaacctgggactgctgggtgcggtggctcacgcctgtaatcccagcactttgagaggctggggtgggaggactgcttgaatccaggagttcgagacaagtctgggcaacacaatgagaccctctctctacaaaaattttaaaattagctgggcgtggtggttcacaccagtagtcccagctacttgggaggctgaggtaagaagactgcatgagcccaggagttccagcaacatagtgagacctcatctctactaaaaattttaaaaattggctgggcgtggcagtgctcacccgtaatcccagctactcaggaggctgaaatgggagaattgctcgagcctgggaggttgagactgcagtgagccgtgatcatgccgctgcactccggcctgggtggcagagcgagagcccatcttaaaaaagaaaaaagaaaaaaagctgggactgaatctagctgattactcctgaaatacactgaattagtaaatgacacttaggatgtagactgtctaaggacgaaatcatgcagtgaattgccttgtcctttacacttcagccatgtggttttatgtttcaggtgcctccgaagaagccctaagtgccgtggccccaagggaccttgaagcatcctctgaaccagagcccacaccgggggcagccaaaccagagaccccacaggcgcccccactccttccccgtcggcccccacccagagttcctgccatcaagaagccaaccttgagaaggacaggaaaggtaaaagcctggtaacataaaacctcttactcctaagttgctcacatgtctcgatagataagaattgtggcctgtaatcccagcacattgggaagccgaggcaagcggattacgaggtcaggagttcaagaccagcctgaccaacatggtgtgaaaccccgtctctactaaaaatagaaaaattagccgggcgtggtggcgcacgcctgtaatcccagctactcaggaggctgaggcaggagaatcacttgaacccaggaggcagaggttgcagtgagccgaaatcgtgccactgcattccagcctgagcagcagagtgagactccacctcaaaaaaaaaaaaaacaaaaaaaaaaaaacagatttgcgtctcacagataaaaatctagttccctatggacatcctcacgttcatgagtcccagacacaggtgtgtctttggggaaagttttgacaactgcttcttccctcatatcctactgtgtcttggctctggctgagaagaacgaggagtccactgtctggcacattgtcagtgtgacaagaacagcttggaggtattatgcttcctaagtgttttgagtccccaaagggaaccatagtgggatgcttttccccacatgttctggtaccgcccatttgcgtgtggtctgtgttgtgtgcacatggtttcaaggcattaggaaaacagtaaccgattcccagattcgccatgttcacatgctctcgtgcggcctcagcctacgagaggttccacagcttttcttgccacttttcttgcagattgttttttgctctcgctctcaagcttctcagccttgcttactgcttcaaagacatgagtttgtaaggacagtagcagcccaaagactggcatctgtagacacatctggatcttccgtttgatctcagtgttctagtaacggaccctcggtaatcccttcctggtcatcacagcacgatgctgcttcccccctagagagtgtgaggggggcttcggcttcactcttgacagcgcttgctttgtatttcctgggttgctcttctgtcccacattggctcattgccatctgtcccttgtccatgcttccttacaaagtggacctttttcctccgcctcttccctgttcagatgctcctcgacttaaaatggggttacatcccaataaacccatcgtaagttgaaaaatagcgtgtcaaaactgcatctcatacacctaacctagcaaacgtcatggtctcgctgaccttgaacacactcagaacacatacattagcctacggctgggcaaaaaaaaaaaaaaaaaaaaaaaacacccatccaacacagcctattttataataataaaaataaaagatcaaacttcaaaattcaaagtatgctttctacggaacattagcgcttgtgcactagggtgaagtggaaaatcctcagtggaaccattgtaagtcggggaccacctgctttgtcttttcttgtaaaagccaggagcagaaatagattcattttcccaacctgctgcacaggagttaaagttaaaaggctgttggaaaagagactttcttttttcttagtttgttttctaaagaaccaaagaaacactgaaacgccaatgtttaactagtctactgatcaccttttctgaacaaaagcttcattttgcctgtgcagttgttttctttgtgatagatttgaaccagaaccaaggcagtgtcaaggtttccattctttaccaatatttaagtataaaagattcaaggagctgggcgcggtggctcacgcgtgtaatcccagcactttgggaggctgaggcgggtggatcacctgaggtcaggagttcaagaccagcctgaccaacatggtgaaaccccgtctctactacaaaatacaaaaattagccaggcatggtggcaggcgcctgcaatcccagctactcgggaggctgaagcaggagaatcgcttgaacctgggaggcggaggttacagtgagctgagattgcgccattgcactccagcctgggggacagggcgagactccttctcaaaaaaaaaaaaaaaattcaaggagaaagtatatccattagtccttcagttagcttatgttgtaacacaagttacttcaccctagcatgatacagaccatgaatcagcccaggttgcaacttcaaagagtgttttcagagaggtttgctttcaataaaggaagagcatcaccccatttcctaaaggacaaagaaaagtttgtctgattatttactgtggccctggttttaaattttccactcgttttcattggacctgctggtgtgacctgataaatgtgtgtttctcctgtgctttttctttttcttacctggtcacatttctggcaccccacacattctcaaatctcgaatttgctagaatgtcagcttggtctcatctctgttctctgctggccactctgttctctgatcctcagctgcctagttattggcttcttatttacactctttgtcccaccttttctcagcccctgtcaccggaagaacagtttgagcaacagactgtccattttacaatcgggcccccggagacaagcgttgaggcccctcctgtcgtgacagcccctcgagtccctcctgttcccaaaccaagaacatttcagcctgggaaagctgcagagaggccaagccacaggaagccagcatcagacgaagcccctcctggggcaggagcctctgtgccaccacctctggaggcgccgcctcttgtgcccaaggtacccccgaggaggaagaagtcagcccccgcagccttccacctgcaggtcctgcagagcaacagccagcttctccagggcctcacttacaatagcagtgacagcccctctgggcacccacctgccgcgggcaccgtcttcccacaaggggactttctcagcacttcatctgctacaagccccgacagcgatggcaccaaagcgatgaagccagaggcagccccacttcttggtgattatcaggaccccttctggaaccttcttcaccaccctaaactgttgaataacacttggctttctaagagctcagaccctttggactcaggaaccaggagccccaaaagagatcccatagacccagtgtcagctggcgcttcagctgccaaggcagagctgccaccagatcatgaacacaaaaccttaggtcactgggtgacaatcagtgaccaagaaaagaggacagcactgcaggtgtttgacccactggcaaaaacatgactgagcagctttgaaggctgcagtcctatagaatgcataccttcctccctctagacatccctccaccagaagagacatctatttaaaggcacactggccaaaacgtttgtgcatctgtcactctcgtgtagtttacaaaaatcgtgtctcttattcagtaagatggttactcagccaccaaaatatatttcactcaaggcttgtacatctgaagtttgctcttcaaggaatgggaaccttcctgttaaattcggtgtatggattttaagaaaggaatctagccaatgaggtccaagaagttctcacccattgaatttttaaatggctgttcagttcatgttgtacgtgatggagatttgtcttttgttttatttgcattttacagatttggtataacattttggggagccacctgaaggttgatgtataaagtaaggattagagaaagaggtcgttgtgaccattagtagctgtcctggcccacttaaacaaggttacaaaaaatcagagtcggaagcagccaaataggtcaacctaatgactagactgtacattcccatgagccttcatgtttaagtgtgtacatgtgcgttaaccttgatgatgcgtgaatcccgagggagccggtggcatacaccgttagcttaaccttagcttaaactagctgaaggctcctgtgccatgtcttagacattgcatgccctatcaattactataatcctgagccatggtgtgctactgaaaccaatttttatccaccatctagtccttattaaatgaaacctcacggatcctttgttccgcttatattccatgcataccacataaaagcacacagtgcgaaaactcttgctgatacgcgatattgattctcattgttagaatatggagagtgtttcagcctcgtctgtccggctggagcttcgggatggaaagtgctatgtgtccctgcatataagaatcaccaggccagtgtttctgggtttgcttgtctatatgtttgtctatattttttgcctatacatttttcccacgtttccaacagcacttctcacctattcaataactgaaaaagacattaccatagtgctttacatttttaaagtaatgttacaaggtctggaatccatttggagcagataccgtgttttcgctatttaataagaagttcagtagtgaaatcttactgtaccgcctgttgtatctgggagcctcgtacagaggctcgcacagcagtgatcaagtgtcatcccttacgtgactgggggatgtctgtcctaaaagctgactgctaggatagtaaggatcatcttgcctgggctatgccactgtcttgttaccaattagacatctggaatttcataattagttttcattgtcactgtcaagatatattgcagattacttaaatatggccatcaaaacaaaagttacaacacgtatctcttttcatctgaaaactaatacctggaaaaggataaaaaaaaaaa

SEQ ID NO: 14361 - DNA, 5091 bp, Homo sapiens
cctaattacacattttgggagagcatagccaggaaattgcatctgtgaaaagaaaatacaaattttcctctagatgagtttgtgaacgcctgtgtggccccagcgctctgagaggtggggcctagaatgagtccgagtgttctcagctcctgcagctcttaccataccaattgctgccaaccttctgggattcctgggtcctggaaacccggcagcaacactgtgtctcaagcctacagtgggcatgctggcgaggactgcaggcatggtcatgactgttttgaataattatatgcgaggaatgtttttaaccaaaggccccaaagcatccgaagcctggcttcaaggtggaggagtaaggaggatgagtctgggacgtggggtggttcgtggcgcagacctctattgtggaagtgtcatgatcgcattcttggatattgactcgattctatatgggtctctcgaatggaacccctgcgagtagctggagaactcaaccttctagacagtgatctagatgttgacaccaaagtcagacacacctggtctcctggtgccctgcagtattatggtcgtgcggagctacaagcgtctgatcacaggtgaggtcctgacttccatggcgttttctcctgtgctgggcaaggcagcgtctccctctccgcaggaaaatgcatgctgtccccataaggatgtgtgtgcgcatgggggtgcattttgtgtgcatacaatacaccaaagaacaaagaatgatggaacaaatatctgtggacccaccaccaagaactaattaatcttagcattttgtcattgctccatatcataaatgacatcattgatgaaaatttcaaagatgcaacctacgtattttgcggcttttatattttcttaaatgatgtcgttgtgcaacttgcttttttgttactatttttgagatacagtcgtgttgatgttatagctctggtgcattcatttgtaactgctgtctagtatcccactaaatatatccatggaacttacaacttatccattcacctcttgatgaatattttctccaggattttatgattacaaacaccatagggtttttaaatctgggatgcacaaccttttttttttttttttttttgagagagagtcttgctctattgcccaggctggatggagtacagtggtgtgatctcagctcactgcaacctccgcttcccagattcaagcaattctcctgcctcagcctcccaagtagctgggattacaggtgcacaccaccatgcctggctaatttttgtgtttttagtagagacggggtttcaccatgttggccaggctggtcccaaactcctgacctcaggtgatccacccaccttggcctctcaaagtgttgggattacaggcgtgagccaccgcacctggccctaggatgcagggctttttaaatgctctgtgcatcatgcattgaggatagagtggaggcagcagagggagcaccgtgggcaccagcacctgtgccctgggattgctgcagaggaagactcaccctgcagaatgtctttaaagacagaggagaggatggcatttgagggtgtgaagaaggaagagtttgatcttcccaaggctgctgcctaaactctcatgtcagtttcaacttttacaaggaaagaaattaagaaaaagaagacctgtgctggcgatcgtggaggtggaagttcaggaagtcgatgtgggtgctcgggagagggttttccaggaagtgtcctccttccagggccccctggatgccactgttgtagtaaaccttcaatcaccgaccttagaagagaaaaacgagtttccagaggacctgcgtactgagctcatgcagaccttggggagttatgggacaattgttcttgtcaggatcaaccaagggcagatgctggtaacttttgcagacagtcactcggctctcagtgtcctggacgtggacggtatgaaggtgaaaggcagagcagtgaagattagaccgaagaccaaggactggctgaaaggtttgcgagaggagatcattcggaaacgagacagcatggcccccgtgtctcccactgccaactcctgtttgctggaggaaaactttgacttcacaagtttggactatgagtcagaaggggatattcttgaagacgatgaagactacttggtggatgaattcaatcagcctggagtctcggacagtgaactcgggggagacgacctctctgatgtccccggccccacagcactggctcctcccagcaagtcacctgctctcaccaaaaagaagcagcatccaacgtacaaagatgacgcggacctggtggagctcaagcgggagctggaagccgtcggggagttccgccaccgttctccgagcaggtctctgtcggtccccaaccggcctcggccacctcaacccccgcagagacccccccctccaaccggtttaatggtgaaaaagtcggcttcagatgcgtccatctcctccggcacccatggacagtattcaattttgcagacggcaagacttctaccaggagcacctcagcaacctcccaaggctcggactggaataagtaaaccttataatgtcaagcagatcaaaaccaccaatgcccaggaggcagaagcagcaatccggtgtctcctggaagccagaggaggtgcctccgaagaagccctaagtgccgtggccccaagggaccttgaagcatcctctgaaccagagcccacaccgggggcagccaaaccagagaccccacaggcgcccccactccttccccgtcggcccccacccagagttcctgccatcaagaagccaaccttgagaaggacaggaaagcccctgtcaccggaagaacagtttgagcaacagactgtccattttacaatcgggcccccggagacaagcgttgaggcccctcctgtcgtgacagcccctcgagtccctcctgttcccaaaccaagaacatttcagcctgggaaagctgcagagaggccaagccacaggaagccagcatcagacgaagcccctcctggggcaggagcctctgtgccaccacctctggaggcgccgcctcttgtgcccaaggtacccccgaggaggaagaagtcagcccccgcagccttccacctgcaggtcctgcagagcaacagccagcttctccagggcctcacttacaatagcagtgacagcccctctgggcacccacctgccgcgggcaccgtcttcccacaaggggactttctcagcacttcatctgctacaagccccgacagcgatggcaccaaagcgatgaagccagaggcagccccacttcttggtgattatcaggaccccttctggaaccttcttcaccaccctaaactgttgaataacacttggctttctaagagctcagaccctttggactcaggaaccaggagccccaaaagagatcccatagacccagtgtcagctggcgcttcagctgccaaggcagagctgccaccagatcatgaacacaaaaccttaggtcactgggtgacaatcagtgaccaagaaaagaggacagcactgcaggtgtttgacccactggcaaaaacatgactgagcagctttgaaggctgcagtcctatagaatgcataccttcctccctctagacatccctccaccagaagagacatctatttaaaggcacactggccaaaacgtttgtgcatctgtcactctcgtgtagtttacaaaaatcgtgtctcttattcagtaagatggttactcagccaccaaaatatatttcactcaaggcttgtacatctgaagtttgctcttcaaggaatgggaaccttcctgttaaattcggtgtatggattttaagaaaggaatctagccaatgaggtccaagaagttctcacccattgaatttttaaatggctgttcagttcatgttgtacgtgatggagatttgtcttttgttttatttgcattttacagatttggtataacattttggggagccacctgaaggttgatgtataaagtaaggattagagaaagaggtcgttgtgaccattagtagctgtcctggcccacttaaacaaggttacaaaaaatcagagtcggaagcagccaaataggtcaacctaatgactagactgtacattcccatgagccttcatgtttaagtgtgtacatgtgcgttaaccttgatgatgcgtgaatcccgagggagccggtggcatacaccgttagcttaaccttagcttaaactagctgaaggctcctgtgccatgtcttagacattgcatgccctatcaattactataatcctgagccatggtgtgctactgaaaccaatttttatccaccatctagtccttattaaatgaaacctcacggatcctttgttccgcttatattccatgcataccacataaaagcacacagtgcgaaaactcttgctgatacgcgatattgattctcattgttagaatatggagagtgtttcagcctcgtctgtccggctggagcttcgggatggaaagtgctatgtgtccctgcatataagaatcaccaggccagtgtttctgggtttgcttgtctatatgtttgtctatattttttgcctatacatttttcccacgtttccaacagcacttctcacctattcaataactgaaaaagacattaccatagtgctttacatttttaaagtaatgttacaaggtctggaatccatttggagcagataccgtgttttcgctatttaataagaagttcagtagtgaaatcttactgtaccgcctgttgtatctgggagcctcgtacagaggctcgcacagcagtgatcaagtgtcatcccttacgtgactgggggatgtctgtcctaaaagctgactgctaggatagtaaggatcatcttgcctgggctatgccactgtcttgttaccaattagacatctggaatttcataattagttttcattgtcactgtcaagatatattgcagattacttaaatatggccatcaaaacaaaagttacaacacgtatctcttttcatctgaaaactaatacctggaaaaggataaaaaaaaaaa

SEQ ID NO: 14362 - DNA, 939 bp, Homo sapiens
gcggccgcgacgactgcctgctgttcgaggccggcacggtggccacgctggctccagaagaaaaggaagtcattaaaggacagtatggcaagctcacggacgcgtacggctgcctgggggagctgaggctgaaatctggtggcacgtctctgagcttcctggtgttggtgacaggctgcacatctgtgggcagaattccagatgctgaaatctacaaaatcactgccactgacttttaccctcttcaggaagaggccaaggaggaggaacgcctcatagctttgaagaaaatcctcagctcgggggtgttctatttctcatggccaaacgatgggtctcgctttgacctgactgtccgcacgcagaagcagggggatgacagctctgaatgggggaactccttcttctgaggcagccacaggttttcatctggccttggtgctttggattccccagaagtgaattcctgatttctgccggaagaaggggaccctccccacatccctgtgtccatcccaacgctccccacccccacatcctctttggttctctggtattgtggatatttgggggcagtaatgtgcccagacttcaaaatgcacgtgaatcaaggctgggcatggtagctcacgcctgcaatcccagcactttgggaggccaaggcaggcggatcacctgaggtcagcagtttgagaccagcctggccaacatggtgaaaccctgtctctactaaagatacaaagaaaattagccaggtgtggtggcgcacacctgtaatcccagctacatgggaggctgaggcagaagaatcgtttgaacccaggaggctgagattgcagtgagccgagatcgcaccattgcactccagcctgggctacagggtgagactctgtctcaaaataaataaataaaataaaataaataaaatcgtgaatctca

SEQ ID NO: 14363 - DNA, 26336 bp, Homo sapiens
atcagaaagggggcgagcttaggggcggcattcctcttggggtgtgggtgtgggtgtttggatgctggaggaactcatcttttccccagcttgtggttggcctcatcttaccacctgggcctacccatggcttttgaatttccaccagcctttcggcgagctggcagcaggcgttgaactgacctccccactgagcccctgggtcccgggaagggcctgtgcctgccaagagcaccacgggtacacccctgcagcacctggagactaagactatgctgcccataatcctcttctctgactttcagaagatgtttaggtccctgtccctctgcttgtgttatttgggcagcttggcagtgtcctaggttagcaggtgaaggttagtaaaggttaaaggcaagggcggggtgagggtgagaggtaaagcatttgagaaagggctcagagctgaggagagccaggtttcccaggctcggtgtcctcggcttcacgtgcctttagccctgagctgcttccgcctacaccccttccatcagtcatccccccaaccttgtctgccagcgagcagatgcaccagcaggcctcagtctgtggcatggctgtggaaatgttaacaaatgtgcttgcagcccatgtttctatggactcgtatgcgtcataagtgggcatttgaatgcaagcaggctctggcattgcataaaagtccttttgagaccatctacccagcccagcataaacagctgcccgtttcctagctcttaaagtgcattgattgctgggcacggtgtctcacgcctgtaatcccagcactttgggaggccaaggcaggcagatcacttgaggtgaggagtttgagaccagcctggccaacatggtgaaaccctgcctctactaaaaatacaaaaattagccgggcgtgatggtgggtacctgtaatcccagctactcaggaggctgaggcaggagaattgcttgaacctgggaggccacagttgcagtgagctgagatcacgctgctgcactccagccagggtgacagagcgagactctgtctcaaaataacaataataatttaaaaatgtgttgattgcccagatgacacctcccatgcatggcgtgatggctgcacaggagtggggtgggctggtgggtggtgatgtttgcgccgctcctggtggcagtgagaacctgggcggatgcaggcattgccctgtcttcggcttcatggggtgctcaagtgagcacttcccagttggggtgtgggggagatgtccaggcagcggtgggcagcaggagggaggcggcctcctgaccaggagtcgatgacggccacggtggccactgtgttgagctgatgattttggagcactcagagcagcaggtcccgagctgctgctgggcccttctctgtggcaaagcagggtcacacttctccttcaggagccgacggcatgcgcgtatccttctgttccagggacgtagccatcgacacagtgaagacgggcatggggggcaaggcggggaacaagggcgccgtcggcatccgcttccagttccacagcaccagcttctgcttcatatgtagtcacctgacggccgggcagtcccaggtgaaggagcggaatgaagactacaaggagatcacccagaaactctgcttcccaatggtgagcggcgccgtggggacagccagcacctccctgctcagctcagtcccaaatgtgactgttgataggagccaggcactggggacacaaccacagggagggccccttcctggagggctcagcgctgggggagggggagagggctatgtccctccatggaattgacctggggcagggttagccacgtgcctggagggggccagctttgcagcatttcccgttgctgtacaattcctgagtgtctgcatggccactggatttgtatgtgtgcattttctgattttctaattcaagtgatggtttagggaagaaaaccatgtccgtggtctgtcctgtccaagtggtgaagagcatttgaatccacacagcctaagactccaccttcctgagattcacagtcttcacatgtactttctgtggtggctcagataagcacacccttttgaccaatggaccctttttgactgggaacacggttcttgaccaaggagcccagatcctgcctgtcctcgaagctgcaatagcgaaccgcacactgccctctcgtggcggtccggagggtttcattctgaaactggaggattttcttttcaaatctagacgttaatgttctccttcctgtgcaaagatgctacccgggcacagcttcagcgtgtggtgcacacgaggccacctctttcccgaagtgaggatagacttcagctgttcttgctgcaaaatcttccactgtctgagaggtggtgggttgggtcacagagctcttccctgtgagaacagatccttaaaactgacgtcccattttactgggctgcacgagcactcaaggcaaaatttccttagttttcattaagaagtgccataattcctgttggtgttgtttatttcttatgttaaaaaagaaacaaacgagttgggaaattttcaattgtgtgtaatgcagtttaaaaaaaaaaaaaaagtctaacccttctcacttaaaaatagctactttggggccaggcacagtggctcacacctgtaatcccagcactttgggaggccgaggcgggcagatcacctgaggtcaggagttcgagaccagcctggccaacgtggtgaaaccccacctctactgaaaatacaaaaaaaattagccaggcgtggtggcgtgcacctgtaatcccagctactcaggaggctgagacaggagaatcgcaacccaggaggcagaggttgcagtgagctgagatcgcaccactacactccagcctcggcaacagagcgagactctgtctaaaaaaaaaaaaaaaaaagtgctactttgacatagtaaacttgggatacataataagtaattaaaggatttataatgtagttcttttctaccataaaaatattgagggacctattaacattctacacttcttttttgtttttgttttttgagacagtctcactctgccacccaggctggagtgcagtgacatgatcttggctcactgcaaactccacctcccaggttcaagcaattctcctggctcagcctcctgagtaattgggattacaggcgtgcaccaccaggcccaactagtttttgtatttttagtagagatggggtttcgccatgttggcccagctggtctcgaactcctgacatcaagtgatccgcctgcctcagcctcccaaagtgctgggattacaggtgtgagccatggtgcctggccaacattctacactggtattgtctgataccgtagtcactggccataagtagctatttaaattcaaattaattaaaattaaataacatttaaaattccttgctttccctggccacagtgagaatgatcagtatccatgtggccagtggctcctgcatcagatggcacagagaacatttcggtgctgcagaaagttctgtctgacagtgttatctagacgctcattttatttggttgggacctgtttaatcttctgtccagattattgtcatggggggagtggaaatgcctcatattataggagaagagaagctgattttggagctaggcagatgggagctgaaatcccatctgtatcatgcactagctgtgtaaccttcagcaagtgcctttgtttctgaactttgtttttttttttttaatctaagagagagctggtggtatctgctttgtgcacctggaacagagcccagcccttgcggacagttgatccacagcagctgctgtcattgtcttccccattcctggggaagagacagggaaggcaaggaccccaggagctctccggggctgagctggggccgtgggctcctaggactgggcaggatgggaaggaggagctagagagagatggagaagggtcacctgaaaaagctcaggaagttacatgaaggtgcacatcctgagcatttctgctgctcttttgaaacctcattctcctaacgctgaatgctgggtgctgcttcctaggagtagacactccaaagtaagggtgcatctgatcttcaggacggggatccatggaggaaatgctggccatgttgctctcctccgtttagggtaggagctttcttcaaaccactcagaaacactattatttaaaattaaaaagtaagccatgtaaaaattcctccatagttttatgggatgagtgaaaaacaagatgctctagtagaaaactttcttttttctaagtagcattttgagaaaaatactcctgcttgccccagtgagcttgtttttctcctctctcccaccttccttgcaagatgggctgaatgattatgattttcttttcaacttaggggagaaatgttttttctcatgattatgtattttggtgtggcgatttcaactaccgcattgatcttacttatgaagaagtcttctattttgttaaacgccaagactggaagaaacttctggaatttgatcaactacagctacagaaatcaagtggaaaagtaagttgtgctttaaaaacattttttagcagctgctccaagatggaatgacatctgtgagatgtagaggctggtgcagcaaattcagttccgtgagtggatttcactgtttccaacattgtagaaaataggtgggcttgtgaggttacagtacaggagtggctgttcatacacacttcctgtccttttttttttttttttttttttcctgaggcagagtcttgttcagtcacccaggttggagtgcagtggcactatcttggctcactgcaacctccaccttcctgggttcaagcaattcttgtgcctcagcctcccgagtagctgcgattacaggcgtgtgccgccacacctggctaatttttgtatttttagtagagacgggttttcaccatgttggccaggctggtctcgaactcctggcctcaggtgatctgtgcgcctcagcctcccaaagtgctgggattacaggcatgagccaccatgcccggtcaaccttctcctccttctaatactgttattttagtgcctgtttgcttcctagcaggatgagctgagatgaggggagtacatttaaattccatttagctgtggagaaagaagctggttaaatgtgtgagggccaggtgcggtggctcttgcctgtaatcccaacactttgggaggccgaggcgtgcggatcacctgaggtcaggagttcaagaccagcctggccaacttggtgaaaccccatctctactaaaaatccaaaaattacctgggtatggtggcaggcgcctgtaatcccagctactcaggagactgaggcaggagaatcgcttgaacctgggaggcggaagttgcagtgagccgagatcgcaccactgcactccagcttgggcaacgagcaaaactccgtctcaaaaaaaaaaaaagtgtgaggacagggcagataaggtctctcctgaagcaagatttggacgttcttcgaggtttactgtgtcttcccacttgagccccttccagtgtgtggagtgctaaagggttgccacatggacgagtgaccataccaacctcctaaagcaggttttcctgtcttcctactaccaacattctcacatcctctcagtgatgcccaagagaatgagggtgtgtttgtcccttggtcttcccatggaagcaaggccaatccaaagttaaacaaagaaaagaaggatgtgcatgggggctcacgactgtaaggcgggaggattgcctaagcccaggagtttgagaccagcctgggaaacatagggagactttgtctctacaaaaactaaaattagccaggcatgatggtgcgtgcctgtagtcccagctacttgggaggctgaggcaggaggatcacatgagccccagaggttgaagctgtagggagccgtgattgcaccactgtattccagcctgagcaaaagagcgagaccccagggggagagagagaggagagctgactttcactctgcgcttctatgtacttagctcatttagtcaacaaacatagatgaaggcctcggggttgtgggccagacatggcaccaggcatgggactgtaaagatgagcacccctgacccgtgcctcggaccctgcactgtctcctggggggcaacaagaagacagtggatagatcagacactggagtgggtggggagatagatacgagggcggtgtgtccctcagtgggatgagctgaggatcacttttttgctaattaaaagacacatatgtccagtttcagatagattttcaaatgtaatggagcttctgttactttttaagaatagggacttgccttttcagttttcgtttttgtatataacattcaggatcgaaaactacggtggcctgatgacttctttttctcccaatagatttttaaggactttcacgaaggagccattaactttggacccacctacaagtatgacgttggctcagccgcctacgatacaagcgacaaatgccgcacccccgcctggacagacagggtgctgtggtggaggaagaaacatccctttgataaaacaggtgagggggccgtgcccgttcgagagtcggcagagggtgaataagaaatgcgacggagggagagtcacgtttacccaaccccaggcgctgctacataaatcagtttcttcataaccccagatgacacaaaagtcatcccagaccttaacccctaagctttggaagttgtgctttcagggagcctctgcttctggcctctttttttcccttttcttttcttttttttttttgagacagagtttcactcttgttgcctaggctggagtgcaatggcgtgatcttggctcaccacaacctccacctcctgggttcaagccattctcctgcctcagcctcctgagtgctgggattacaggcatgcaccaccatgcccagctaattttgtatttttagtagagacggggtttctccatgttggtcaggctggtcttgaactcccaacctcaggtgatctgcccacctcggcctcccaaagtgctgggattacaggcataagccactgcgcctggcctcctctggtctctttctagagacagtgacctgcaaataggtctgctcctggctgcccctgcatcacagctcccccccacacccccacctcttttttctgggtggggaaagcggggagcatgaggttgcctccctccctgccccccatgctccccctcatgttctttatccagcctattttgttcagctacacttttacctgcttaaagccctaattccaaattggacacgagcaagacacagtaaaaataagttagtttttaaaaatcattagttgtcaagtatgttttgaacaactgttgatgcccagctaggaagtgaagtttatttaaagttagaatatctgtaactagtacataaaaaaaaaaaaaaaaaaaaaaaaaaaaacctaattacacattttgggagagcatagccaggaaattgcatctgtgaaaagaaaatacaaattttcctctagatgagtttgtgaacgcctgtgtggccccagcgctctgagaggtggggcctagaatgagtccgagtgttctcagctcctgcagctcttaccataccaattgctgccaaccttctgggattcctgggtcctggaaacccggcagcaacactgtgtctcaagcctacagtgggcatgctggcgaggactgcaggcatggtcatgactgttttgaataattatatgcgaggaatgtttttaaccaaaggccccaaagcatccgaagcctggcttcaaggtggaggagtaaggaggatgagtctgggacgtggggtggttcgtggcgcagacctctattgtggaagtgtcatgatcgcattcttggatattgactcgattctatatgggtctctcgaatggaacccctgcgagtagctggagaactcaaccttctagacagtgatctagatgttgacaccaaagtcagacacacctggtctcctggtgccctgcagtattatggtcgtgcggagctacaagcgtctgatcacaggtgaggtcctgacttccatggcgttttctcctgtgctgggcaaggcagcgtctccctctccgcaggaaaatgcatgctgtccccataaggatgtgtgtgcgcatgggggtgcattttgtgtgcatacaatacaccaaagaacaaagaatgatggaacaaatatctgtggacccaccaccaagaactaattaatcttagcattttgtcattgctccatatcataaatgacatcattgatgaaaatttcaaagatgcaacctacgtattttgcggcttttatattttcttaaatgatgtcgttgtgcaacttgcttttttgttactatttttgagatacagtcgtgttgatgttatagctctggtgcattcatttgtaactgctgtctagtatcccactaaatatatccatggaacttacaacttatccattcacctcttgatgaatattttctccaggattttatgattacaaacaccatagggtttttaaatctgggatgcacaaccttttttttttttttttttttgagagagagtcttgctctattgcccaggctggatggagtacagtggtgtgatctcagctcactgcaacctccgcttcccagattcaagcaattctcctgcctcagcctcccaagtagctgggattacaggtgcacaccaccatgcctggctaatttttgtgtttttagtagagacggggtttcaccatgttggccaggctggtcccaaactcctgacctcaggtgatccacccaccttggcctctcaaagtgttgggattacaggcgtgagccaccgcacctggccctaggatgcagggctttttaaatgctctgtgcatcatgcattgaggatagagtggaggcagcagagggagcaccgtgggcaccagcacctgtgccctgggattgctgcagaggaagactcaccctgcagaatgtctttaaagacagaggagaggatggcatttgagggtgtgaagaaggaagagtttgatcttcccaaggctgctgcctaaactctcatgtcagtttcaacttttacaaggaaagaaattaagaaaaagaaggtaagaacagttggtcaacgaaaaaaccttttttttttttttttgagacagagtcctccaggctggagtgcagtggcacaatcttggctcattgcaacctccacccccagggtataagtgattttcatgtctcagcctcccaagtagctgggattacaggcgtgcatcaccatgcccggctgatttttgtatttttagtagaaacggttttgccatgttagccaggctggtctccaactcctggcctccagtgatgtgcccgcctcagcctcccaaagtactgggattacagccaccatgcccagactctttagataattctaaattctttagatacctgttgttgcaaatacatacctagaagtgaatcttgaggaatcttcagatatgtgacatcaaggtttgctagctcaatgtattttgaaaccttaatttaaccaatatttcttgaggggcccttacatgccaggccctgttgctggcctggagaaaagcagtgaacaaaacagatgagaccatgttatcatggaattttctggacaggacaaacagacaataaacaaacatgtgtgctatgaaagaaaaaaagtagtggcaggagtcaggccagagtcgagctattttcaatcaggctgtgtaattttcgtaatataggattttctggaaatttatagagtaataaccatccctgtgtcagaattactataaggattgcattatttcctgctggactgttttcctgtttacatcattgatttttacattattcctaatgattgcgtagggtattatatgaaggtatcataactgtttccccattaagaaacagagcattttggcctggcgcagtggctcacgcctttatcccagcactttgggaggctgaggcaggcggatcacctaaagtcaggagttcaagaccagcctagccaacacagcaaaaccccatctctaccaaaaatacaaaaattagctggtcatggtggcatgcgcctgtaatcccagctacttgggaagctgaggcaggagaatcacttgagcccgggaggcggaggttgcagtgggctgagatcgcgccactgcactccagcctggacaacagagggagactctgactcaaaataaaaaaaaaaaaaaaaacgagcatttccctttttttttttccctcccatcaacaatgctgtaaatgatcaacctcatgcattaaatctttgtctgaatccctggtcatttccttagaataaagtccgagaagtgagattactaggtgaaaagagatgaacaattttggaactctatgtaaagtgccaagtaaccctctgaaaagcttgcacccctggcagagtgcagatgtctgcttccccacctccttggtggtactgaggattaccatgtcaaaaatctttgctgatggctggttattttccaagtactgggatacatctttaaggtgccacactttattttccccctcaaatcatctttagataaaaatgccaaggtgatactaaggttaaggaaagatgaagactaaaacgccagagcagggcagctagcctgcaaatccacctgctggtggccacattcgcaggttgttggtgttgactgtttacaaagagccctgggggacagcagctggggactgggggctggagatgtggacatctgtcccaggctaactggggactggaggccgggggtgtggacatctgtcccaggctaactgtcatccctcttttgttcctaacgcagacctgtgctggcgatcgtggaggtggaagttcaggaagtcgatgtgggtgctcgggagagggttttccaggaagtgtcctccttccagggccccctggatgccactgttgtagtaaaccttcaatcaccgaccttagaagagaaaaacgagtttccagaggacctgcgtactgagctcatgcagaccttggggagttatgggacaattgttcttgtcaggtaactgctcccctggctgatgtgggttccaggggatgtcgatgaggatccgtgagagctgccaggtcgttcttggcattgacttggagtatcatttattccaggatcaaccaagggcagatgctggtaacttttgcagacagtcactcggctctcagtgtcctggacgtggacggtatgaaggtacgctgtacttggccacactgtggagtggggtctgatcaatccctctttttatgtgggcatgtcttcttcctcctcttgccctgacctgtgccttttttttttttttttttttttttttttttctctgagacaaagtcttgctctgtcattcaggctggagtacagtgatgcaatcacagctcgctgcagccttgaactgccaggcttaagcaatcctcccatctcagcctctcaagtagctgggaccgcaggcacgtgccaccacacccagctaattttttttaaattttgtagagagaggatctcactctgtagccccggctggagtgcattgggacagttatggctcactataacctcagcctcctgggctccagtcatcctcccgcctcgatctcccaatgtgttgagattacaggcatgagctttcatgcctggccaccaatctgtctttatgtatagacgccatatgcgggagggagtttggattcttcactctggttctaaggtgtctcatgtccggctctagctacttgcaaaatagggcggaagggtgggcgcagtggcttatgcttgtaatcccagcactttgtcaggccaaggtgggtagatcacccaaggtcaggagatcgagaccagcctggccaacatggcgaaatcctgtctctagtaaaaatacaaaaattagccaggcgctgggtgtggtggcttacgcctgtaatctcagcactttgggaggctgaggcgggcaaatcatgaggtcaggatttcgagaccagcctggccaacatagtgaaaccccgtctccactaaaaatacaaaaattagccaggcatagtggcaggtgcctgtaatcccagctacttgggaggctgaggcaggagaatcacttgaacccaggaggcagaggttgcagtgagccgagatcgcaccattgcactccagcccaggcaacagtgtgagactctgtctccaaaaaaaaaaaaaaaaaaaaaaaaagtagccagacatggtggcgcgtgcctctagtcccagctactcaggaggctgaggcaggagaatcgcttgaacctgggaggcagaggttacagtgagctgagatcgtgccactgcactccagcctgggtgacagcgagaccctgtctcaaaaaaccaaacaaacagaatggggaagaagaatgtcagtcactgtgtctcacgttggaaggcagctctaccagcagctgcagaagcttagccattttagagtgtagttctcgccgagttacttgatctgtctatgctcgcactgccatgtgggagactattccagtctttctctttagagtatgtattttggaatatgcagctcatagatagtttccgtttttatagtatcttggctttaaatctgtaccaaatgggaagctggagatgagagttcaactttttttttttgagatggagtcttgctctgtcacccaggctagagtgcagtggtgcaatctcggctcaccgcagcttccgcctcccgggttcaagcgattctcctgcctcagcctcccgagtagctgggactacaggcactcaccaccacgcccagctaatttttgtatttttagtacagatcgggtttcaccgtgttggtcaggctggtctcaaactcctgacctcaagggatctacctgcttcggcctctcagagtgctgggattacaggtgtgagccaccgcacccagcccagttcaacttttttttcaaccagatgtatgagagctatgctgagcctgcgtgaggtctggacccttggtttttcagggccaaatgtgaagattggcctcgttgagggtgtgtgggttttggtgagaagcattgtgtgatcaacaggaggggtcatgatttttatttattcctgggtggccgctctgccctcccaggtgaaaggcagagcagtgaagattagaccgaagaccaaggactggctgaaaggtttgcgagaggagatcattcggaaacgagacagcatggcccccgtgtctcccactgccaactcctgtttgctggaggaaaactttgacttcacaagtttggactatgagtcagaaggttagtgaccctgcagggagggacaggcaagccgttcttctagcaacaggcctgagcttttaaggacaccttctaaagcctcccttgcagaagtgacggaggacacccgcagggcaagccctctgtcccatgtgatgagcatgtttgtatgtgtggacgatgcatgccatgctacctgggacccgaggcatctaaacttaggctacaaacagtggctatgaggatatcagggctgtgggtgtaccaatggaactggggtaccgtccctgctggcgcctgggccctgagctgcagggcagggtgcacgtgtcctgacaggagctgaaccagtcccactgatggaagactgagcctttccccctcattgttttcacccgaattgtgattcatttccttctcccaggggatattcttgaagacgatgaagactacttggtggatgaattcaatcagcctggagtctcggacagtgaactcgggggagacgacctctctgatgtccccggccccacagcactggctcctcccagcaagtcacctgctctcaccaaaaagaagcagcatccaacgtacaaaggtagcctgacccttcttttctcaggagcctcagcgatggagtcagctcaggacagactttcctttttctcttggcgattgggcactgtgtgatatcaagtatgcaggtcccaggagagacctcaaccaggcaggccaagcgaggggtagggactgagccctgtggaggtagccagctccaacaccctgatttcctctagttagtttatttttttacaataacttgtacccccataacacaccagattcaagataattcttgtttcctctggatattcaaatggccacggttctgaactggttttatatttgtgattatttcccgcccccaacaaaactcttctgattcagccaggcgcagtggctcacacctgtaatcccagcactttgggaggccgagacaggtggatcgcttgaggtcaggagttcaagaccagcctggccaacatggtgaaaccctgtctctactaaaaatattttttaaaaattagcagggcatggtggtgcacatgcctgtaatcccagctactcaggcagctgaagcaggagaatcgcttgagctggggaggcagaggctgcaatgagccgagatcgccccactgcactccagcttgggtgacaaagtgagattccgtctcaaaacaacaacaacaaaaaaacttctgattcaatcccagtagagacataatccatatctatgtcctgagttgctggcgtatggtcacactcatataatatcatattattatacagtcatgtcatacggtcacatcattgtatcattttagacttcagagggcctgaaaggtcacattgattgaaccacacacccctagattaaataatacaactttttttttttttttgagacagggtctcactgtctcccaggctggagtgcagtgatacaatctcagctcactacaacctccacctcccaggctcaagcgatcctcccacctcagcctcccaagtagctgggactacagggttgcaccagcatgcccagataattttttgcattttttgtagagacggggtctcactatgttgtccaagctggtctcaaactcctgggctcaagtgaccctcctacctgggccttccaaagtgctggaattacaggtgtgagccactgcacctggccagtaactgttctgagtaacttttaaagcccactaatgttacgtggctggcaggtcgggtagttcatatttcagtgtcagctacattgatgctgttccattcatagccaggcatgcctctagctgtcaatcactgagccccgagttggaggacagctctaaccagcaggtgcaggagcttagccacgcattgggcccattgagctggggctgagagcagagaacagggctgaaagtggattaaggtacctctcagggagggtactttgccaggagaggtgcgaagacctccagcccctttgaccgtacgctggtccccacactgaccaataacttgcctataccgaaccatcaggagcttttaaacttatggatttttgagccctaccagagagatctggatttggtaggagtggggtgggaccctggaagcctggcgtttcaccaagctttccaggtggtttggacgcacagctaggtttggggacttctgcccaagactgaagcagcagccttcgccggagcatcgcggtggttctgcacgttgctcctgccaggggcttctgcccgggagttgaagtggctggagggatgtgctcttcccataagaaggacctttctctcgggggtggccgtcatgcaggcagcctctggagccagtgcaggtgtgagcacagatagtcctttgcatgaagaaactaatagcgcaacacgggacacgtgggtggctttgctacctggtgggcattgagagggtcttcccttgatgctgtggggtgttcagccattcccatttgtaggagaaatcctgcctttccccagttccagtctccaggacacatggggtggagctgctggatacagggagtggggtgtccgagtcaaagtgaaatggagaggcccatgctttgggggagccctagggctgctgatttgatctgtaaggaagcaggagctgtgcctcctgaaaacccctcagcctcttggaaggtgtgtgcagggcaggtcaagatggcagacccttgggagtggccagccatgggcccacagggtttgggatttgatgagtaagcaggacccctggtcctaggcactggccactgcatgccaggctgctctgctgccagagcagggagaacaccctcagcttcctcagccggtgtgttctagagtgaggaattgaaaacatctgcctgtggttggttgactcttcaggggttgtggtttgcaactgtctcctccactctgcccaagtcttgttatttcacaagaaaacacactttgaaatagctcagtgtctctcaagtctgagaaatacccattatccatggttcactgaatgttccaagcaggcactgggtgccctccccgcccccgcccctcgccggcagacagaggtgcccgtttctggacagagccttcagctgtcctacagcaggtccccctgccacagtcggcctcctgtgctcagatccgtgtctgacacgctcacgtgtggaacagaccattgtactcatgccccgccatgtcctccagatgacgcggacctggtggagctcaagcgggagctggaagccgtcggggagttccgccaccgttctccgagcaggtctctgtcggtccccaaccggcctcggccacctcaacccccgcagagacccccccctccaagtaagactctgcttgctttcagctccctggatgcctgccaggaataaccgcgcgttccctgctactgaaaacacggctccgaatccacttctccccggccttccggtccccacagggcttcctcctccttgggctccgttttgttgtaaatccaggacacgtttgacgtcagggctggttgtgtttctcatggcaaatgaaacagctcctttccaaagctgctgttcaccctggagctgtgctattgcttcaaactgctctcccttggcagcattagaggatgcagaatgggggccgcagccatgggagggacgtgagcttcgcagtcagaagtctctcctcagctgctgcgcagtcctccctctacttatgaggaatctggtaaacccaggtccccgcctggaggtgacctggtcacccctctgcgctccgaggcctcctgttccccgggctcagaacaagttcccccttatcctgggtctaggagcattttcttctggttgttcgaacaatgctttgcccgtccagccctccctgataacctgaaagcaaagctgtgatgtgcttttgatccacttgcattttcccaccactgtttacttctccctccccaaaaatgtgatgatcagacttagatcttcctaagccattacttcagaattgggctcattgtggctgacgtcacggtagtaaccaatggcaagccacaagcccagatataaaaataacccaaaaataaaatgcataagtcatgtattattgtggaaattttagagataactacaaagaagaacaaaattttaaaattcacttgatgacctacgggtcgtagttgttgaaaaaagtcttctttttccagtttcatgtatctgcagcaacatacttctttttttttttttttttttttaacaaaattaatacccattttctctggtcggttgtcttttatttaatgggttatattttctgtgtcattgaatgttctaaaacatgatttgttaatggctgcaagtatattttaacagtttattcccctgctttggaattttttttttttttttttttttttttttttttttttttttttttgagatgggctcattctgtcccccgggctggagtgcagtggtgcgatctcacagctcactgaagccttgacctccccggctcaagcaatcctcctacctcagcctgccaagtagctaggactgcaggcgcataccatcaggcttggctatttttattcatttatttatttattttgtagagacagtttcaccatgttgcccaggctggggtttttgaaatattttttccccacaaaatattttaaaaatctggtcctagcaatagtatttggaaccatttcaaaatcaattggtttttatatcagatctgaatcccccaagatgttaaagtttgcattctagtaatgcttctccagatcatctacatcaataggcacacactggtagaatcaagtgagaaactccatagagagtcaaggaaggcctggctctgtgggtgccctaagtgccgagtgagtattcggacctcaccgtgtctgtggtctgctgggacatccgcctcgtctagtcgggctcctggcagctggctgggaagttgtgccttcactgagattgagactctgccctcgttggtttttacagccggtttaatggtgaaaaagtcggcttcagatgcgtccatctcctccggcacccatggacagtattcaattttgcagacggcaagacttctaccaggagcacctcagcaacctgtgagttcttctgcatacatttcaatcccaagggttttgcccccgggatagtgtgggatctctcttctcagtgaatatatagatttatgtgtctttaaccctctacctgctcaccatctcatctccaaaccccataacccttcctcgcaggttctccatagggcttttaaatggttgtatggagtgttctagaaaaaatcacttttgatgaaaaatcccaaatatccctggtttccatactcatccatttctctctcttcccattcttgcctctgaccttggtgtatgggcagagcattgcttggtagaagggaaaatgggagaaattcaggtcgttatcctgggaaaatgatgatcattctggagtgaagttggttgagagaagaggctaaaaagagatgtaaataatgaagttggggaacacactaggaagactaacagccatagaggattgtggaggtgcctggttccagagggtaccatgagctgctggggaagagagcaggtgaaggcagggaagtagaggggagagaggggaagctgggtgctagggggaaactgctatgaccgggatgcctctggggtgctgggcctggttaagtgcttgtgcggccccagcaggtggaggggtgactggaggccagtgttttacagtagtgaaaataggtcataaaggcaacccacatgctggatgaagaagtagaaaaagcacttttaaggaaggtattttaacaactcagtgggaccatggaaagagtggcctcttattttgctttctggctttcacctggttattgaaaaaaagatagaagatggtctgtccatatgcaaaaatctgtaatcacccggctttgaagaccagggtcatcaggtctaagtagtatggcactcttggaaagagagtgctccaggaaagagaggattgcagggtgtggtggaggctggagtttgtatggtcagcatcgtctggtggagccctgcacagacccacgggtagcagatacgtcccacgaggctgtcctcctgcctctgctgatactctgctcttcctcattctgtcctcaagcccaaggctcggactggaataagtaaaccttataatgtcaagcagatcaaaaccaccaatgcccaggaggcagaagcagcaatccggtgtctcctggaagccagaggaggtaggtgctttcctgggggcaggggaaaaaccaattctccttttctttttatctccctgctaaaagtggtctagaaacgaaaataactctttttattcttctggaggcaatattaaatgaaaacatcctttagcaacattttatataaatctatactaagattgattgtccatttaaaattgtattttcaaaattctgtgtgtatataaaaatcatcccagggctattaagcggcgtctaaaggagagaccgaaaaaaaccaaaatgagtttttaaaaaaggtgaatgctgccggcatgaagtcattctgccagctttataaaacagagacagttatagtgtttgtcctaatttcaggcacaaaatctaccttttaaatcactggcaagtggaaataaagtttttagtgtcaggcagggacctctttcccaccacattattttttgttgctgttacttaaaccatgttagttaccttgggctctcccccacttcattcataatcactggtaatttacacttttagttttggccttggctttgttccagaatctcctagagaggagagtgtgcccttttcttcgtttttttttttgttttttttttttttttttttgagactgagtttcactctgtcagctggactggagtgcagtggctcaatcccaggtcactgcaacctccgcctcccaggttcgagcaaatatcctgcctcagccacctgagtagctgggactacaggcgcgcagccccatgatgagccaatttttgtattttcagtagaaatgtgatttcaccttgttggccaggctggtcttgaactcccaacctcaggtgattcatccaccttggcctcctaaagtgctgggattacaggtgtgagccaccacacctggccgagtgtgccctttaaaaaggtgtaagcaatcaccattgcttaatttgcttttagtcagcatgtttaacttctttggaattctcaaataatatttaagggggcatgagttaaaaggtcgagaactactgttgtagaatgatactgctacaaatgctttctttttttttattttagaaaaataactaaaactaggccgggcgcggtggctcacgcctgtaatcccagcactttgggaggccgaggcgggtggatcacgaggacaggaaatcgagaccatcctggctaacacggtgaaaccccgtctctactaaaaattcaaaaaattagccgggcgtgatggtgggtgactgtagtcccagctactcaggaggctgaggcaggagaatggctgagcccgggaggtggagctcgcagtgagccaagattgcaccactgcactccagcctgggtgacagagcaagactccgtctcaaaaaaagaaaaaagaaagaaagaaaaataactaaaactatggatataacaacccaagtgtccatcagctgataaatggataaacaaaatgtggtccatcaatacaatggaatattgttcagccattaaaaaaaaaaagaatggggctgggtgctgggtgcagtggctcacgcctgtaatcccagcgctttgggaggccgaggcaggcggatcacgaggttaggagatcgagaccatcctggctaacacagtgaaactccatctctactaaaaatacaaaaaaattagccgggcgtggtggcacgtgcctgttagtcccagttactcgggaggctgaggcagaagaatcatttgaactggggaggcagaggttgcagtgagccaagataacgccactgcactccagcctgggtgacagagctagactctgtctcataaaaaaaaaaaaaaaaaagaatgaagtgctgatacatactacttcatgggtggaccttgaagacattatactatgtgaaagaaagaaaaaaaggccacatagtgtaccatcccctttttatgaaatggccacagcaggcaaattcatggggtcagaaagttcttcttgctttccagggactggaaggaggcctgggtggggagtggctgctgtggggcttcttttttgtgtgatgaaaatgttctggagttagatcgtatgatggttgcacaactttgtggatacactaaaaaccaatgaatggtacacttagaaagggtgaatttcacggtatgtgaattatgtcacaataaagctgttaaaaaaaaaaaaactctagagatgtagatgttagtagaggtgtgaaatctacctacagtcccggcttaacactttcttggtcatggccccattgagattttgatgtctttggatcatctaccctgagaaatgtaagtacacatgagactttgcatatgatctcagggtctcactggtccccatccaaactatccacagaccccagatcaccacccctgctaggaaggtgagcatgaaaacctgggactgctgggtgcggtggctcacgcctgtaatcccagcactttgagaggctggggtgggaggactgcttgaatccaggagttcgagacaagtctgggcaacacaatgagaccctctctctacaaaaattttaaaattagctgggcgtggtggttcacaccagtagtcccagctacttgggaggctgaggtaagaagactgcatgagcccaggagttccagcaacatagtgagacctcatctctactaaaaattttaaaaattggctgggcgtggcagtgctcacccgtaatcccagctactcaggaggctgaaatgggagaattgctcgagcctgggaggttgagactgcagtgagccgtgatcatgccgctgcactccggcctgggtggcagagcgagagcccatcttaaaaaagaaaaaagaaaaaaagctgggactgaatctagctgattactcctgaaatacactgaattagtaaatgacacttaggatgtagactgtctaaggacgaaatcatgcagtgaattgccttgtcctttacacttcagccatgtggttttatgtttcaggtgcctccgaagaagccctaagtgccgtggccccaagggaccttgaagcatcctctgaaccagagcccacaccgggggcagccaaaccagagaccccacaggcgcccccactccttccccgtcggcccccacccagagttcctgccatcaagaagccaaccttgagaaggacaggaaaggtaaaagcctggtaacataaaacctcttactcctaagttgctcacatgtctcgatagataagaattgtggcctgtaatcccagcacattgggaagccgaggcaagcggattacgaggtcaggagttcaagaccagcctgaccaacatggtgtgaaaccccgtctctactaaaaatagaaaaattagccgggcgtggtggcgcacgcctgtaatcccagctactcaggaggctgaggcaggagaatcacttgaacccaggaggcagaggttgcagtgagccgaaatcgtgccactgcattccagcctgagcagcagagtgagactccacctcaaaaaaaaaaaaaacaaaaaaaaaaaaacagatttgcgtctcacagataaaaatctagttccctatggacatcctcacgttcatgagtcccagacacaggtgtgtctttggggaaagttttgacaactgcttcttccctcatatcctactgtgtcttggctctggctgagaagaacgaggagtccactgtctggcacattgtcagtgtgacaagaacagcttggaggtattatgcttcctaagtgttttgagtccccaaagggaaccatagtgggatgcttttccccacatgttctggtaccgcccatttgcgtgtggtctgtgttgtgtgcacatggtttcaaggcattaggaaaacagtaaccgattcccagattcgccatgttcacatgctctcgtgcggcctcagcctacgagaggttccacagcttttcttgccacttttcttgcagattgttttttgctctcgctctcaagcttctcagccttgcttactgcttcaaagacatgagtttgtaaggacagtagcagcccaaagactggcatctgtagacacatctggatcttccgtttgatctcagtgttctagtaacggaccctcggtaatcccttcctggtcatcacagcacgatgctgcttcccccctagagagtgtgaggggggcttcggcttcactcttgacagcgcttgctttgtatttcctgggttgctcttctgtcccacattggctcattgccatctgtcccttgtccatgcttccttacaaagtggacctttttcctccgcctcttccctgttcagatgctcctcgacttaaaatggggttacatcccaataaacccatcgtaagttgaaaaatagcgtgtcaaaactgcatctcatacacctaacctagcaaacgtcatggtctcgctgaccttgaacacactcagaacacatacattagcctacggctgggcaaaaaaaaaaaaaaaaaaaaaaaacacccatccaacacagcctattttataataataaaaataaaagatcaaacttcaaaattcaaagtatgctttctacggaacattagcgcttgtgcactagggtgaagtggaaaatcctcagtggaaccattgtaagtcggggaccacctgctttgtcttttcttgtaaaagccaggagcagaaatagattcattttcccaacctgctgcacaggagttaaagttaaaaggctgttggaaaagagactttcttttttcttagtttgttttctaaagaaccaaagaaacactgaaacgccaatgtttaactagtctactgatcaccttttctgaacaaaagcttcattttgcctgtgcagttgttttctttgtgatagatttgaaccagaaccaaggcagtgtcaaggtttccattctttaccaatatttaagtataaaagattcaaggagctgggcgcggtggctcacgcgtgtaatcccagcactttgggaggctgaggcgggtggatcacctgaggtcaggagttcaagaccagcctgaccaacatggtgaaaccccgtctctactacaaaatacaaaaattagccaggcatggtggcaggcgcctgcaatcccagctactcgggaggctgaagcaggagaatcgcttgaacctgggaggcggaggttacagtgagctgagattgcgccattgcactccagcctgggggacagggcgagactccttctcaaaaaaaaaaaaaaaattcaaggagaaagtatatccattagtccttcagttagcttatgttgtaacacaagttacttcaccctagcatgatacagaccatgaatcagcccaggttgcaacttcaaagagtgttttcagagaggtttgctttcaataaaggaagagcatcaccccatttcctaaaggacaaagaaaagtttgtctgattatttactgtggccctggttttaaattttccactcgttttcattggacctgctggtgtgacctgataaatgtgtgtttctcctgtgctttttctttttcttacctggtcacatttctggcaccccacacattctcaaatctcgaatttgctagaatgtcagcttggtctcatctctgttctctgctggccactctgttctctgatcctcagctgcctagttattggcttcttatttacactctttgtcccaccttttctcagcccctgtcaccggaagaacagtttgagcaacagactgtccattttacaatcgggcccccggagacaagcgttgaggcccctcctgtcgtgacagcccctcgagtccctcctgttcccaaaccaagaacatttcagcctgggaaagctgcagagaggccaagccacaggaagccagcatcagacgaagcccctcctggggcaggagcctctgtgccaccacctctggaggcgccgcctcttgtgcccaaggtacccccgaggaggaagaagtcagcccccgcagccttccacctgcaggtcctgcagagcaacagccagcttctccagggcctcacttacaatagcagtgacagcccctctgggcacccacctgccgcgggcaccgtcttcccacaaggggactttctcagcacttcatctgctacaagccccgacagcgatggcaccaaagcgatgaagccagaggcagccccacttcttggtgattatcaggaccccttctggaaccttcttcaccaccctaaactgttgaataacacttggctttctaagagctcagaccctttggactcaggaaccaggagccccaaaagagatcccatagacccagtgtcagctggcgcttcagctgccaaggcagagctgccaccagatcatgaacacaaaaccttaggtcactgggtgacaatcagtgaccaagaaaagaggacagcactgcaggtgtttgacccactggcaaaaacatgactgagcagctttgaaggctgcagtcctatagaatgcataccttcctccctctagacatccctccaccagaagagacatctatttaaaggcacactggcc

SEQ ID NO: 14364 - DNA, 3029 bp, Homo sapiens
atcagaaagggggcgagcttaggggcggcattcctcttggggtgtgggtgtgggtgtttggatgctggaggaactcatcttttccccagcttgtggttggcctcatcttaccacctgggcctacccatggcttttgaatttccaccagcctttcggcgagctggcagcaggcgttgaactgacctccccactgagcccctgggtcccgggaagggcctgtgcctgccaagagcaccacgggtacacccctgcagcacctggagactaagactatgctgcccataatcctcttctctgactttcagaagatgtttaggtccctgtccctctgcttgtgttatttgggcagcttggcagtgtcctaggttagcaggtgaagggacgtagccatcgacacagtgaagacgggcatggggggcaaggcggggaacaagggcgccgtcggcatccgcttccagttccacagcaccagcttctgcttcatatgtagtcacctgacggccgggcagtcccaggtgaaggagcggaatgaagactacaaggagatcacccagaaactctgcttcccaatggggagaaatgttttttctcatgattatgtattttggtgtggcgatttcaactaccgcattgatcttacttatgaagaagtcttctattttgttaaacgccaagactggaagaaacttctggaatttgatcaactacagctacagaaatcaagtggaaaaatttttaaggactttcacgaaggagccattaactttggacccacctacaagtatgacgttggctcagccgcctacgatacaagcgacaaatgccgcacccccgcctggacagacagggtgctgtggtggaggaagaaacatccctttgataaaacagctggagaactcaaccttctagacagtgatctagatgttgacaccaaagtcagacacacctggtctcctggtgccctgcagtattatggtcgtgcggagctacaagcgtctgatcacagacctgtgctggcgatcgtggaggtggaagttcaggaagtcgatgtgggtgctcgggagagggttttccaggaagtgtcctccttccagggccccctggatgccactgttgtagtaaaccttcaatcaccgaccttagaagagaaaaacgagtttccagaggacctgcgtactgagctcatgcagaccttggggagttatgggacaattgttcttgtcaggatcaaccaagggcagatgctggtaacttttgcagacagtcactcggctctcagtgtcctggacgtggacggtatgaaggtgaaaggcagagcagtgaagattagaccgaagaccaaggactggctgaaaggtttgcgagaggagatcattcggaaacgagacagcatggcccccgtgtctcccactgccaactcctgtttgctggaggaaaactttgacttcacaagtttggactatgagtcagaaggggatattcttgaagacgatgaagactacttggtggatgaattcaatcagcctggagtctcggacagtgaactcgggggagacgacctctctgatgtccccggccccacagcactggctcctcccagcaagtcacctgctctcaccaaaaagaagcagcatccaacgtacaaagatgacgcggacctggtggagctcaagcgggagctggaagccgtcggggagttccgccaccgttctccgagcaggtctctgtcggtccccaaccggcctcggccacctcaacccccgcagagacccccccctccaaccggtttaatggtgaaaaagtcggcttcagatgcgtccatctcctccggcacccatggacagtattcaattttgcagacggcaagacttctaccaggagcacctcagcaacctcccaaggctcggactggaataagtaaaccttataatgtcaagcagatcaaaaccaccaatgcccaggaggcagaagcagcaatccggtgtctcctggaagccagaggaggtgcctccgaagaagccctaagtgccgtggccccaagggaccttgaagcatcctctgaaccagagcccacaccgggggcagccaaaccagagaccccacaggcgcccccactccttccccgtcggcccccacccagagttcctgccatcaagaagccaaccttgagaaggacaggaaagcccctgtcaccggaagaacagtttgagcaacagactgtccattttacaatcgggcccccggagacaagcgttgaggcccctcctgtcgtgacagcccctcgagtccctcctgttcccaaaccaagaacatttcagcctgggaaagctgcagagaggccaagccacaggaagccagcatcagacgaagcccctcctggggcaggagcctctgtgccaccacctctggaggcgccgcctcttgtgcccaaggtacccccgaggaggaagaagtcagcccccgcagccttccacctgcaggtcctgcagagcaacagccagcttctccagggcctcacttacaatagcagtgacagcccctctgggcacccacctgccgcgggcaccgtcttcccacaaggggactttctcagcacttcatctgctacaagccccgacagcgatggcaccaaagcgatgaagccagaggcagccccacttcttggtgattatcaggaccccttctggaaccttcttcaccaccctaaactgttgaataacacttggctttctaagagctcagaccctttggactcaggaaccaggagccccaaaagagatcccatagacccagtgtcagctggcgcttcagctgccaaggcagagctgccaccagatcatgaacacaaaaccttaggtcactgggtgacaatcagtgaccaagaaaagaggacagcactgcaggtgtttgacccactggcaaaaacatgactgagcagctttgaaggctgcagtcctatagaatgcataccttcctccctctagacatccctccaccagaagagacatctatttaaaggcacactggcc

SEQ ID NO: 14365 - DNA, 16068 bp, Homo sapiens
agtgcaatggcgcgatctcggctcaccacaacctctgcctcctgggttcaagcaattctcctgcctcagcctcctgaatagctgggactacaggcatgcgccaccatgcccaactaattttttgtatttttagtagagacggggtttttccatgttggtcaggctggtctgaaactccgacctcaggtggtccacctgcctcagcctcccaaagtgctgggattacagccatgagccgccgtgcctggccgacctctcttctcttttaagatgtttctttatgcctcgggacctgctcctcctgcaggaacctgcaggtggggaggtcaaggtgagtgttgcctggttgtcacctgcctgtgctggggagcagggtggggttcccggcacccccaccctgtgccagagaagctcgtcttcattgcttgccggcgagggcctaagtgtttcgaaagtctggtctggggcttctgcccagggcattgtccgcagtactctagaagatgtgccaaggcgggtgggtgaagacagggaccagggcagatgcccgggggcacaggggtgggctgggagttgtcagcaggagaaaaaagccaccgatgtgtgactgtcagtcagtgtggggtgggagggagaggaagggacagtgtgatctgacttgcgaagggagagaacttccaggaagacgtgggcatctctgctcactctgagagactcgggggtgagccggtggtggccggctgtcgtgggtggtcacagccaaactcagctgttcctggagctcaggagccctggggctttaggttctaccacctgtttccttccttctctctcaggggcccccttgccatctgtgacctggctgtggacatctcttgtgacttctggggccgagacaagagcccagtcgcattcctgattctcagtcccacctggctgagatgggaatggctgtatgggttgtctgaattcgggctttccctgagccaagcgcacacctcccttccctgctcacagcagctgttttcagagactgaggatgtttaaagctgccagaaaagcacggttacgttggccattccttttctgggtgttttctgtcatggaatgtttttccctgaactgtgacgattacagtgatcatttccaaatagcatttaggaaaaatacacagtacccacatgacaaagtgcatttatgaaatgtctgtttcgtgccaagagctagccgtacattcacttatttaatcctaaaaataggctaccgtgataatgcatctttgtccccgtttacagtaacgggaacaggctcagaagcttcaagtaacttgccttaggtcagaaacttagttggggtttgaagcgcctccaaacgcttgctttttctgtggaaatgtgcgggctgccgagggttttctgcaggactttccgctctgcagcgatcttcctgaagttgcaggaaatccctgtggcccttgccttccatggtgatgaccgtgaggatggtggcctgcacctgcatgggactcacttaggaacttgttaacacggctcccgaggccacctgtgctgttgtcaccctgccttgcaggtgtggcagggatgccgcgttccatccatgctgatgcccttttttccacatggtagtatctgggcccccaggatgcctcacagtcttggcttccttcagttatagttggcagctgcttttggtccttacatgaatgactcattttgcatccgacagggactgggattcgacgaattacagtaaccggctcaaggtcacgccattctcaagtggtgccctgggttttaaactcatgccttgcggcaccagggactgccttcaaccaccaggctgttctcctttctgaaagggacaggtggctgggctcacaagggggacaggaagtgcagtaccttcccccatcccaggggaaaagtgttttttcccagggctgtgatctaagatcagctgtgggaaattggtcctaaccaggaagggtggcagccccaaagatgtcttattagagcgagccagggtgtctgcgggggtcagcagggtctaatggggcagggagtgctcagagaggagaccacctcccagggctgccctaggcgaggcctcctccctgccttcagccagtccccgccaccccacaccccacagaagggaatgaggcttcttgtggaccatgcgagaccagccctgctccgaggctttgggtgcccccaacccctgcccacctgtgagagtcaccccccggagtgggttggagtttctctgagtgtggtgtgtatgagtttgactttggcgatgtcaggataatttggtctgttttcaacacattctggaaagcaccctgagcatctgaaggatggaaggattgggctttaaatcaagttttttcagtccccattggttatcttaaggggcgtttgactttaacttgattttctttttcccctgtaagtccctgacccagaactgtgatctattttcttttgtgttttcagctgttgagcatgttgggcagcacggagtgtagctacaactgtgtgaccccacctgtgtgactgactccacctgtgtgactccagtcgtgtgaccaactacaactgtgtaactgactccaattgtgtgactaactccacctgtgtgactctgcgtgactccaactgtgactccatctgtatgactccaattgtgtgacccccacctgtgtgactctgactgtgtgacccccacctgcgtgactctgactgtgtgacccccacctgcgtgactctgactgtgtgacccccacctgcgtgactccgactgtgtgacccccacctgtgtgactccaactgtggactgactctaactatgtgactgactccaactgtgtgactaactccacctgtatgactccaactatatgattgacttcaaccgtgtgaccccacctgtgtgactccaattgtatgactgactctaactgtgtgactccaactgtgactccatctgtatgactgacctcaactgtgtgaccccacctgtgtgactccaactgtgtactgactctgtgtgactgactccacctgtatgactccaactatatgactgacttcaaccgtgtgaccccacctgtgtgactccagttgtgtgactgatttcactgcgtggctaactccactgttgcctgactccagctgcgtgacttcagctgtgtgactccatgtatgtgaccctagctgtgtgactccaactttcagttgccacgaagacaaccagctgagtcaggagtgggcctccctttcaatgtttttagctaagcatctctgcgcaaagaaagaggcttccccacaggctcttaatttgggacaagttttcccttagtttgggaaaaatttcaatctacctaaattagccttttacattagaaatcgagaaatatgcacaaaaattcataaaagcctttttccaggttccaaggtttttgtagaaagcccaaagttcccctttccttcctgaaatgccagcaggaaggggttggagctcccgtgattagccagggagtcaggcttcctgaagtttacacaatacaaagcatattaagtgagaatgtagcagaaaaaagaacttatcccaatgattatagcaatttaaattctcttgaacccaagctctcaaggcctacctgttttatagcctcaagggactctactcctatcccagactataatgaattgtgtctcctggagttgtgcagtacgcaacctgtgaagctgtacacgacagccctataaattctctagcagacagccctcctagattctagttcccacttcacagctgaactgcatttaatctctgtaggactgttttcctgtctgtaaacctgggaaaactgcctcatctctatgttgcctagttctcaggaggtccacatgggccatgcacatggtagccatgaagagtgtggagtgctcctccaacaccaggcgggctggccacaggcagtttcttagagtgtggcctggggacgctgccaccactgagaagctctgctgtctctcctctgtccctgggagggctggagggaggagggtgctgagtgagagggacctggcctgcagagggctgaggacgaggtgtgagctggaaggccaggctgtgtggcctcggggtgtggactcctggtggggggctcctctgcacaggctagcagagggctggtttcatgggcagtcacttcagaaggaggattccctggaggggagtttgaacccttagtcttttgggatgcagtgttctctagcaagtcttgaagcgaactggcctttgtcggtcttagattaatttaattcctgtgcccagtggtgggatattaccaagagagttgacacccagctccctgagggggaagctctgagatgatgcagcatttgccagtttccaaggtgtaaattcacgggccagggctgatttcaggttcccagcgtggagctgaggaaggatctgcaccaggggtgctcactgcgggtgttcactgctgtggccgccgctgcctacacctccctcatgttctgcagaagggaggcgggagaaggccctgagaccatgccgcatgggcacacagtgcttagggttctgaacctgcgggtggcgggggaggctcaagggtcatctggccgaagcttcccccttcacaggtgggaaagcctagacatctttagtcctttgtttggagctttaagtctgagggtgtctgtgtgagcagagggacagataggatggctggagggaccccagggttgggattggcacagaccaggctgggaaggtgaactcagagctgagacaacacaaggaaatgccagcccagagccttgtgggaggcctggggtggtcccggtaaacggggccttgggtctgcaagccacgtatcatgactccaacagccagctttcctggcctgataacaaattgcctaggacctgccactggctcttgcctccctccacctcactctggcagctccctctgacccatgcatggctttgctttggccagagccctggaaccaaagccctttacctggaggggacattgagactattggcgcatcctcctgggaggcccagagagggtaagagccttgcctgaggccacacaggccactggaggtgtgcagagcctggagccccactcttctgagttttgtttttccacttgctatgagatccttgatggtttcagggccctggtctctccctcagctgaggactgccaagaaccccgcaagcctagttagcttcttggctgtcagagaattgatcctgcctcacaaaagcaaatcctgtgctctaggtgagcatcgggaggggcctcacacacctggggcaggtggggaccagtggcttgtaccacactgacggtggcccgggagtcagcgaccccccacagcctggtgctaggctcaagccaggacactttccttaaaacccatagtacaggccaggcatggtggctcatacctgtaatcctagcacctcagggggccgaggcaggaggatcacttgagcctagaagttcaagaccagcctgggctatgtagcaagactatgtctctacatagtgatggtatctacagcaccatgccaggagcggtggtgcacgcctgtagtcccagctacttgggaggctgacatgggaggatcgctggaacccagaaaggggaagttgcagtgtactgagatcaagtcactgcactccagcctgggtgacagtgcaagaacctgtctctaaatttaaaaaaaaaaaaaaaagcaaacaaacaaaaaacccatggtatacagagaacacagtcaggcagtcaggctgtcaatgagattaggcaggacacagtgaggctgggattgaaggaggaggaagccatcagtgctgggtcaggtaggcagggcggggccttcccggagaggcagcgctccacacagcggtcctgaggtttgggtaaggctcttccacagaggcctctgtggttacacccgtcccaccaactgtctgggacacacaggcaggggcagttctaaggaaaagtgtccaggtccttggcttttttctatcatggagcacctgtgatggaggacagggttcttattcccctctgaggtctccctgcttccatgttagggtagagggtaggcccttctctcttctggaagctcaccgtgtgccgtgctccaggaagtaactccccctaggattccagacaaagggacagttcaaaagcttgtcaacagcattgcaataaggtcaggactaggtagcaatctgtttgcaagtcaggtgatgtccaattgtttgcttcccccataacggaaggagaatttaattggggtatcagctgacacattagtaaccattttatcagcaggttattgtcatttcttagcgctaactcagaaggactttgaagaatcgagtgacatttctacaatgaagccctttccattcccatctatttattaatgtgaacaggatcttttagtgtttgcgtctacaaaaatgaaaactagaattagaattggtgcagaacctactttcattccttcaataaatatttattcatctcattaagagatgcctttccaacacattatgactttttgtatcaaatgattatttgtcggccaggcacggtggctcatgcctgtaatcccagcactttgggaggccaaggtgggcggaccactagaggtcaggagttctagaccagcccagtcaacatggtgaaaccccatctctactaaaaatacaaaaattagctgggcatgggggctcatgcctgtaatcccggctactcaagaggctgaggcagtaaacctgaaaggcgaaagttgaacccgggagacagaggttgcagtgagcccagattgcgccactgcactctagcctgggcgacagagcaagactgtcacctcccagagaccccacctcctaaaaccatcgccttgggtgttcatacttcagcatattaatttgggggtgcacacattcagccaatagcaggtacactggttgaccacactcttaaagaggacagccaaaaaaaattatttggcagtgttttatttacattgtattgtttacattgtttgaccagttaggtatcactggaacgataaaccagaacgctctctttttaaacacttggagttgaggaacacacggctgcaggggctgatggggtgatcagaacaggacgtagaagcaccagatatgctacattaggatggaattctgaagaggggggactggaaatatgagtgaaagttccatgtggtaagaaagagcatgctcctgcaatcctgtaaataatagatggcaatgagtatcacgttactgtgtagattccatgggatactgacaagaggctcccagagttttagttttacgtgtcaatatttagaatacactgcacaatatattatttacaggcatttcaactaccgatgaaaaccttcaatggcagttttaaaatgggcagggaacgctgtctgagtccagtgtgttgctgtgacaaagttccgtagtagacggggtggcttatcagcaacagacatttatttcgcgcagttctggaggctggaagtccgagaccagcggcccgcagattggccggctgtgaggacctgcttcttgctccatagatgctgccttttctctgcatctgacatggtgggagaggtgcaggagatctctgggcacaaaccccattcatgagggctccactgccataacccagtcacctcccaaatacccccaccacctcaaaccatcaccttgggtgttcgtacttcagcatattaacttgggggtgcacacattcagtcaatagcaggtacactggttgaccacactcttttaaagggtacagcaggccaggtgcagtggttcacacctgtaatcccagcactttgggaggctgaggcaggtgaatcacctgaggtcaggagttcgagaccagcctggccaacatggtaacaccccatctctaccaaaaatacaaaaaattagccggtataatcccagcaactcgggaggctgaggcaagagaattacttgaacccaggaggcggaggtagcagtgagctgagattgcaccactccactccagcctgggcaacaagagtgaaactccatctcaaaaaaaaatagccgggcgtggtggctcacgcctgtaatcccagcactttgggaggccgaagcaggcagatcacctgaggtcgggagtttgagaccagcctgacctacatggagaaatcccatctctactaaaaatataaaattagctgggcgtggtgacgcatgcttgtaatctcagttactccagagggtgaggcaggagaatcactagaacctgggaggcagaggttgcggtgagccgagatcacaccattgcactccagcttgggcaacaagagtaaaactctgtctcaaaaaataaataaataaataatacatgcatacatacatacatacgtacatacatacatacatacagggtacagcaaactaatccgattggaaactgccggactttggggctagatggagcatgggcttaaagtgaaacctacattttggctccaacacagactagctgtgtgcttgggcgggtgattcagcttccctgggggacagtcatgcgtgtgtgaaatggcagtggtagccctgagacagcagcatgggtaagcaggctggcgacgtcatctgcaaggaggtgtaattaggagcaccagctctggggccagacttggcttgagaaacttgcccaggcactgtagctagaaagtggatttggatcccagctccccgctctgtcaccttgggcaggctgcttaacctctctgtgcgtctgtttccctccctgtgagatggggctggtaagggcgccccttgcggtgggcgggaggatggagtccgcgcctgtacagctcccctgcctccactgcgctcaccagataccggctctcctcactcccctgtaccactcccgaccccctcctccctggacccaggagccccagtgctctgtggcaatgttaagagcctctcctggctgctacagtgctcctctccccagcctcccccaggccgtggtcctgcccaggaaatgcacctgggactgttgccaggcactcaggccccccacacggaggctgttgaggaagtggtgctagaaatcagctcatgactctcacggagtgatgtcatgcaaaattttccatagctctggcagccacaggggccatcctcctgcctctccgagggcacttctgctgaactgtgcttttccctgcactgtgtcagaagaggcaggtgggtgccgggagcgctctgtggccaaggctctgatcacaagctgccaaccccggaaccccacctatcctacttgagaagctgaactctgacccctgtccctgtccccagtgtgataacttcctttgttcttaggtggttttgaggtggtttcctgaggatgtgtctggggagatgtgatgggatcaaccccctgccctgctggcagccccaccccatggcatagcagcaggcccctgggagccctgagcgctcattaaaggaacgcactttaatgacagccacacgccaccctgccacaagcagcgctcttctccctatgaagtgtggtgaggaaattggggtgagagggtggtggaactggttgttttgggggtctcttcctggagtgtggagagatcagaaccatctccagaccatggctgtagacagcggcccttgatcattcacagaagatctcgctgggcggatccttcagacctcagcggggtgggaagagtgtccttgggactagagccctgccagaccccaaaggccggtttctacccgatgatctcttgggccccgtcccgagagtgaggcacggcgccaccaggcacccccgatacgcagcgtgttgtgaagtgcccttgtgagcagcgggggatagggaacagaaaaccagctgtcagcgacagcgaggtggtgccccagagagggctgcctcattcgcctggctgcagggtccgaggtcgtcttggtagcatttggcaggaatttatttaggaagcattcagcaaaccgagtgtgtgtggtgctgggagatgacgacgaaatggccctgcccccaaggaagcccctcccctgggggcacaggtggggagggaggtcatgagctttgtgtgtgtgacaactgctgatgggaatgctattggcacgtacgaggggtgcctgtccgtgtcttgggagagcaaggaaggcttcccggaggagttgctgccaagttggcccagaaggatgaggaggagttcttctggtgaagtggggagggcagaggcaggatggtccctacggagcatgtggggacgctcgtgttcttccagaggatggaatgctgggcccgaagcctgaagtattgttagggtagagacaggcgggaggtgcgtggagaaggggtcatggaggtcttgttgggcagatggcggtgggacgtcccaggcagggggagcatcttgggcaagagcccagggtgcgaggtcatgcttatggcacattggaccagctggaggacagccagctcaggagagcagccggctggggtgtctgcccacgtgtggggcagggatgggctgcagcggggagggatttgggagcttctgtcgtagtcctgcagggagtgggagctgtgcaagaaggaagggcggagcggctgtgatccaatgactttgggaaggccactcctgtgatggagtgggggaagacagaccccaggccaggggtcctgagtcaaggcagtggctgaggaggcactggggaaggtgatttggagaggctttgggggtaggtcctgggggtctggaagggctctaggccaggaattttcagactcctgggggcatcagaatcacctggagggcttgttaaagcaaagcttgcccccagcctcaggcagctgggcggcaggaatctgcatgtctaacaggctcccaggggatgctgacttgctggccagggtcccacactttgagaagccccgcctgaagcttacaggacagggcaggttcttgagccattgagttgggcaatgccatgggaagttgcaggtgcacagacgttgccttcctggctgcggttgaacctgggctccatttgtccccttggagctccaggcggccgggccgacttcgaccctgagctctcctgtctgatttcctttccaggtggcacgtctctgagcttcctggtgttggtgacaggctgcacatctgtgggcagaattccagatgctgaaatctacaaaatcactgccactgacttttaccctcttcaggaagaggccaaggaggaggaacgcctcatagctttgaagaaaatcctcagctcgggggtgttctatttctcatggccaaacgatgggtctcgctttgacctgactgtccgcacgcagaagcagggggatgacagctctgaatgggggaactccttcttctggtgaggccctgggtcccctgcagagggtgggccctgggtctcctgcagagggtgggccctggttggcatctgaggccttgacctccacttgcaccacccccgggttatggggcacctctggagagttaggacccaggcctgctctcagcacaatgagaggaaaactaaccctgaactccctgccaccccccacccctggcccctggaatgtgttcagtgtagatttggaaaagaaacctgcgccaggcatggtgcctcatgcctgtaatcccagcactttgggaggctgaggcaggtggatcacttgagttaaggagtttgagacaagcctggccaacatggtgaaagcccatctctactaaaaatacaaaaaaaaaaaaaaaaaaaaattagctgggcgtggtggcaggtgcctgtaatcccagctactcgggaggctgaggcaggagaatcgcttaaacccaggaaacggaggttgctgtgagccaagatggtgctactacactccaccctgggtgacagagcaagactctgtctcaaagaaaaagaaagaaagaaaagaaaccctgttccataagtaaaaaacataagagccgacgtctgctgagtgcttcctcagtcccgggtgccgagctcagtgcttctgcctggattcactctttcagtcttctcaatcatggttacctccagtgtgcagccgtttaccgctgatgtttataaagcactgtgttcgggtcaccgtgctaagatctctctgctggtaataactcatcattattataaaaacctttataataattatgcggaggctctgttaccccattttacaggtagagagactgaggcacgaatagtcgagggaattttgccaaactccacacacttactaagtggcagagccaggatttgaacccaggctttctgggtccaggtcccaagctggtaatcacagtgctaaaccagtcccatcaatggggaagctgagtcaccctgcccaaagggacttgtagcaatgcactaagactagtcccggagcccaggcagaggcggctggatttctgtatgtttaagatctcctggtgctttttcactccacagcaggacagagacaagagtggacaaccctgtaaatacataaattatctattgccctttctggacataatgctgtttctgtcagattcgcactgatgcctagagatgccaggtagaagcaaaagtgaggaaagtcctgccatgggagtcgttccaatgaacctcatctaatgtaatgttttagaatccagtgtctgccttttgaagctatatcagttttcccagctctgagacgggactcgtgaggtttatttctgacctgtttgtgcctctctccctttgccagaggcagccacaggttttcatctggccttggtgctttggattccccagaagtgaattcctgatttctgccggaagaaggggaccctccccacatccctgtgtccatcccaacgctccccacccccacatcctctttggttctctggtattgtggatatttgggggcagtaatgtgcccagacttcaaaatgcacgtgaatcaaggctgggcatggtagctcacgcctgcaatcccagcactttgggaggccaaggcaggcggatcacctgaggtcagcagtttgagaccagcctggccaacatggtgaaaccctgtctctactaaagatacaaagaaaattagccaggtgtggtggcgcacacctgtaatcccagctacatgggaggctgaggcagaagaatcgtttgaacccaggaggctgagattgcagtgagccgagatcgcaccattgcactccagcctgggctacagggtgagactctgtctcaaaataaataaataaaataaaataaataaaatcgtgaatctcatgctgatctcattaaaaatgcagattctgggatggcaggtctgggctgggcccaggattctgcatttctaataagctgccagtgctgcttgtctgcagacggcaggttgagtagcagcctctggggatggcatttctgtgaatcgctggttacattttgcagggcccagcatgtgccccgcgagctgttacatgttcccctaaaggcagccaagcttaagcacagaggggctgtgtattatgaggtatctttgtgtggagtccgtgaaactattttaaaccagaactgtcaggggagcagaggtgagagctctcagcggcagtgagggtccttggaacccctaggggatccttggggtatctgaattgcaccagcacctttgcaagttctcttccctatgccagctctgtggctggaggtgtgaggggcactaacaaagcgaggcaaaggggattcacgaggtggaggctgagaggagctttggaaggaggagccccatggtgtccctttctgaagggagaggaggaagtaactctggaggtcgccaggctcctcagctgtaacacgccagggcgtggtgtttaggctcagggtggagcccccagaactgaccacaactgagtcaccacgggcagtgtggttctgggcttgatcgcctgaacccccactgttgtggcgcagcgtgaggtctggagacccacagcaggagtcagatggggtcaacgctcagcgtggctggcacataaggcagagtgagcagcagggtgaagtcatctttctgggctggtaattgatcacactgacaattgcctcccagtacaatcaggtcctgggaggaaactctttgggggtcctggatatgagtcatcctcctgccagagggccaggcagtgtcactagaaacagggctgatttaagggttgtccacttggcaaaaggtttcttctcctgagccctggtgatagtggccatagctgtgtagctggcagactctgaaatattctggaggctttgccttgatgccacatgcagatttcatatatgtgtttcggaagctggcttatcatctgaatttgagagagtgatttggaagagggacatgtgtttttgtacagcaatgcttcagcagcatttttcaagcagaggagcgctgtggctgtgcgacctcagatggggtcagacgcgggctgtgctccctgtgggggtgcatgtgactgtgcgacctcagacggggtcagacgcgggctgtgctccctgtgggggtgcatgtggctttggtcacagtcggggaggctggcctgagagcaggaagcttggagaagccccctgggacccatcagagctcacagcacagatttccagcaatgagaaaatgctgctgctgtctttgaggaaggctcaagggcaggaattgtgttgccttttttaaacaagtagggcactgtgatctagattcactcagtgccctgtaagagggcatctcctgatgatgggtcctcctccctgagagtgagtatgggccctcaggatggtaccactcaggtcccctgggtgctaaagcaagggggccaggccagctcagggatgagagaactacgtggtcgttcgcaggtgcacatggaaacgtagggcctcatgaagaaaggctcggcgtgaagagcgcgggctccaagctccatgacgccactggctggctctgtggcattagacaagcacttcacttctctgtgcctcagctgctttatctgtgaaagggggtcactgatgatacctttcacatagggtcacttcaagggtgaaatgagttaatccaccccaaagtacttagaatggggcttagtgcacaggataaatgttggctgtcaccctgtcgttatcatcatggactctagagcctacagcaatccactaggcatggagagggaatacttgaactttcattacattttattttcctcggatctttttaaaatttattttggattgctttgtagcgctctcgtcataatcatctcatggtgcatgtgtgtgtatatgtggataatttaaataactgttcccatatttaatatgatttttaatcacttattgatcatgattgtttaataataaaagatgattaattttttaccaatggggcctgcgatgaaaactgtggggcccacagggctaaccagaggcccctttgcgattccccgaaaagtgcacgctggctcactctccagctttgcttccatttagcgacagtgacgacctggtagtggctttgggaaaggactccctggccatcctcctctacgtgacacagtggtcctgctatttgggatctctttgaagcacatgaacttcccagatctgtacagcccaagtgcagagtccactggggagcagcatgcattcgctgacccgaaatgctgcaccgtgcgccccccagttcctcagccacactcgctgtccaggcagcatgtattggaggatgtcaagtgactggaattggtgtgggactgtgttttgcaggaaccagctgttgcacgtgcccttgaggcagcaccaggtgagctgctgtgactggctgctgaagatcatctgcggggt

SEQ ID NO: 14366 - DNA, 680 bp, Homo sapiens
agtgcaatggcgcgatctcggctcaccacaacctctgcctcctgggttcaagcaattctcctgcctcagcctcctgaatagctgggactacaggcatgcgccaccatgcccaactaattttttgtatttttagtagagacggggtttttccatgttggtcaggctggtctgaaactccgacctcaggtggtccacctgcctcagcctcccaaagtgctgggattacagccatgagccgccgtgcctggccgacctctcttctcttttaagatgtttctttatgcctcgggacctgctcctcctgcaggaacctgcaggtggggaggtcaaggtggcacgtctctgagcttcctggtgttggtgacaggctgcacatctgtgggcagaattccagatgctgaaatctacaaaatcactgccactgacttttaccctcttcaggaagaggccaaggaggaggaacgcctcatagctttgaagaaaatcctcagctcgggggtgttctatttctcatggccaaacgatgggtctcgctttgacctgactgtccgcacgcagaagcagggggatgacagctctgaatgggggaactccttcttctggaaccagctgttgcacgtgcccttgaggcagcaccaggtgagctgctgtgactggctgctgaagatcatctgcggggt

SEQ ID NO: 14367 - DNA, 810 bp, Homo sapiens
aggtgagctgctgtgactggctgctgaagatcatctgcggggtggtcaccatccgcaccgtgtatgcctcccacaagcaggccaaggcctgcctcgtctctcgcgttagctgtgagcgcacaggcactcgcttccacacccgtggcgtgaacgacgacggccatgtgtccaacttcgtggagacagagcagatgatttacatggacgatggagtgtcatcttttgtccagatcagaggctccgttccgctgttctgggaacagccagggcttcaggttggctcccatcatctgagactccacagaggcctggaagccaatgcccctgctttcgacaggcacatggtgcttctgaaggagcagtacgggcagcaggtggtcgtgaaccttctgggaagcagaggcggagaggaggtgctcaacagagccttcaaggtaaggccaggctgtcctctccacagctgggctgggcggcaggtggccatggtggagcgttgagcctggaggtggctcctgcagggactggagctgacagcccagccctccttcgtttcctgaggcttccccagcattccgaccagtgaacacggcagtgctcagtgactcgggccctgatacatttgccaaaggtgggaagctagagaaattggagaccctcttgaggccacagttaaagctgcactgggaagacttcgatgtgttcacaaagggggagaacgtcagtccacgttttcagaaaggcactttgcggatgaactgtcttgactgcctggaccgaaccaacactgtgcagagcttcatcgcgctcgag

SEQ ID NO: 14368 - DNA, 7332 bp, Homo sapiens
ataaaacctccacacttggtgtttgtgggccgagctattgtctttgtgttttctttttggagtgggtgggaagccagcttggcaagccgggtgtgaatgaacaggaatgagcaggagacgctcgctgatgccttctgtgatgtgtttcttccccagctccagaagaaaaggaagtcattaaaggacagtatggcaagctcacggacgcgtacggctgcctgggggagctgaggctgaaatctggtggcacgtctctgagcttcctggtgttggtgacaggctgcacatctgtgggcagaattccagatgctgaaatctacaaaatcactgccactgacttttaccctcttcaggaagaggccaaggaggaggaacgcctcatagctttgaagaaaatcctcagctcgggggtgttctatttctcatggccaaacgatgggtctcgctttgacctgactgtccgcacgcagaagcagggggatgacagctctgaatgggggaactccttcttctggaaccagctgttgcacgtgcccttgaggcagcaccaggtgagctgctgtgactggctgctgaagatcatctgcggggtggtcaccatccgcaccgtgtatgcctcccacaagcaggccaaggcctgcctcgtctctcgcgttagctgtgagcgcacaggcactcgcttccacacccgtggcgtgaacgacgacggccatgtgtccaacttcgtggagacagagcagatgatttacatggacgatggagtgtcatcttttgtccagatcagaggctccgttccgctgttctgggaacagccagggcttcaggttggctcccatcatctgagactccacagaggcctggaagccaatgcccctgctttcgacaggcacatggtgcttctgaaggagcagtacgggcagcaggtggtcgtgaaccttctgggaagcagaggcggagaggaggtgctcaacagagccttcaagaagctgctctgggcttcttgccacgcgggcgacacgcctatgatcaattttgacttccatcagtttgccaaaggtgggaagctagagaaattggagaccctcttgaggccacagttaaagctgcactgggaagacttcgatgtgttcacaaagggggagaacgtcagtccacgttttcagaaaggcactttgcggatgaactgtcttgactgcctggaccgaaccaacactgtgcagagcttcatcgcgctcgaggtcctgcatctgcagctcaagaccctggggctgagttcaaaacccatcgttgaccgctttgtggagtccttcaaagccatgtggtctctgaatggccacagcctgagcaaggtgttcacaggcagcagagccctggaagggaaggccaaggtggggaagctgaaggatggagcccggtccatgtctcgaaccatccagtccaacttcttcgacggggtgaagcaggaggccatcaagctgctgctggttggggacgtctacggcgaggaggtggcagacaaagggggcatgctgctggacagcacggcgctcctggtgactcccaggatcctgaaagctatgactgagcgtcagtccgaattcacaaatttcaagcggatccggattgctatggggacctggaacgtgaacggaggaaagcagttccggagcaacgtgctcaggacggcggagctgacagactggctgctcgactcgccccagctctcgggagctaccgactcccaggatgacagcagcccagctgacatatttgctgtggggtttgaagagatggtggaattgagcgcagggaatattgtcaatgccagtactaccaacaagaagatgtggggtgaacagcttcagaaagccatctcacgctctcatagatacattctgttgacttcggcacagctggtgggcgtctgtctttatatctttgtacgtccataccatgtcccgttcatcagggacgtagccatcgacacagtgaagacgggcatggggggcaaggcggggaacaagggcgccgtcggcatccgcttccagttccacagcaccagcttctgcttcatatgtagtcacctgacggccgggcagtcccaggtgaaggagcggaatgaagactacaaggagatcacccagaaactctgcttcccaatggggagaaatgttttttctcatgattatgtattttggtgtggcgatttcaactaccgcattgatcttacttatgaagaagtcttctattttgttaaacgccaagactggaagaaacttctggaatttgatcaactacagctacagaaatcaagtggaaaaatttttaaggactttcacgaaggagccattaactttggacccacctacaagtatgacgttggctcagccgcctacgatacaagcgacaaatgccgcacccccgcctggacagacagggtgctgtggtggaggaagaaacatccctttgataaaacagctggagaactcaaccttctagacagtgatctagatgttgacaccaaagtcagacacacctggtctcctggtgccctgcagtattatggtcgtgcggagctacaagcgtctgatcacagacctgtgctggcgatcgtggaggtggaagttcaggaagtcgatgtgggtgctcgggagagggttttccaggaagtgtcctccttccagggccccctggatgccactgttgtagtaaaccttcaatcaccgaccttagaagagaaaaacgagtttccagaggacctgcgtactgagctcatgcagaccttggggagttatgggacaattgttcttgtcaggatcaaccaagggcagatgctggtaacttttgcagacagtcactcggctctcagtgtcctggacgtggacggtatgaaggtgaaaggcagagcagtgaagattagaccgaagaccaaggactggctgaaaggtttgcgagaggagatcattcggaaacgagacagcatggcccccgtgtctcccactgccaactcctgtttgctggaggaaaactttgacttcacaagtttggactatgagtcagaaggggatattcttgaagacgatgaagactacttggtggatgaattcaatcagcctggagtctcggacagtgaactcgggggagacgacctctctgatgtccccggccccacagcactggctcctcccagcaagtcacctgctctcaccaaaaagaagcagcatccaacgtacaaagatgacgcggacctggtggagctcaagcgggagctggaagccgtcggggagttccgccaccgttctccgagcaggtctctgtcggtccccaaccggcctcggccacctcaacccccgcagagacccccccctccaaccggtttaatggtgaaaaagtcggcttcagatgcgtccatctcctccggcacccatggacagtattcaattttgcagacggcaagacttctaccaggagcacctcagcaacctcccaaggctcggactggaataagtaaaccttataatgtcaagcagatcaaaaccaccaatgcccaggaggcagaagcagcaatccggtgtctcctggaagccagaggaggtgcctccgaagaagccctaagtgccgtggccccaagggaccttgaagcatcctctgaaccagagcccacaccgggggcagccaaaccagagaccccacaggcgcccccactccttccccgtcggcccccacccagagttcctgccatcaagaagccaaccttgagaaggacaggaaagcccctgtcaccggaagaacagtttgagcaacagactgtccattttacaatcgggcccccggagacaagcgttgaggcccctcctgtcgtgacagcccctcgagtccctcctgttcccaaaccaagaacatttcagcctgggaaagctgcagagaggccaagccacaggaagccagcatcagacgaagcccctcctggggcaggagcctctgtgccaccacctctggaggcgccgcctcttgtgcccaaggtacccccgaggaggaagaagtcagcccccgcagccttccacctgcaggtcctgcagagcaacagccagcttctccagggcctcacttacaatagcagtgacagcccctctgggcacccacctgccgcgggcaccgtcttcccacaaggggactttctcagcacttcatctgctacaagccccgacagcgatggcaccaaagcgatgaagccagaggcagccccacttcttggtgattatcaggaccccttctggaaccttcttcaccaccctaaactgttgaataacacttggctttctaagagctcagaccctttggactcaggaaccaggagccccaaaagagatcccatagacccagtgtcagctggcgcttcagctgccaaggcagagctgccaccagatcatgaacacaaaaccttaggtcactgggtgacaatcagtgaccaagaaaagaggacagcactgcaggtgtttgacccactggcaaaaacatgactgagcagctttgaaggctgcagtcctatagaatgcataccttcctccctctagacatccctccaccagaagagacatctatttaaaggcacactggccaaaacgtttgtgcatctgtcactctcgtgtagtttacaaaaatcgtgtctcttattcagtaagatggttactcagccaccaaaatatatttcactcaaggcttgtacatctgaagtttgctcttcaaggaatgggaaccttcctgttaaattcggtgtatggattttaagaaaggaatctagccaatgaggtccaagaagttctcacccattgaatttttaaatggctgttcagttcatgttgtacgtgatggagatttgtcttttgttttatttgcattttacagatttggtataacattttggggagccacctgaaggttgatgtataaagtaaggattagagaaagaggtcgttgtgaccattagtagctgtcctggcccacttaaacaaggttacaaaaaatcagagtcggaagcagccaaataggtcaacctaatgactagactgtacattcccatgagccttcatgtttaagtgtgtacatgtgcgttaaccttgatgatgcgtgaatcccgagggagccggtggcatacaccgttagcttaaccttagcttaaactagctgaaggctcctgtgccatgtcttagacattgcatgccctatcaattactataatcctgagccatggtgtgctactgaaaccaatttttatccaccatctagtccttattaaatgaaacctcacggatcctttgttccgcttatattccatgcataccacataaaagcacacagtgcgaaaactcttgctgatacgcgatattgattctcattgttagaatatggagagtgtttcagcctcgtctgtccggctggagcttcgggatggaaagtgctatgtgtccctgcatataagaatcaccaggccagtgtttctgggtttgcttgtctatatgtttgtctatattttttgcctatacatttttcccacgtttccaacagcacttctcacctattcaataactgaaaaagacattaccatagtgctttacatttttaaagtaatgttacaaggtctggaatccatttggagcagataccgtgttttcgctatttaataagaagttcagtagtgaaatcttactgtaccgcctgttgtatctgggagcctcgtacagaggctcgcacagcagtgatcaagtgtcatcccttacgtgactgggggatgtctgtcctaaaagctgactgctaggatagtaaggatcatcttgcctgggctatgccactgtcttgttaccaattagacatctggaatttcataattagttttcattgtcactgtcaagatatattgcagattacttaaatatggccatcaaaacaaaagttacaacacgtatctcttttcatctgaaaactaatacctggaaaaggataaaaaaaaaaaggaatccgtgacccacagagctagacagataagatgcatagttgaccagtcataaaaggcggtgtttaggtgatcaggatgccgttggtggcatttacgtgctttatatgatttttacctctgtaacaaacacaagaaataaacagaatggtccttaacagagtttgggggagagagcaagatgggttccttggagaagctgatttgccaagatgcacatcgctattaacagccagagtcataaatgaaatgaaattgaagaattcattcaaatgctcttttccctataacctcttttctcaccaaaaaggagataaatttgaaaacagataaatgtaacaaccagtcaaagaagcaggggaaaagtaagctcctccaaagttgcttgcagtgctggaaatagatctcatttttaggttttctcttcgttccagataccaaataaatgggacagagaataaaatttttgttaaaatatgtgctcatctcctaagtagctcttcagagtctgaccgtaagtaaaaacacacagaattgtgttgactgggggaggtgaatcacaaaaaagttacgaggagtttaagagttaaatattatttgatcgtggctgtcaaatttagtgaacaacatagattggatttggagttggtagtaggtatggttctcataccagaattctcttaaaaaaaaaaaaaaggacaattggaattgccttatttatttttaaaatcaatgcttactagttggtaggattcccaggtcagcagcagggttgattaaataatcttgacaatgagcagctgccatcttgggggatttcattctgtggttttttaaatgtttcgtctttgatgctaccatccagggcttcttattgtgaccttgtagcctattttgttcctgctgttctctaacatggtgcagttcacgcagactggtttaggtacttcacaactcaccattgtctctctgaccccaagcctagtcccttttacatcaccatcttctcagacttcttgcctattcttaaaatatgttttggttaatgattgaattaggacatcagcttaagcaattcctgtaacggtttaacgttgttgaagttcaaggcacataataaaattctccctgatgtgtgtgtaagtataaacaaagtaatgtatcaaagcgttcactttataatgaagtcatttcattgggaaggaaagctgcaaagattattgggggactagtgattaataaaatcctgtaatatttttgaagtgaaaatttgtactgaaattgtacatgatacctattaaatgtttttgtctttttttaaa

SEQ ID NO: 14369 - DNA, 3959 bp, Homo sapiens
cgaccctcatggccctgagcaaagggctgcggctgctggggcgcctgggggccgagggggactgtagcgtgctgctggaggcgcgcggccgcgacgactgcctgctgttcgaggccggcacggtggccacgctggctccagaagaaaaggaagtcattaaaggacagtatggcaagctcacggacgcgtacggctgcctgggggagctgaggctgaaatctggtggcacgtctctgagcttcctggtgttggtgacaggctgcacatctgtgggcagaattccagatgctgaaatctacaaaatcactgccactgacttttaccctcttcaggaagaggccaaggaggaggaacgcctcatagctttgaagaaaatcctcagctcgggggtgttctatttctcatggccaaacgatgggtctcgctttgacctgactgtccgcacgcagaagcagggggatgacagctctgaatgggggaactccttcttctggaaccagctgttgcacgtgcccttgaggcagcaccaggtgagctgctgtgactggctgctgaagatcatctgcggggtggtcaccatccgcaccgtgtatgcctcccacaagcaggccaaggcctgcctcgtctctcgcgttagctgtgagcgcacaggcactcgcttccacacccgtggcgtgaacgacgacggccatgtgtccaacttcgtggagacagagcagatgatttacatggacgatggagtgtcatcttttgtccagatcagaggctccgttccgctgttctgggaacagccagggcttcaggttggctcccatcatctgagactccacagaggcctggaagccaatgcccctgctttcgacaggcacatggtgcttctgaaggagcagtacgggcagcaggtggtcgtgaaccttctgggaagcagaggcggagaggaggtgctcaacagagccttcaagaagctgctctgggcttcttgccacgcgggcgacacgcctatgatcaattttgacttccatcagtttgccaaaggtgggaagctagagaaattggagaccctcttgaggccacagttaaagctgcactgggaagacttcgatgtgttcacaaagggggagaacgtcagtccacgttttcagaaaggcactttgcggatgaactgtcttgactgcctggaccgaaccaacactgtgcagagcttcatcgcgctcgaggtcctgcatctgcagctcaagaccctggggctgagttcaaaacccatcgttgaccgctttgtggagtccttcaaagccatgtggtctctgaatggccacagcctgagcaaggtgttcacaggcagcagagccctggaagggaaggccaaggtggggaagctgaaggatggagcccggtccatgtctcgaaccatccagtccaacttcttcgacggggtgaagcaggaggccatcaagctgctgctggttggggacgtctacggcgaggaggtggcagacaaagggggcatgctgctggacagcacggcgctcctggtgactcccaggatcctgaaagctatgactgagcgtcagtccgaattcacaaatttcaagcggatccggattgctatggggacctggaacgtgaacggaggaaagcagttccggagcaacgtgctcaggacggcggagctgacagactggctgctcgactcgccccagctctcgggagctaccgactcccaggatgacagcagcccagctgacatatttgctgtggggtttgaagagatggtggaattgagcgcagggaatattgtcaatgccagtactaccaacaagaagatgtggggtgaacagcttcagaaagccatctcacgctctcatagatacattctgttgacttcggcacagctggtgggcgtctgtctttatatctttgtacgtccataccatgtcccgttcatcagggacgtagccatcgacacagtgaagacgggcatggggggcaaggcggggaacaagggcgccgtcggcatccgcttccagttccacagcaccagcttctgcttcatatgtagtcacctgacggccgggcagtcccaggtgaaggagcggaatgaagactacaaggagatcacccagaaactctgcttcccaatggggagaaatgttttttctcatgattatgtattttggtgtggcgatttcaactaccgcattgatcttacttatgaagaagtcttctattttgttaaacgccaagactggaagaaacttctggaatttgatcaactacagctacagaaatcaagtggaaaaatttttaaggactttcacgaaggagccattaactttggacccacctacaagtatgacgttggctcagccgcctacgatacaagcgacaaatgccgcacccccgcctggacagacagggtgctgtggtggaggaagaaacatccctttgataaaacagctggagaactcaaccttctagacagtgatctagatgttgacaccaaagtcagacacacctggtctcctggtgccctgcagtattatggtcgtgcggagctacaagcgtctgatcacagacctgtgctggcgatcgtggaggtggaagttcaggaagtcgatgtgggtgctcgggagagggttttccaggaagtgtcctccttccagggccccctggatgccactgttgtagtaaaccttcaatcaccgaccttagaagagaaaaacgagtttccagaggacctgcgtactgagctcatgcagaccttggggagttatgggacaattgttcttgtcaggatcaaccaagggcagatgctggtaacttttgcagacagtcactcggctctcagtgtcctggacgtggacggtatgaaggtgaaaggcagagcagtgaagattagaccgaagaccaaggactggctgaaaggtttgcgagaggagatcattcggaaacgagacagcatggcccccgtgtctcccactgccaactcctgtttgctggaggaaaactttgacttcacaagtttggactatgagtcagaaggggatattcttgaagacgatgaagactacttggtggatgaattcaatcagcctggagtctcggacagtgaactcgggggagacgacctctctgatgtccccggccccacagcactggctcctcccagcaagtcacctgctctcaccaaaaagaagcagcatccaacgtacaaagatgacgcggacctggtggagctcaagcgggagctggaagccgtcggggagttccgccaccgttctccgagcaggtctctgtcggtccccaaccggcctcggccacctcaacccccgcagagacccccccctccaaccggtttaatggtgaaaaagtcggcttcagatgcgtccatctcctccggcacccatggacagtattcaattttgcagacggcaagacttctaccaggagcacctcagcaacctcccaaggctcggactggaataagtaaaccttataatgtcaagcagatcaaaaccaccaatgcccaggaggcagaagcagcaatccggtgtctcctggaagccagaggaggtgcctccgaagaagccctaagtgccgtggccccaagggaccttgaagcatcctctgaaccagagcccacaccgggggcagccaaaccagagaccccacaggcgcccccactccttccccgtcggcccccacccagagttcctgccatcaagaagccaaccttgagaaggacaggaaagattgttttttgctctcgctctcaagcttctcagccttgcttactgcttcaaagacatgagtttgtaaggacagtagcagcccaaagactggcatctgtagacacatctggatcttccgtttgatctcagtgttctagtaacggaccctcggtaatcccttcctggtcatcacagcacgatgctgcttcccccctagagagtgtgagg

SEQ ID NO: 14370 - DNA, 2040 bp, Homo sapiens
aaaggccggtttctacccgatgatctcttgggccccgtcccgagagtgaggcacggcgccaccaggcacccccgatacgcagcgtgttgtgaagtgcccttgtgagcagcgggggatagggaacagaaaaccagctgtcagcgacagcgaggtggtgccccagagagggctgcctcattcgcctggctgcagggtccgaggtcgtcttggtagcatttggcaggaatttatttaggaagcattcagcaaaccgagtgtgtgtggtgctgggagatgacgacgaaatggccctgcccccaaggaagcccctcccctgggggcacaggtggggagggaggtcatgagctttgtgtgtgtgacaactgctgatgggaatgctattggcacgtacgaggggtgcctgtccgtgtcttgggagagcaaggaaggcttcccggaggagttgctgccaagttggcccagaaggatgaggaggagttcttctggtgaagtggggagggcagaggcaggatggtccctacggagcatgtggggacgctcgtgttcttccagaggatggaatgctgggcccgaagcctgaagtattgttagggtagagacaggcgggaggtgcgtggagaaggggtcatggaggtcttgttgggcagatggcggtgggacgtcccaggcagggggagcatcttgggcaagagcccagggtgcgaggtcatgcttatggcacattggaccagctggaggacagccagctcaggagagcagccggctggggtgtctgcccacgtgtggggcagggatgggctgcagcggggagggatttgggagcttctgtcgtagtcctgcagggagtgggagctgtgcaagaaggaagggcggagcggctgtgatccaatgactttgggaaggccactcctgtgatggagtgggggaagacagaccccaggccaggggtcctgagtcaaggcagtggctgaggaggcactggggaaggtgatttggagaggctttgggggtaggtcctgggggtctggaagggctctaggccaggaattttcagactcctgggggcatcagaatcacctggagggcttgttaaagcaaagcttgcccccagcctcaggcagctgggcggcaggaatctgcatgtctaacaggctcccaggggatgctgacttgctggccagggtcccacactttgagaagccccgcctgaagcttacaggacagggcaggttcttgagccattgagttgggcaatgccatgggaagttgcaggtgcacagacgttgccttcctggctgcggttgaacctgggctccatttgtccccttggagctccaggcggccgggccgacttcgaccctgagctctcctgtctgatttcctttccaggtggcacgtctctgagcttcctggtgttggtgacaggctgcacatctgtgggcagaattccagatgctgaaatctacaaaatcactgccactgacttttaccctcttcaggaagaggccaaggaggaggaacgcctcatagctttgaagaaaatcctcagctcgggggtgttctatttctcatggccaaacgatgggtctcgctttgacctgactgtccgcacgcagaagcagggggatgacagctctgaatgggggaactccttcttctggtgaggccctgggtcccctgcagagggtgggccctgggtctcctgcagagggtgggccctggttggcatctgaggccttgacctccacttgcaccacccccgggttatggggcacctctggagagttaggacccaggcctgctctcagcacaatgagaggaaaactaaccctgaactccctgccaccccccacccctggcccctggaatgtgttcagtgtagatttggaaaagaaacctgcgccaggcatggtgcctcatgcctgtaatcccagcactttgggaggctgaggcaggtggatcacttgagttaaggagtttgagacaagcctggccaacatggtgaaagcccatctctactaaaaatacaaaaaaaaaaaa

SEQ ID NO: 14371 - DNA, 2040 bp, Homo sapiens; identical to SEQ ID NO: 14370

SEQ ID NO: 14372 - DNA, 9968 bp, Homo sapiens
tctcgagcggtcgaggtcgcagacctagaggcgccccacaggccggcccggggcgctgggagcgccggccgcgggccgggtggggatgcctctgcacgtgaagtggccgttccccgcggtgccgccgctcacctggaccctggccagcagcgtcgtcatgggcttggtgggcacctacagctgcttctggaccagtgagtgggcccaggccgaggcaggcccgcccgggtacccatgcccggccggaggtgggacttagggtgggggacgccgcggccccgacctagcgggcgagcccggagcgcctgacttctccttccccgccagagtacatgaaccacctgaccgtgcacaacagggaggtgctgtacgagctcatcgagaagcgaggcccggccacgcccctcatcaccgtgtccaatcaccagtcctgcatggacgaccctcatctctggggtacccgggccagtgtgctgggcagggggaggaaaggcgaggattcgggacgggcccagcctcgtcagaacaaaccccttctcgctgccttttcatggagccctggcactccggtttccgggcgttctgccccagggctgagacttggatttgtggctcctgcagcatccctgagggagcatgatttggagagggccttgggcatggagcaggaccaaggaacggccacagggcatatcttacagctcctttaacgtcaggcctccagaaccctctgttctctaaaccatccagggccccacagtcttgggaaaaatttgggggttggacataggatatcctgtgaggaagttctgggccagggactggaagcccagtgtcctggcttcaggtttgcccctggctgggcgtgtaccgttcagccctatttgggagcctggttgccacacctagaggttcctgctctgctgacttcacaggaagttgcttggctctggtaaccagatggccgggtggaggggtgcctggggcttccactcctgaacagagagcttaactgtcctagagttcatggggagccacctagccacactggagcccttcagagctcaccctggctgctgggtggagaaaggcctatagatgtcacaggtggatcctgggaggccaggaaggaggacttggagccatccactagcctagactgggctggttgcagtgacagtacagggagaagtatagaagaatgggcattgtccaagtatgttggggaggtaggcagtccaggtgcagtgattagtaagatgtggagggtgggggagagggaggagccagggagaactgaatgatctggcctaagggtctgaaagatgccactttgggctgtagggaaatggtagtgctgctgtccctcattccctgagatggggtgaaggaagggcactccctggggatatgggaagttggggcatgaagcctttcctgtcctctagggatcctgaaactccgccacatctggaacctgaagttgatgcgttggtgaggaggaatgggcccctcgaagtgggccgggccggccccacctgcctctgcccagatttgccctcctcctgctctgcccaggaggtggcgtccagcagtccaggcagggcatggggtggggccccgcaggccctcccctgtgcctcccttctgcatgctgatgctgggggcagggtggtggagcggggtgcagggggcaggactaattgcatctgtccctgcttaggacccctgcagctgcagacatctgcttcaccaaggagctacactcccacttcttcagcttgggcaagtgtgtgcctgtgtgccgaggtgagctgctcctccagcgagtgcagggaggcacttctggggcaggaaagctggtggccagtgtctctgttttggagggacctatgggggtaggcatcccgggagccaacatgaggcccagctccatcacatgccagcagaggggacagaggctgtgggaggagggatgggtccttggaaagtcctcaactctctgcaactgcccagggatcctgtggacctggagccttggcattagaattcaaggaggcattatccataaccccttctctcagggatgtcactaagagactcattgagaacagtgcgttgtcattggtccatggtggcagtagcatgtacctgcaggccagagggttttgcttctaggagaacaaacaggcttgtggggtgagaaccccaggggataggggccattttgatccctattctccagacagggaggatcacagagattaagctgctggcccaaggtcatggggtaggaggtggcaaagccaggatttgaatccagattgctccttcctctgcaggagcagaatttttccaagcagagaatgaggggaaaggtgttctagacacaggcaggcacatgccaggtgctggaaaaagaagagagaaaggtaagccaggcatagcggttcacacttgtcatcccagcactttgtgaggtcgaggtgagaggatcactcaagcccaggagtttgagaccagcctgggcaacatagtaagaccctgtctctttaaaaataaaaatattttaaacaaaagaaaggtagaaaatatgagttgtatgtagaatatgaaggttctagaataatcctattaagaattttggattctggctgggcgcggtggctcacgcctgtaatcccagcactttgggaggctgaggccagcggatcacgaggtcaggagatcgagaccatcctggctaacacggtgaaaccccgtctctactaaaaatacaaaaaattagctgggcatggtagtgggcgcctgtagtcccagctactcgggaggctgaggcaggagaatggcgtgaacccggaaggtggagcttgcagtgagccaagatcacgccactgcactccagcctgggtgacagagtgagactccgtctcaaaaaaaaaaaaaaaagtgccggccacggtggctcatgcctgtaatcccagcactctgggaggccgaggcgggcggatcacgaggtcaggaattcgagaccagcctaaccaacatggtgaaaccccgtctctactaaaaatacaaaaattagccgggcgtggtggtgtgtgcctgtaatctcagctacttgggagactgagacgggagcattgcttgaacccgggaggtggaggttgtggtgagctgagatcctgccattgcactccagcctgggcaataagagcgaaactccgtctggaaaaaaaaaaaaaaaaaaagaattttgaattagctggctgcattggtgcatgcctacagtcccagctcctcaggaggctgaggtgggaggatcacttgagccctcgattttctttttccttgagacaatgtctgtttctgttgtccaggctggagtgccgtggcgtgatgatggctcactgcagcttctgtttcctgggttcaagggatcctgtcacctcagcctcctgagcagctgggactaaggagtgtgcccagctaattcttttttttttttggtagagttggggtcttactacattgccagggctggtcttgaactcctagactcaagcgatcctcccgcctcagcctctcaaagtgctgggatcacaggcatgagccattgtgcccaacccagcccaggaatttgaggccagcctgagcaatatagtgagaccccaggtatagatagataggtagatagataggtaggtaggtaggtagatagatagataggtaggtgggtaggtaggtgggtagataggtaggtaggtacgtaggtagatagatagatagatacatacatacatagatagataagatagatagattgattagatagattagatagccaggtggggtggctcacgcctgtaatcccagtgctttgggaggctgaggtgggtggatcacctgaggtcaggagtttgagaccagcctggctaatgtggcgaaaccctgtctactaaaaatacaaaaattagctggatgtggtggcgcacgcctgtaatctcagctactcgggaggctggggtgggagaatcgcttgaacccaggaggtggaggttgcagtgagctgagatcatgccactgcactccagcctgggccacagagggagacctggtctcaaaaaaaaaaaaaaaaaaaaaaaagatttttgtatttgactgtgctctctcatccaggtggtgacatgcttgtatctgtggttaagaggtagcatctgccaggcgcggtggctcatgcctgtaatcccagtactttgcgaggccgaggcgggtggttcacctgaggtcaggagtttgagaccagcctgaccaacatggcgaaaccccgtctctactaaaaatataaaaattagccgaggctgggcgcggtggctcacgcctgtaatcccagcactttgggaggccgaggcgggtggatcacgaggtcaggagatcgagaccatcctggctaacaggatgaaaccccgtctctactaaaaacacaaaattagctgggcatggtggcaggtgcctgtagtcccagctactcgggaggctgaggcaggagaatggcacaaacccgggaggcggagcttgaggcaggagaatggcgtgaacccgggaggcagagcttgctatgagcagagatcgcgccactgcactccagcctgggtgacagagcgagactccgtctcaaaaaaaaaaaaaagagagagataccattccagttgcaatgtggctgcagcagggctaggtggacatgaggagcccagttcagggctgtcacagtagctccagcagcagatgattgtggctgggcctcccaagtgtcacgttggagaaccggagaaggggacttctttgggatgtactctggacttgttgatagattaagtgtaggtggggtgaggaagagaactcaaagatgacaccaggtgttggagctgagccacggggagaagggtgcaaagggaaagcagtgcgggggctgggaggggagagggtcagtcctgttttgcttgtgctgcatctgaggagcccctcacctgtggaaggagagcagtcccagaggcagtggggtgtgcagttctggaacttagaagaatgatcagggggctgggtgcagtggctcacgcctgtaatcccagcactttgggaggccgaggcgggcggatcaagaggtcaggagattgagaccatcctggctaacatggtgaaaccccgtctctactaaaaatataaaaaattagcagcgcatggtggcaggcacctgtagtcccagctattcaggaggctgaggcaggagagtggcgtgaacccgggagacggagcttgcagtgagctgagattgcgccactgcactccagcctgggcgacagagcgagactccgtctcaaaaaaaaaaaaaacaaaaaattatcaggaataaagatactgggaattcaaccacaaaaaccacaaagtcacgaatgcagagtgagagtcttcagagagagggcagaggcccaggatggcacagagggagagagaagccaccaagatggcagggagccatggccagagagaaaagcaaaccaggcgcctgtggcaccatggaagcagcaggtgatgctggagaagcgtttccatgcagtgacagctgccagagccagattattatggcctgagggctggtggtgctgcagttgggggggaatggagaccgcagcgggggaatggagaccgcaggggcggcaactcctcccagaggttcagtttggaggaaaaagagacagaaggaagggtaaccaaaggatattagaggtcaaggaggggtttattatttctagctggtcaaagtagaatgtggtaaaacccaataaagtaacagcaaataacaaagaggggcttttaatggaaagctgcagtgcctgcccctcacctccctagccccactcctcagaagcagccccctggagcggtttctctttctgctgcttttggaggctacttctgtctctgtaaaggaacttctgtctctgtaaaggaacaagcagaggccacagtgtcttggcaaatgaccgtggcattgtttatcccaacctgctctgagagatggggactctgctgattcacccctcgtccctgcctctttagttccttcagcaaagaactaataatatgtcattaaggcaaaggcagtatttggcacacttggcttctgtgttccaaaaaattccctttttctccaagcgtagattttaatatggtatttaagtatcaaagtgatttgacacaagtgacacaagtgagcagtagtagcatttgcaaaagctacaaatgatgaagtcttgctccaaaagcatattattattattttttaaattccagtttcaagctcaatggataggttgcgtcagtgggttttagtagagaaggggccagtacctatgaagactcccctgtactattacacatgctgcgtcccaagtagggaaactccagtgggtcatcaccccctccctctagcccaagtgggctgctgggtcagggcactgtttgggttgggttgagattcctggatccctaactagcaccttccaaagaatcggccttgcagagaacaaagttcattgccaaaggtattcccaatgtctgtctctcgctctgtgatagggcttctttactccccactttataagatgaggatatctgctataccccattccttcaacctctccacctctttcctcttttgtctgccatgtgattacttttccatcaccaaggttgatgagatccttactgtgtacttactgtctccaagcatccccaggcttccagccagcacgcagcagccaacattggcttcagaaggaaggaggtttgcatttccttctcttgggtccagtgccatggtctcagggttatctccaatgtggaaagttgctagaccaggagcagtttgactccactgtttttcagtctagcaagtttgagtttttcccaagctcttgatgtgtgttcaaatgaatgttctccctttcccaagagacctccctataagggagggtctagtttcccggggtgccctgagaagaaggggtcagcaggggggaggaatggtggaggctgaggcctcaggcaggtgccctgtgaggagtggctgtgacaagcggctgagatcccagcaaagggttgttgcccagaatctggggcctaagcgaggttggaaatcacaaatgcacttggtttctctagcagctggcacatagtaggatcagcccaggagtggcaccttcaaagagaaaggaacgcatgaggctccgagagcggtcggctggcagccagggcctggctggggagggagggcaggtggtgcgctgacctggggatctttgagagtgtgcaggagtatgtggctgaagcggcccagctggtgagccactgaagatgggggtcataggtagatggaggaattgccaggtcagaatctcggtaggagatgacttgagctgatgctgcctggcacataggggtttagaagatattaggaaggaagccccacagcgtgcccaagtgccatgcaggccctggagacggtcattggagggcgtctgtggatggcgcagtgggggatgggaagtccctaatctgctggggctttcccagcaagcagggactgagggggatagtccccaacacatgggccccagggagaagggcctgtttcattgaggtttggagagtgttgagggtaagctaacctgtcaccccacgcccccgagaatggttactgatagggagaggccttttccttgcaggagatggcgtctaccagaaggggatggacttcattttggagaagctcaaccatggggactgggtgcatatcttcccagaaggtcagcagggctgactgggtcgagcccccccagtatgagcgggatgggctcccaagcctcgcctctgtgctctctcaccagggaaagtgaacatgagttccgaattcctgcgtttcaagtggggtaagggctgctggtctctggccacagccatcctcccggcccagagatggccctgtgggcccctggctcccgccccctcgggctggcttgtatgggggtagatgggcgtgtttgtagcgccaggaaggggacaggtgctgagactaggcctgcctctcgcaggggcttgcccaagggagctgaattgaactggaggatgtcgggggtggcagtggccagaggctggcacagaagcttggctcagggcccagcttatgctaacatttctacctcccccctgggcaggaatcgggcgcctgattgctgagtgtcatctcaaccccatcatcctgcccctgtggcatgtcggtgagcctggggacggggacagagagatggcatctggggtggggggcctgggactccctctggtcccaggctgccctgctccaccccacgtctggccttctgtccactgtgctgcaggaatgaatgacgtccttcctaacagtccgccctacttcccccgctttggacaggtgggtggggactgctgaccttcggctgtctgcctgtctgctgtctgctccgtgtctcccactcagcactatggaggccagctgcaggaggagctgagcatgaggctacagcaggggacagagtggaacatagacagggacttcctggcaccgagacattaaaatgagagcagaggaagtcaggctggggcagaggtgggctgtggggtcaggacaggacaggtcatctacagcacaggacccaggaccaggaccttgttttagaggaagagtggcccctggggagtgtgtggcacagcagggccggggcttagcttctggctcccgggttgcttgggctggggctgtgggcactcctactgctcctcatcactcttggcggccaccccacagaaaatcactgtgctgatcgggaagcccttcagtgccctgcctgtactcgagcggctccgggcggagaacaagtcggctgtgagtttcctcctgggtcccccgtagctgtccccggaccccctgctgctggcttccagcagggtgcctccaccctctccatcccgtcaccctcccagggcaccctcccagggcaccttggccaagcttcccgaggggtgcaggccatccctggtcctttccctcaggtggagatgcggaaagccctgacggacttcattcaagaggaattccagcatctgaagactcaggcagagcagctccacaaccacctccagcctgggagataggccttgcttgctgccttctggattcttggcccgcacagagctggggctgagggatggactgatgcttttagctcaaacgtggcttttagacagatttgttcatagaccctctcaagtgccctctccgagctggtaggcattccagctcctccgtgcttcctcagttacacaaaggacctcagctgcttctcccacttggccaagcagggaggaagaagcttaggcagggctctctttccttcttgccttcagatgttctctcccaggggctggcttcaggagggagcatagaaggcaggtgagcaaccagttggctaggggagcagggggcccaccagagctgtggagaggggaccctaagactcctcggcctggctcctacccaccgcccttgccgaaccaggagctgctcactacctcctcagggatggccgttggccacgtcttccttctgcctgagcttcccccccaccacaggccctttcctcaggcaaggtctggcctcaggtgggccgcaggcgggaaaagcagcccttggccagaagtcaagcccagccacgtggagcctagagtgagggcctgaggtctggctgcttgcccccatgctggcgccaacaacttctccatcctttctgcctctcaacatcacttgaatcctagggcctgggttttcatgtttttgaaacagaaccataaagcatatgtgttggcttgttgtaaaa

SEQ ID NO: 14373 - DNA, 1596 bp, Homo sapiens
tctcgagcggtcgaggtcgcagacctagaggcgccccacaggccggcccggggcgctgggagcgccggccgcgggccgggtggggatgcctctgcacgtgaagtggccgttccccgcggtgccgccgctcacctggaccctggccagcagcgtcgtcatgggcttggtgggcacctacagctgcttctggaccagtgagtgggcccaggccgaggcaggcccgcccgggtacccatgcccggccggagggatcctgaaactccgccacatctggaacctgaagttgatgcgttggacccctgcagctgcagacatctgcttcaccaaggagctacactcccacttcttcagcttgggcaagtgtgtgcctgtgtgccgaggagatggcgtctaccagaaggggatggacttcattttggagaagctcaaccatggggactgggtgcatatcttcccagaaggaatcgggcgcctgattgctgagtgtcatctcaaccccatcatcctgcccctgtggcatgtcggtgagcctggggacggggacagagagatggcatctggggtggggggcctgggactccctctggtcccaggctgccctgctccaccccacgtctggccttctgtccactgtgctgcaggaatgaatgacgtccttcctaacagtccgccctacttcccccgctttggacagaaaatcactgtgctgatcgggaagcccttcagtgccctgcctgtactcgagcggctccgggcggagaacaagtcggctgtggagatgcggaaagccctgacggacttcattcaagaggaattccagcatctgaagactcaggcagagcagctccacaaccacctccagcctgggagataggccttgcttgctgccttctggattcttggcccgcacagagctggggctgagggatggactgatgcttttagctcaaacgtggcttttagacagatttgttcatagaccctctcaagtgccctctccgagctggtaggcattccagctcctccgtgcttcctcagttacacaaaggacctcagctgcttctcccacttggccaagcagggaggaagaagcttaggcagggctctctttccttcttgccttcagatgttctctcccaggggctggcttcaggagggagcatagaaggcaggtgagcaaccagttggctaggggagcagggggcccaccagagctgtggagaggggaccctaagactcctcggcctggctcctacccaccgcccttgccgaaccaggagctgctcactacctcctcagggatggccgttggccacgtcttccttctgcctgagcttcccccccaccacaggccctttcctcaggcaaggtctggcctcaggtgggccgcaggcgggaaaagcagcccttggccagaagtcaagcccagccacgtggagcctagagtgagggcctgaggtctggctgcttgcccccatgctggcgccaacaacttctccatcctttctgcctctcaacatcacttgaatcctagggcctgggttttcatgtttttgaaacagaaccataaagcatatgtgttggcttgttgtaaaa

SEQ ID NO: 14374 - DNA, 8832 bp, Homo sapiens
ccctcatcaccgtgtccaatcaccagtcctgcatggacgaccctcatctctggggtacccgggccagtgtgctgggcagggggaggaaaggcgaggattcgggacgggcccagcctcgtcagaacaaaccccttctcgctgccttttcatggagccctggcactccggtttccgggcgttctgccccagggctgagacttggatttgtggctcctgcagcatccctgagggagcatgatttggagagggccttgggcatggagcaggaccaaggaacggccacagggcatatcttacagctcctttaacgtcaggcctccagaaccctctgttctctaaaccatccagggccccacagtcttgggaaaaatttgggggttggacataggatatcctgtgaggaagttctgggccagggactggaagcccagtgtcctggcttcaggtttgcccctggctgggcgtgtaccgttcagccctatttgggagcctggttgccacacctagaggttcctgctctgctgacttcacaggaagttgcttggctctggtaaccagatggccgggtggaggggtgcctggggcttccactcctgaacagagagcttaactgtcctagagttcatggggagccacctagccacactggagcccttcagagctcaccctggctgctgggtggagaaaggcctatagatgtcacaggtggatcctgggaggccaggaaggaggacttggagccatccactagcctagactgggctggttgcagtgacagtacagggagaagtatagaagaatgggcattgtccaagtatgttggggaggtaggcagtccaggtgcagtgattagtaagatgtggagggtgggggagagggaggagccagggagaactgaatgatctggcctaagggtctgaaagatgccactttgggctgtagggaaatggtagtgctgctgtccctcattccctgagatggggtgaaggaagggcactccctggggatatgggaagttggggcatgaagcctttcctgtcctctagggatcctgaaactccgccacatctggaacctgaagttgatgcgttggtgaggaggaatgggcccctcgaagtgggccgggccggccccacctgcctctgcccagatttgccctcctcctgctctgcccaggaggtggcgtccagcagtccaggcagggcatggggtggggccccgcaggccctcccctgtgcctcccttctgcatgctgatgctgggggcagggtggtggagcggggtgcagggggcaggactaattgcatctgtccctgcttaggacccctgcagctgcagacatctgcttcaccaaggagctacactcccacttcttcagcttgggcaagtgtgtgcctgtgtgccgaggtgagctgctcctccagcgagtgcagggaggcacttctggggcaggaaagctggtggccagtgtctctgttttggagggacctatgggggtaggcatcccgggagccaacatgaggcccagctccatcacatgccagcagaggggacagaggctgtgggaggagggatgggtccttggaaagtcctcaactctctgcaactgcccagggatcctgtggacctggagccttggcattagaattcaaggaggcattatccataaccccttctctcagggatgtcactaagagactcattgagaacagtgcgttgtcattggtccatggtggcagtagcatgtacctgcaggccagagggttttgcttctaggagaacaaacaggcttgtggggtgagaaccccaggggataggggccattttgatccctattctccagacagggaggatcacagagattaagctgctggcccaaggtcatggggtaggaggtggcaaagccaggatttgaatccagattgctccttcctctgcaggagcagaatttttccaagcagagaatgaggggaaaggtgttctagacacaggcaggcacatgccaggtgctggaaaaagaagagagaaaggtaagccaggcatagcggttcacacttgtcatcccagcactttgtgaggtcgaggtgagaggatcactcaagcccaggagtttgagaccagcctgggcaacatagtaagaccctgtctctttaaaaataaaaatattttaaacaaaagaaaggtagaaaatatgagttgtatgtagaatatgaaggttctagaataatcctattaagaattttggattctggctgggcgcggtggctcacgcctgtaatcccagcactttgggaggctgaggccagcggatcacgaggtcaggagatcgagaccatcctggctaacacggtgaaaccccgtctctactaaaaatacaaaaaattagctgggcatggtagtgggcgcctgtagtcccagctactcgggaggctgaggcaggagaatggcgtgaacccggaaggtggagcttgcagtgagccaagatcacgccactgcactccagcctgggtgacagagtgagactccgtctcaaaaaaaaaaaaaaaagtgccggccacggtggctcatgcctgtaatcccagcactctgggaggccgaggcgggcggatcacgaggtcaggaattcgagaccagcctaaccaacatggtgaaaccccgtctctactaaaaatacaaaaattagccgggcgtggtggtgtgtgcctgtaatctcagctacttgggagactgagacgggagcattgcttgaacccgggaggtggaggttgtggtgagctgagatcctgccattgcactccagcctgggcaataagagcgaaactccgtctggaaaaaaaaaaaaaaaaaaagaattttgaattagctggctgcattggtgcatgcctacagtcccagctcctcaggaggctgaggtgggaggatcacttgagccctcgattttctttttccttgagacaatgtctgtttctgttgtccaggctggagtgccgtggcgtgatgatggctcactgcagcttctgtttcctgggttcaagggatcctgtcacctcagcctcctgagcagctgggactaaggagtgtgcccagctaattcttttttttttttggtagagttggggtcttactacattgccagggctggtcttgaactcctagactcaagcgatcctcccgcctcagcctctcaaagtgctgggatcacaggcatgagccattgtgcccaacccagcccaggaatttgaggccagcctgagcaatatagtgagaccccaggtatagatagataggtagatagataggtaggtaggtaggtagatagatagataggtaggtgggtaggtaggtgggtagataggtaggtaggtacgtaggtagatagatagatagatacatacatacatagatagataagatagatagattgattagatagattagatagccaggtggggtggctcacgcctgtaatcccagtgctttgggaggctgaggtgggtggatcacctgaggtcaggagtttgagaccagcctggctaatgtggcgaaaccctgtctactaaaaatacaaaaattagctggatgtggtggcgcacgcctgtaatctcagctactcgggaggctggggtgggagaatcgcttgaacccaggaggtggaggttgcagtgagctgagatcatgccactgcactccagcctgggccacagagggagacctggtctcaaaaaaaaaaaaaaaaaaaaaaaagatttttgtatttgactgtgctctctcatccaggtggtgacatgcttgtatctgtggttaagaggtagcatctgccaggcgcggtggctcatgcctgtaatcccagtactttgcgaggccgaggcgggtggttcacctgaggtcaggagtttgagaccagcctgaccaacatggcgaaaccccgtctctactaaaaatataaaaattagccgaggctgggcgcggtggctcacgcctgtaatcccagcactttgggaggccgaggcgggtggatcacgaggtcaggagatcgagaccatcctggctaacaggatgaaaccccgtctctactaaaaacacaaaattagctgggcatggtggcaggtgcctgtagtcccagctactcgggaggctgaggcaggagaatggcacaaacccgggaggcggagcttgaggcaggagaatggcgtgaacccgggaggcagagcttgctatgagcagagatcgcgccactgcactccagcctgggtgacagagcgagactccgtctcaaaaaaaaaaaaaagagagagataccattccagttgcaatgtggctgcagcagggctaggtggacatgaggagcccagttcagggctgtcacagtagctccagcagcagatgattgtggctgggcctcccaagtgtcacgttggagaaccggagaaggggacttctttgggatgtactctggacttgttgatagattaagtgtaggtggggtgaggaagagaactcaaagatgacaccaggtgttggagctgagccacggggagaagggtgcaaagggaaagcagtgcgggggctgggaggggagagggtcagtcctgttttgcttgtgctgcatctgaggagcccctcacctgtggaaggagagcagtcccagaggcagtggggtgtgcagttctggaacttagaagaatgatcagggggctgggtgcagtggctcacgcctgtaatcccagcactttgggaggccgaggcgggcggatcaagaggtcaggagattgagaccatcctggctaacatggtgaaaccccgtctctactaaaaatataaaaaattagcagcgcatggtggcaggcacctgtagtcccagctattcaggaggctgaggcaggagagtggcgtgaacccgggagacggagcttgcagtgagctgagattgcgccactgcactccagcctgggcgacagagcgagactccgtctcaaaaaaaaaaaaaacaaaaaattatcaggaataaagatactgggaattcaaccacaaaaaccacaaagtcacgaatgcagagtgagagtcttcagagagagggcagaggcccaggatggcacagagggagagagaagccaccaagatggcagggagccatggccagagagaaaagcaaaccaggcgcctgtggcaccatggaagcagcaggtgatgctggagaagcgtttccatgcagtgacagctgccagagccagattattatggcctgagggctggtggtgctgcagttgggggggaatggagaccgcagcgggggaatggagaccgcaggggcggcaactcctcccagaggttcagtttggaggaaaaagagacagaaggaagggtaaccaaaggatattagaggtcaaggaggggtttattatttctagctggtcaaagtagaatgtggtaaaacccaataaagtaacagcaaataacaaagaggggcttttaatggaaagctgcagtgcctgcccctcacctccctagccccactcctcagaagcagccccctggagcggtttctctttctgctgcttttggaggctacttctgtctctgtaaaggaacttctgtctctgtaaaggaacaagcagaggccacagtgtcttggcaaatgaccgtggcattgtttatcccaacctgctctgagagatggggactctgctgattcacccctcgtccctgcctctttagttccttcagcaaagaactaataatatgtcattaaggcaaaggcagtatttggcacacttggcttctgtgttccaaaaaattccctttttctccaagcgtagattttaatatggtatttaagtatcaaagtgatttgacacaagtgacacaagtgagcagtagtagcatttgcaaaagctacaaatgatgaagtcttgctccaaaagcatattattattattttttaaattccagtttcaagctcaatggataggttgcgtcagtgggttttagtagagaaggggccagtacctatgaagactcccctgtactattacacatgctgcgtcccaagtagggaaactccagtgggtcatcaccccctccctctagcccaagtgggctgctgggtcagggcactgtttgggttgggttgagattcctggatccctaactagcaccttccaaagaatcggccttgcagagaacaaagttcattgccaaaggtattcccaatgtctgtctctcgctctgtgatagggcttctttactccccactttataagatgaggatatctgctataccccattccttcaacctctccacctctttcctcttttgtctgccatgtgattacttttccatcaccaaggttgatgagatccttactgtgtacttactgtctccaagcatccccaggcttccagccagcacgcagcagccaacattggcttcagaaggaaggaggtttgcatttccttctcttgggtccagtgccatggtctcagggttatctccaatgtggaaagttgctagaccaggagcagtttgactccactgtttttcagtctagcaagtttgagtttttcccaagctcttgatgtgtgttcaaatgaatgttctccctttcccaagagacctccctataagggagggtctagtttcccggggtgccctgagaagaaggggtcagcaggggggaggaatggtggaggctgaggcctcaggcaggtgccctgtgaggagtggctgtgacaagcggctgagatcccagcaaagggttgttgcccagaatctggggcctaagcgaggttggaaatcacaaatgcacttggtttctctagcagctggcacatagtaggatcagcccaggagtggcaccttcaaagagaaaggaacgcatgaggctccgagagcggtcggctggcagccagggcctggctggggagggagggcaggtggtgcgctgacctggggatctttgagagtgtgcaggagtatgtggctgaagcggcccagctggtgagccactgaagatgggggtcataggtagatggaggaattgccaggtcagaatctcggtaggagatgacttgagctgatgctgcctggcacataggggtttagaagatattaggaaggaagccccacagcgtgcccaagtgccatgcaggccctggagacggtcattggagggcgtctgtggatggcgcagtgggggatgggaagtccctaatctgctggggctttcccagcaagcagggactgagggggatagtccccaacacatgggccccagggagaagggcctgtttcattgaggtttggagagtgttgagggtaagctaacctgtcaccccacgcccccgagaatggttactgatagggagaggccttttccttgcaggagatggcgtctaccagaaggggatggacttcattttggagaagctcaaccatggggactgggtgcatatcttcccagaaggtcagcagggctgactgggtcgagcccccccagtatgagcgggatgggctcccaagcctcgcctctgtgctctctcaccagggaaagtgaacatgagttccgaattcctgcgtttcaagtggggtaagggctgctggtctctggccacagccatcctcccggcccagagatggccctgtgggcccctggctcccgccccctcgggctggcttgtatgggggtagatgggcgtgtttgtagcgccaggaaggggacaggtgctgagactaggcctgcctctcgcaggggcttgcccaagggagctgaattgaactggaggatgtcgggggtggcagtggccagaggctggcacagaagcttggctcagggcccagcttatgctaacatttctacctcccccctgggcaggaatcgggcgcctgattgctgagtgtcatctcaaccccatcatcctgcccctgtggcatgtcggtgagcctggggacggggacagagagatggcatctggggtggggggcctgggactccctctggtcccaggctgccctgctccaccccacgtctggccttctgtccactgtgctgcaggaatgaatgacgtccttcctaacagtccgccctacttcccccgctttggacaggtgggtggggactgctgaccttcggctgtctgcctgtctgctgtctgctccgtgtctcccactcagcactatggaggccagctgcaggaggagctgagcatgaggctacagcaggggacagagtggaacatagacagggacttcctggcaccgagacattaaaatgagagcagaggaagtcaggctggggcagaggtgggctgtggggtcaggacaggacaggtcatctacagcacaggacccaggaccaggaccttgttttagaggaagagtggcccctggggagtgtgtggcacagcagggccggggcttagcttctggctcccgggttgcttgggctggggctgtgggcactcctactgctcctcatcactcttggcggccaccccacagaaaatcactgtgctgatcgggaagcccttcagtgccctgcctgtactcgagcggctccgggcggagaacaagtcggctgtgagtttcctcctgggtcccccgtagctgtccccggaccccctgctgctggcttccagcagggtgcctccaccctctccatcccgtcaccctcccagggcaccctcccagggcaccttggccaagcttcccgaggggtgcaggccatccctggtcctttccctcaggtggagatgcggaaagccctgacggacttcattcaagaggaattccagcatctgaagactcaggcagagcagctccacaaccacctccag

SEQ ID NO: 14375 - DNA, 864 bp, Homo sapiens
ccctcatcaccgtgtccaatcaccagtcctgcatggacgaccctcatctctgggggatcctgaaactccgccacatctggaacctgaagttgatgcgttggtgaggaggaatgggcccctcgaagtgggccgggccggccccacctgcctctgcccagatttgccctcctcctgctctgcccaggaggtggcgtccagcagacccctgcagctgcagacatctgcttcaccaaggagctacactcccacttcttcagcttgggcaagtgtgtgcctgtgtgccgaggagcagaatttttccaagcagagaatgaggggaaaggtgttctagacacaggcaggcacatgccaggtgctggaaaaagaagagagaaaggagatggcgtctaccagaaggggatggacttcattttggagaagctcaaccatggggactgggtgcatatcttcccagaaggtcagcagggctgactgggtcgagcccccccagtatgagcgggatgggctcccaagcctcgcctctgtgctctctcaccagggaaagtgaacatgagttccgaattcctgcgtttcaagtggggaatcgggcgcctgattgctgagtgtcatctcaaccccatcatcctgcccctgtggcatgtcggaatgaatgacgtccttcctaacagtccgccctacttcccccgctttggacagaaaatcactgtgctgatcgggaagcccttcagtgccctgcctgtactcgagcggctccgggcggagaacaagtcggctgtggagatgcggaaagccctgacggacttcattcaagaggaattccagcatctgaagactcaggcagagcagctccacaaccacctccag

SEQ ID NO: 14376 - DNA, 8265 bp, Homo sapiens
cgggccgggtggggatgcctctgcacgtgaagtggccgttccccgcggtgccgccgctcacctggaccctggccagcagcgtcgtcatgggcttggtgggcacctacagctgcttctggaccagtgagtgggcccaggccgaggcaggcccgcccgggtacccatgcccggccggaggtgggacttagggtgggggacgccgcggccccgacctagcgggcgagcccggagcgcctgacttctccttccccgccagagtacatgaaccacctgaccgtgcacaacagggaggtgctgtacgagctcatcgagaagcgaggcccggccacgcccctcatcaccgtgtccaatcaccagtcctgcatggacgaccctcatctctggggtacccgggccagtgtgctgggcagggggaggaaaggcgaggattcgggacgggcccagcctcgtcagaacaaaccccttctcgctgccttttcatggagccctggcactccggtttccgggcgttctgccccagggctgagacttggatttgtggctcctgcagcatccctgagggagcatgatttggagagggccttgggcatggagcaggaccaaggaacggccacagggcatatcttacagctcctttaacgtcaggcctccagaaccctctgttctctaaaccatccagggccccacagtcttgggaaaaatttgggggttggacataggatatcctgtgaggaagttctgggccagggactggaagcccagtgtcctggcttcaggtttgcccctggctgggcgtgtaccgttcagccctatttgggagcctggttgccacacctagaggttcctgctctgctgacttcacaggaagttgcttggctctggtaaccagatggccgggtggaggggtgcctggggcttccactcctgaacagagagcttaactgtcctagagttcatggggagccacctagccacactggagcccttcagagctcaccctggctgctgggtggagaaaggcctatagatgtcacaggtggatcctgggaggccaggaaggaggacttggagccatccactagcctagactgggctggttgcagtgacagtacagggagaagtatagaagaatgggcattgtccaagtatgttggggaggtaggcagtccaggtgcagtgattagtaagatgtggagggtgggggagagggaggagccagggagaactgaatgatctggcctaagggtctgaaagatgccactttgggctgtagggaaatggtagtgctgctgtccctcattccctgagatggggtgaaggaagggcactccctggggatatgggaagttggggcatgaagcctttcctgtcctctagggatcctgaaactccgccacatctggaacctgaagttgatgcgttggtgaggaggaatgggcccctcgaagtgggccgggccggccccacctgcctctgcccagatttgccctcctcctgctctgcccaggaggtggcgtccagcagtccaggcagggcatggggtggggccccgcaggccctcccctgtgcctcccttctgcatgctgatgctgggggcagggtggtggagcggggtgcagggggcaggactaattgcatctgtccctgcttaggacccctgcagctgcagacatctgcttcaccaaggagctacactcccacttcttcagcttgggcaagtgtgtgcctgtgtgccgaggtgagctgctcctccagcgagtgcagggaggcacttctggggcaggaaagctggtggccagtgtctctgttttggagggacctatgggggtaggcatcccgggagccaacatgaggcccagctccatcacatgccagcagaggggacagaggctgtgggaggagggatgggtccttggaaagtcctcaactctctgcaactgcccagggatcctgtggacctggagccttggcattagaattcaaggaggcattatccataaccccttctctcagggatgtcactaagagactcattgagaacagtgcgttgtcattggtccatggtggcagtagcatgtacctgcaggccagagggttttgcttctaggagaacaaacaggcttgtggggtgagaaccccaggggataggggccattttgatccctattctccagacagggaggatcacagagattaagctgctggcccaaggtcatggggtaggaggtggcaaagccaggatttgaatccagattgctccttcctctgcaggagcagaatttttccaagcagagaatgaggggaaaggtgttctagacacaggcaggcacatgccaggtgctggaaaaagaagagagaaaggtaagccaggcatagcggttcacacttgtcatcccagcactttgtgaggtcgaggtgagaggatcactcaagcccaggagtttgagaccagcctgggcaacatagtaagaccctgtctctttaaaaataaaaatattttaaacaaaagaaaggtagaaaatatgagttgtatgtagaatatgaaggttctagaataatcctattaagaattttggattctggctgggcgcggtggctcacgcctgtaatcccagcactttgggaggctgaggccagcggatcacgaggtcaggagatcgagaccatcctggctaacacggtgaaaccccgtctctactaaaaatacaaaaaattagctgggcatggtagtgggcgcctgtagtcccagctactcgggaggctgaggcaggagaatggcgtgaacccggaaggtggagcttgcagtgagccaagatcacgccactgcactccagcctgggtgacagagtgagactccgtctcaaaaaaaaaaaaaaaagtgccggccacggtggctcatgcctgtaatcccagcactctgggaggccgaggcgggcggatcacgaggtcaggaattcgagaccagcctaaccaacatggtgaaaccccgtctctactaaaaatacaaaaattagccgggcgtggtggtgtgtgcctgtaatctcagctacttgggagactgagacgggagcattgcttgaacccgggaggtggaggttgtggtgagctgagatcctgccattgcactccagcctgggcaataagagcgaaactccgtctggaaaaaaaaaaaaaaaaaaagaattttgaattagctggctgcattggtgcatgcctacagtcccagctcctcaggaggctgaggtgggaggatcacttgagccctcgattttctttttccttgagacaatgtctgtttctgttgtccaggctggagtgccgtggcgtgatgatggctcactgcagcttctgtttcctgggttcaagggatcctgtcacctcagcctcctgagcagctgggactaaggagtgtgcccagctaattcttttttttttttggtagagttggggtcttactacattgccagggctggtcttgaactcctagactcaagcgatcctcccgcctcagcctctcaaagtgctgggatcacaggcatgagccattgtgcccaacccagcccaggaatttgaggccagcctgagcaatatagtgagaccccaggtatagatagataggtagatagataggtaggtaggtaggtagatagatagataggtaggtgggtaggtaggtgggtagataggtaggtaggtacgtaggtagatagatagatagatacatacatacatagatagataagatagatagattgattagatagattagatagccaggtggggtggctcacgcctgtaatcccagtgctttgggaggctgaggtgggtggatcacctgaggtcaggagtttgagaccagcctggctaatgtggcgaaaccctgtctactaaaaatacaaaaattagctggatgtggtggcgcacgcctgtaatctcagctactcgggaggctggggtgggagaatcgcttgaacccaggaggtggaggttgcagtgagctgagatcatgccactgcactccagcctgggccacagagggagacctggtctcaaaaaaaaaaaaaaaaaaaaaaaagatttttgtatttgactgtgctctctcatccaggtggtgacatgcttgtatctgtggttaagaggtagcatctgccaggcgcggtggctcatgcctgtaatcccagtactttgcgaggccgaggcgggtggttcacctgaggtcaggagtttgagaccagcctgaccaacatggcgaaaccccgtctctactaaaaatataaaaattagccgaggctgggcgcggtggctcacgcctgtaatcccagcactttgggaggccgaggcgggtggatcacgaggtcaggagatcgagaccatcctggctaacaggatgaaaccccgtctctactaaaaacacaaaattagctgggcatggtggcaggtgcctgtagtcccagctactcgggaggctgaggcaggagaatggcacaaacccgggaggcggagcttgaggcaggagaatggcgtgaacccgggaggcagagcttgctatgagcagagatcgcgccactgcactccagcctgggtgacagagcgagactccgtctcaaaaaaaaaaaaaagagagagataccattccagttgcaatgtggctgcagcagggctaggtggacatgaggagcccagttcagggctgtcacagtagctccagcagcagatgattgtggctgggcctcccaagtgtcacgttggagaaccggagaaggggacttctttgggatgtactctggacttgttgatagattaagtgtaggtggggtgaggaagagaactcaaagatgacaccaggtgttggagctgagccacggggagaagggtgcaaagggaaagcagtgcgggggctgggaggggagagggtcagtcctgttttgcttgtgctgcatctgaggagcccctcacctgtggaaggagagcagtcccagaggcagtggggtgtgcagttctggaacttagaagaatgatcagggggctgggtgcagtggctcacgcctgtaatcccagcactttgggaggccgaggcgggcggatcaagaggtcaggagattgagaccatcctggctaacatggtgaaaccccgtctctactaaaaatataaaaaattagcagcgcatggtggcaggcacctgtagtcccagctattcaggaggctgaggcaggagagtggcgtgaacccgggagacggagcttgcagtgagctgagattgcgccactgcactccagcctgggcgacagagcgagactccgtctcaaaaaaaaaaaaaacaaaaaattatcaggaataaagatactgggaattcaaccacaaaaaccacaaagtcacgaatgcagagtgagagtcttcagagagagggcagaggcccaggatggcacagagggagagagaagccaccaagatggcagggagccatggccagagagaaaagcaaaccaggcgcctgtggcaccatggaagcagcaggtgatgctggagaagcgtttccatgcagtgacagctgccagagccagattattatggcctgagggctggtggtgctgcagttgggggggaatggagaccgcagcgggggaatggagaccgcaggggcggcaactcctcccagaggttcagtttggaggaaaaagagacagaaggaagggtaaccaaaggatattagaggtcaaggaggggtttattatttctagctggtcaaagtagaatgtggtaaaacccaataaagtaacagcaaataacaaagaggggcttttaatggaaagctgcagtgcctgcccctcacctccctagccccactcctcagaagcagccccctggagcggtttctctttctgctgcttttggaggctacttctgtctctgtaaaggaacttctgtctctgtaaaggaacaagcagaggccacagtgtcttggcaaatgaccgtggcattgtttatcccaacctgctctgagagatggggactctgctgattcacccctcgtccctgcctctttagttccttcagcaaagaactaataatatgtcattaaggcaaaggcagtatttggcacacttggcttctgtgttccaaaaaattccctttttctccaagcgtagattttaatatggtatttaagtatcaaagtgatttgacacaagtgacacaagtgagcagtagtagcatttgcaaaagctacaaatgatgaagtcttgctccaaaagcatattattattattttttaaattccagtttcaagctcaatggataggttgcgtcagtgggttttagtagagaaggggccagtacctatgaagactcccctgtactattacacatgctgcgtcccaagtagggaaactccagtgggtcatcaccccctccctctagcccaagtgggctgctgggtcagggcactgtttgggttgggttgagattcctggatccctaactagcaccttccaaagaatcggccttgcagagaacaaagttcattgccaaaggtattcccaatgtctgtctctcgctctgtgatagggcttctttactccccactttataagatgaggatatctgctataccccattccttcaacctctccacctctttcctcttttgtctgccatgtgattacttttccatcaccaaggttgatgagatccttactgtgtacttactgtctccaagcatccccaggcttccagccagcacgcagcagccaacattggcttcagaaggaaggaggtttgcatttccttctcttgggtccagtgccatggtctcagggttatctccaatgtggaaagttgctagaccaggagcagtttgactccactgtttttcagtctagcaagtttgagtttttcccaagctcttgatgtgtgttcaaatgaatgttctccctttcccaagagacctccctataagggagggtctagtttcccggggtgccctgagaagaaggggtcagcaggggggaggaatggtggaggctgaggcctcaggcaggtgccctgtgaggagtggctgtgacaagcggctgagatcccagcaaagggttgttgcccagaatctggggcctaagcgaggttggaaatcacaaatgcacttggtttctctagcagctggcacatagtaggatcagcccaggagtggcaccttcaaagagaaaggaacgcatgaggctccgagagcggtcggctggcagccagggcctggctggggagggagggcaggtggtgcgctgacctggggatctttgagagtgtgcaggagtatgtggctgaagcggcccagctggtgagccactgaagatgggggtcataggtagatggaggaattgccaggtcagaatctcggtaggagatgacttgagctgatgctgcctggcacataggggtttagaagatattaggaaggaagccccacagcgtgcccaagtgccatgcaggccctggagacggtcattggagggcgtctgtggatggcgcagtgggggatgggaagtccctaatctgctggggctttcccagcaagcagggactgagggggatagtccccaacacatgggccccagggagaagggcctgtttcattgaggtttggagagtgttgagggtaagctaacctgtcaccccacgcccccgagaatggttactgatagggagaggccttttccttgcaggagatggcgtctaccagaaggggatggacttcattttggagaagctcaaccatggggactgggtgcatatcttcccagaaggtcagcagggctgactgggtcgagcccccccagtatgagcgggatgggctcccaagcctcgcctctgtgctctctcaccagggaaagtgaacatgagttccgaattcctgcgtttcaagtggggtaagggctgctggtctctggccacagccatcctcccggcccagagatggccctgtgggcccctggctcccgccccctcgggctggcttgtatgggggtagatgggcgtgtttgtagcgccaggaaggggacaggtgctgagactaggcctgcctctcgcaggggcttgcccaagggagctgaattgaactggaggatgtcgggggtggcagtggccagaggctggcacagaagcttggctcagggcccagcttatgctaacatttctacctcccccctgggcaggaatcgggcgcctgattgctgagtgtcatctcaaccccatcatcctgcccctgtggcatgtcg

SEQ ID NO: 14377 - DNA, 567 bp, Homo sapiens
cgggccgggtggggatgcctctgcacgtgaagtggccgttccccgcggtgccgccgctcacctggaccctggccagcagcgtcgtcatgggcttggtgggcacctacagctgcttctggaccaagtacatgaaccacctgaccgtgcacaacagggaggtgctgtacgagctcatcgagaagcgaggcccggccacgcccctcatcaccgtgtccaatcaccagtcctgcatggacgaccctcatctctgggggatcctgaaactccgccacatctggaacctgaagttgatgcgttggacccctgcagctgcagacatctgcttcaccaaggagctacactcccacttcttcagcttgggcaagtgtgtgcctgtgtgccgagatggcgtctaccagaaggggatggacttcattttggagaagctcaaccatggggactgggtgcatatcttcccagaagggaaagtgaacatgagttccgaattcctgcgtttcaagtggggaatcgggcgcctgattgctgagtgtcatctcaaccccatcatcctgcccctgtggcatgtcg

SEQ ID NO: 14378 - DNA, 8786 bp, Homo sapiens
gggctggttgcagtgacagtacagggagaagtatagaagaatgggcattgtccaagtatgttggggaggtaggcagtccaggtgcagtgattagtaagatgtggagggtgggggagagggaggagccagggagaactgaatgatctggcctaagggtctgaaagatgccactttgggctgtagggaaatggtagtgctgctgtccctcattccctgagatggggtgaaggaagggcactccctggggatatgggaagttggggcatgaagcctttcctgtcctctagggatcctgaaactccgccacatctggaacctgaagttgatgcgttggtgaggaggaatgggcccctcgaagtgggccgggccggccccacctgcctctgcccagatttgccctcctcctgctctgcccaggaggtggcgtccagcagtccaggcagggcatggggtggggccccgcaggccctcccctgtgcctcccttctgcatgctgatgctgggggcagggtggtggagcggggtgcagggggcaggactaattgcatctgtccctgcttaggacccctgcagctgcagacatctgcttcaccaaggagctacactcccacttcttcagcttgggcaagtgtgtgcctgtgtgccgaggtgagctgctcctccagcgagtgcagggaggcacttctggggcaggaaagctggtggccagtgtctctgttttggagggacctatgggggtaggcatcccgggagccaacatgaggcccagctccatcacatgccagcagaggggacagaggctgtgggaggagggatgggtccttggaaagtcctcaactctctgcaactgcccagggatcctgtggacctggagccttggcattagaattcaaggaggcattatccataaccccttctctcagggatgtcactaagagactcattgagaacagtgcgttgtcattggtccatggtggcagtagcatgtacctgcaggccagagggttttgcttctaggagaacaaacaggcttgtggggtgagaaccccaggggataggggccattttgatccctattctccagacagggaggatcacagagattaagctgctggcccaaggtcatggggtaggaggtggcaaagccaggatttgaatccagattgctccttcctctgcaggagcagaatttttccaagcagagaatgaggggaaaggtgttctagacacaggcaggcacatgccaggtgctggaaaaagaagagagaaaggtaagccaggcatagcggttcacacttgtcatcccagcactttgtgaggtcgaggtgagaggatcactcaagcccaggagtttgagaccagcctgggcaacatagtaagaccctgtctctttaaaaataaaaatattttaaacaaaagaaaggtagaaaatatgagttgtatgtagaatatgaaggttctagaataatcctattaagaattttggattctggctgggcgcggtggctcacgcctgtaatcccagcactttgggaggctgaggccagcggatcacgaggtcaggagatcgagaccatcctggctaacacggtgaaaccccgtctctactaaaaatacaaaaaattagctgggcatggtagtgggcgcctgtagtcccagctactcgggaggctgaggcaggagaatggcgtgaacccggaaggtggagcttgcagtgagccaagatcacgccactgcactccagcctgggtgacagagtgagactccgtctcaaaaaaaaaaaaaaaagtgccggccacggtggctcatgcctgtaatcccagcactctgggaggccgaggcgggcggatcacgaggtcaggaattcgagaccagcctaaccaacatggtgaaaccccgtctctactaaaaatacaaaaattagccgggcgtggtggtgtgtgcctgtaatctcagctacttgggagactgagacgggagcattgcttgaacccgggaggtggaggttgtggtgagctgagatcctgccattgcactccagcctgggcaataagagcgaaactccgtctggaaaaaaaaaaaaaaaaaaagaattttgaattagctggctgcattggtgcatgcctacagtcccagctcctcaggaggctgaggtgggaggatcacttgagccctcgattttctttttccttgagacaatgtctgtttctgttgtccaggctggagtgccgtggcgtgatgatggctcactgcagcttctgtttcctgggttcaagggatcctgtcacctcagcctcctgagcagctgggactaaggagtgtgcccagctaattcttttttttttttggtagagttggggtcttactacattgccagggctggtcttgaactcctagactcaagcgatcctcccgcctcagcctctcaaagtgctgggatcacaggcatgagccattgtgcccaacccagcccaggaatttgaggccagcctgagcaatatagtgagaccccaggtatagatagataggtagatagataggtaggtaggtaggtagatagatagataggtaggtgggtaggtaggtgggtagataggtaggtaggtacgtaggtagatagatagatagatacatacatacatagatagataagatagatagattgattagatagattagatagccaggtggggtggctcacgcctgtaatcccagtgctttgggaggctgaggtgggtggatcacctgaggtcaggagtttgagaccagcctggctaatgtggcgaaaccctgtctactaaaaatacaaaaattagctggatgtggtggcgcacgcctgtaatctcagctactcgggaggctggggtgggagaatcgcttgaacccaggaggtggaggttgcagtgagctgagatcatgccactgcactccagcctgggccacagagggagacctggtctcaaaaaaaaaaaaaaaaaaaaaaaagatttttgtatttgactgtgctctctcatccaggtggtgacatgcttgtatctgtggttaagaggtagcatctgccaggcgcggtggctcatgcctgtaatcccagtactttgcgaggccgaggcgggtggttcacctgaggtcaggagtttgagaccagcctgaccaacatggcgaaaccccgtctctactaaaaatataaaaattagccgaggctgggcgcggtggctcacgcctgtaatcccagcactttgggaggccgaggcgggtggatcacgaggtcaggagatcgagaccatcctggctaacaggatgaaaccccgtctctactaaaaacacaaaattagctgggcatggtggcaggtgcctgtagtcccagctactcgggaggctgaggcaggagaatggcacaaacccgggaggcggagcttgaggcaggagaatggcgtgaacccgggaggcagagcttgctatgagcagagatcgcgccactgcactccagcctgggtgacagagcgagactccgtctcaaaaaaaaaaaaaagagagagataccattccagttgcaatgtggctgcagcagggctaggtggacatgaggagcccagttcagggctgtcacagtagctccagcagcagatgattgtggctgggcctcccaagtgtcacgttggagaaccggagaaggggacttctttgggatgtactctggacttgttgatagattaagtgtaggtggggtgaggaagagaactcaaagatgacaccaggtgttggagctgagccacggggagaagggtgcaaagggaaagcagtgcgggggctgggaggggagagggtcagtcctgttttgcttgtgctgcatctgaggagcccctcacctgtggaaggagagcagtcccagaggcagtggggtgtgcagttctggaacttagaagaatgatcagggggctgggtgcagtggctcacgcctgtaatcccagcactttgggaggccgaggcgggcggatcaagaggtcaggagattgagaccatcctggctaacatggtgaaaccccgtctctactaaaaatataaaaaattagcagcgcatggtggcaggcacctgtagtcccagctattcaggaggctgaggcaggagagtggcgtgaacccgggagacggagcttgcagtgagctgagattgcgccactgcactccagcctgggcgacagagcgagactccgtctcaaaaaaaaaaaaaacaaaaaattatcaggaataaagatactgggaattcaaccacaaaaaccacaaagtcacgaatgcagagtgagagtcttcagagagagggcagaggcccaggatggcacagagggagagagaagccaccaagatggcagggagccatggccagagagaaaagcaaaccaggcgcctgtggcaccatggaagcagcaggtgatgctggagaagcgtttccatgcagtgacagctgccagagccagattattatggcctgagggctggtggtgctgcagttgggggggaatggagaccgcagcgggggaatggagaccgcaggggcggcaactcctcccagaggttcagtttggaggaaaaagagacagaaggaagggtaaccaaaggatattagaggtcaaggaggggtttattatttctagctggtcaaagtagaatgtggtaaaacccaataaagtaacagcaaataacaaagaggggcttttaatggaaagctgcagtgcctgcccctcacctccctagccccactcctcagaagcagccccctggagcggtttctctttctgctgcttttggaggctacttctgtctctgtaaaggaacttctgtctctgtaaaggaacaagcagaggccacagtgtcttggcaaatgaccgtggcattgtttatcccaacctgctctgagagatggggactctgctgattcacccctcgtccctgcctctttagttccttcagcaaagaactaataatatgtcattaaggcaaaggcagtatttggcacacttggcttctgtgttccaaaaaattccctttttctccaagcgtagattttaatatggtatttaagtatcaaagtgatttgacacaagtgacacaagtgagcagtagtagcatttgcaaaagctacaaatgatgaagtcttgctccaaaagcatattattattattttttaaattccagtttcaagctcaatggataggttgcgtcagtgggttttagtagagaaggggccagtacctatgaagactcccctgtactattacacatgctgcgtcccaagtagggaaactccagtgggtcatcaccccctccctctagcccaagtgggctgctgggtcagggcactgtttgggttgggttgagattcctggatccctaactagcaccttccaaagaatcggccttgcagagaacaaagttcattgccaaaggtattcccaatgtctgtctctcgctctgtgatagggcttctttactccccactttataagatgaggatatctgctataccccattccttcaacctctccacctctttcctcttttgtctgccatgtgattacttttccatcaccaaggttgatgagatccttactgtgtacttactgtctccaagcatccccaggcttccagccagcacgcagcagccaacattggcttcagaaggaaggaggtttgcatttccttctcttgggtccagtgccatggtctcagggttatctccaatgtggaaagttgctagaccaggagcagtttgactccactgtttttcagtctagcaagtttgagtttttcccaagctcttgatgtgtgttcaaatgaatgttctccctttcccaagagacctccctataagggagggtctagtttcccggggtgccctgagaagaaggggtcagcaggggggaggaatggtggaggctgaggcctcaggcaggtgccctgtgaggagtggctgtgacaagcggctgagatcccagcaaagggttgttgcccagaatctggggcctaagcgaggttggaaatcacaaatgcacttggtttctctagcagctggcacatagtaggatcagcccaggagtggcaccttcaaagagaaaggaacgcatgaggctccgagagcggtcggctggcagccagggcctggctggggagggagggcaggtggtgcgctgacctggggatctttgagagtgtgcaggagtatgtggctgaagcggcccagctggtgagccactgaagatgggggtcataggtagatggaggaattgccaggtcagaatctcggtaggagatgacttgagctgatgctgcctggcacataggggtttagaagatattaggaaggaagccccacagcgtgcccaagtgccatgcaggccctggagacggtcattggagggcgtctgtggatggcgcagtgggggatgggaagtccctaatctgctggggctttcccagcaagcagggactgagggggatagtccccaacacatgggccccagggagaagggcctgtttcattgaggtttggagagtgttgagggtaagctaacctgtcaccccacgcccccgagaatggttactgatagggagaggccttttccttgcaggagatggcgtctaccagaaggggatggacttcattttggagaagctcaaccatggggactgggtgcatatcttcccagaaggtcagcagggctgactgggtcgagcccccccagtatgagcgggatgggctcccaagcctcgcctctgtgctctctcaccagggaaagtgaacatgagttccgaattcctgcgtttcaagtggggtaagggctgctggtctctggccacagccatcctcccggcccagagatggccctgtgggcccctggctcccgccccctcgggctggcttgtatgggggtagatgggcgtgtttgtagcgccaggaaggggacaggtgctgagactaggcctgcctctcgcaggggcttgcccaagggagctgaattgaactggaggatgtcgggggtggcagtggccagaggctggcacagaagcttggctcagggcccagcttatgctaacatttctacctcccccctgggcaggaatcgggcgcctgattgctgagtgtcatctcaaccccatcatcctgcccctgtggcatgtcggtgagcctggggacggggacagagagatggcatctggggtggggggcctgggactccctctggtcccaggctgccctgctccaccccacgtctggccttctgtccactgtgctgcaggaatgaatgacgtccttcctaacagtccgccctacttcccccgctttggacaggtgggtggggactgctgaccttcggctgtctgcctgtctgctgtctgctccgtgtctcccactcagcactatggaggccagctgcaggaggagctgagcatgaggctacagcaggggacagagtggaacatagacagggacttcctggcaccgagacattaaaatgagagcagaggaagtcaggctggggcagaggtgggctgtggggtcaggacaggacaggtcatctacagcacaggacccaggaccaggaccttgttttagaggaagagtggcccctggggagtgtgtggcacagcagggccggggcttagcttctggctcccgggttgcttgggctggggctgtgggcactcctactgctcctcatcactcttggcggccaccccacagaaaatcactgtgctgatcgggaagcccttcagtgccctgcctgtactcgagcggctccgggcggagaacaagtcggctgtgagtttcctcctgggtcccccgtagctgtccccggaccccctgctgctggcttccagcagggtgcctccaccctctccatcccgtcaccctcccagggcaccctcccagggcaccttggccaagcttcccgaggggtgcaggccatccctggtcctttccctcaggtggagatgcggaaagccctgacggacttcattcaagaggaattccagcatctgaagactcaggcagagcagctccacaaccacctccagcctgggagataggccttgcttgctgccttctggattcttggcccgcacagagctggggctgagggatggactgatgcttttagctcaaacgtggcttttagacagatttgttcatagaccctctcaagtgccctctccgagctggtaggcattccagctcctccgtgcttcctcagttacacaaaggacctcagctgcttctcccacttggccaagcagggaggaagaagcttaggcagggctctctttccttcttgccttcagatgttctctcccaggggctggcttcaggagggagcatagaaggcaggtgagcaaccagttggctaggggagcagggggcccaccagagctgtggagaggggaccctaagactcctcggcctggctcctacccaccgcccttgccgaaccaggagctgctcactacctcctcagggatggccgttggccacgtcttccttctgcctgagcttcccccccaccacaggccctttcctcaggcaaggtctggcctcaggtgggccgcaggcgggaaaagcagcccttggccagaagtcaagcccagccacgtggagcctagagtgagggcctgaggtctggctgcttgcccccatgctggcgccaacaacttctccatcctttctgcctctcaacatcacttgaatcctagggcctgggttttcatgtttttgaaacagaaccataaagcat

SEQ ID NO: 14379 - DNA, 2053 bp, Homo sapiens
gggctggttgcagtgacagtacagggagaagtatagaagaatgggcattgtccaagtatgttggggaggtaggcagtccaggtgcagtgattagtaagatgtggagggtgggggagagggaggagccagggagaactgaatgatctggcctaagggtctgaaagatgccactttgggctgtagggaaatggtagtgctgctgtccctcattccctgagatggggtgaaggaagggcactccctggggatatgggaagttggggcatgaagcctttcctgtcctctagggatcctgaaactccgccacatctggaacctgaagttgatgcgttggtgaggaggaatgggcccctcgaagtgggccgggccggccccacctgcctctgcccagatttgccctcctcctgctctgcccaggaggtggcgtccagcagtccaggcagggcatggggtggggccccgcaggccctcccctgtgcctcccttctgcatgctgatgctgggggcagggtggtggagcggggtgcagggggcaggactaattgcatctgtccctgcttaggacccctgcagctgcagacatctgcttcaccaaggagctacactcccacttcttcagcttgggcaagtgtgtgcctgtgtgccgaggagatggcgtctaccagaaggggatggacttcattttggagaagctcaaccatggggactgggtgcatatcttcccagaagggaaagtgaacatgagttccgaattcctgcgtttcaagtggggtaagggctgctggtctctggccacagccatcctcccggcccagagatggccctgtgggcccctggctcccgccccctcgggctggcttgtatgggggtagatgggcgtgtttgtagcgccaggaaggggacaggtgctgagactaggcctgcctctcgcaggggcttgcccaagggagctgaattgaactggaggatgtcgggggtggcagtggccagaggctggcacagaagcttggctcagggcccagcttatgctaacatttctacctcccccctgggcaggaatcgggcgcctgattgctgagtgtcatctcaaccccatcatcctgcccctgtggcatgtcggaatgaatgacgtccttcctaacagtccgccctacttcccccgctttggacagaaaatcactgtgctgatcgggaagcccttcagtgccctgcctgtactcgagcggctccgggcggagaacaagtcggctgtggagatgcggaaagccctgacggacttcattcaagaggaattccagcatctgaagactcaggcagagcagctccacaaccacctccagcctgggagataggccttgcttgctgccttctggattcttggcccgcacagagctggggctgagggatggactgatgcttttagctcaaacgtggcttttagacagatttgttcatagaccctctcaagtgccctctccgagctggtaggcattccagctcctccgtgcttcctcagttacacaaaggacctcagctgcttctcccacttggccaagcagggaggaagaagcttaggcagggctctctttccttcttgccttcagatgttctctcccaggggctggcttcaggagggagcatagaaggcaggtgagcaaccagttggctaggggagcagggggcccaccagagctgtggagaggggaccctaagactcctcggcctggctcctacccaccgcccttgccgaaccaggagctgctcactacctcctcagggatggccgttggccacgtcttccttctgcctgagcttcccccccaccacaggccctttcctcaggcaaggtctggcctcaggtgggccgcaggcgggaaaagcagcccttggccagaagtcaagcccagccacgtggagcctagagtgagggcctgaggtctggctgcttgcccccatgctggcgccaacaacttctccatcctttctgcctctcaacatcacttgaatcctagggcctgggttttcatgtttttgaaacagaaccataaagcat

SEQ ID NO: 14380 - DNA, 9950 bp, Homo sapiens
gcaccgggccggggtgccagcgcccgccttcccgtttcctcccgttccgcagcgcgcccacggcctgtgaccccggcgaccgctccccagtgacgagagagcggggccgggcgctgctccggcctgacctgcgaagggacctcggtccagtcccctgttgcgccgcgcccccgtccgtccgtgcgcgggccagtcaggggccagtgtctcgagcggtcgaggtcgcagacctagaggcgccccacaggccggcccggggcgctgggagcgccggccgcgggccgggtggggatgcctctgcacgtgaagtggccgttccccgcggtgccgccgctcacctggaccctggccagcagcgtcgtcatgggcttggtgggcacctacagctgcttctggaccagtgagtgggcccaggccgaggcaggcccgcccgggtacccatgcccggccggaggtgggacttagggtgggggacgccgcggccccgacctagcgggcgagcccggagcgcctgacttctccttccccgccagagtacatgaaccacctgaccgtgcacaacagggaggtgctgtacgagctcatcgagaagcgaggcccggccacgcccctcatcaccgtgtccaatcaccagtcctgcatggacgaccctcatctctggggtacccgggccagtgtgctgggcagggggaggaaaggcgaggattcgggacgggcccagcctcgtcagaacaaaccccttctcgctgccttttcatggagccctggcactccggtttccgggcgttctgccccagggctgagacttggatttgtggctcctgcagcatccctgagggagcatgatttggagagggccttgggcatggagcaggaccaaggaacggccacagggcatatcttacagctcctttaacgtcaggcctccagaaccctctgttctctaaaccatccagggccccacagtcttgggaaaaatttgggggttggacataggatatcctgtgaggaagttctgggccagggactggaagcccagtgtcctggcttcaggtttgcccctggctgggcgtgtaccgttcagccctatttgggagcctggttgccacacctagaggttcctgctctgctgacttcacaggaagttgcttggctctggtaaccagatggccgggtggaggggtgcctggggcttccactcctgaacagagagcttaactgtcctagagttcatggggagccacctagccacactggagcccttcagagctcaccctggctgctgggtggagaaaggcctatagatgtcacaggtggatcctgggaggccaggaaggaggacttggagccatccactagcctagactgggctggttgcagtgacagtacagggagaagtatagaagaatgggcattgtccaagtatgttggggaggtaggcagtccaggtgcagtgattagtaagatgtggagggtgggggagagggaggagccagggagaactgaatgatctggcctaagggtctgaaagatgccactttgggctgtagggaaatggtagtgctgctgtccctcattccctgagatggggtgaaggaagggcactccctggggatatgggaagttggggcatgaagcctttcctgtcctctagggatcctgaaactccgccacatctggaacctgaagttgatgcgttggtgaggaggaatgggcccctcgaagtgggccgggccggccccacctgcctctgcccagatttgccctcctcctgctctgcccaggaggtggcgtccagcagtccaggcagggcatggggtggggccccgcaggccctcccctgtgcctcccttctgcatgctgatgctgggggcagggtggtggagcggggtgcagggggcaggactaattgcatctgtccctgcttaggacccctgcagctgcagacatctgcttcaccaaggagctacactcccacttcttcagcttgggcaagtgtgtgcctgtgtgccgaggtgagctgctcctccagcgagtgcagggaggcacttctggggcaggaaagctggtggccagtgtctctgttttggagggacctatgggggtaggcatcccgggagccaacatgaggcccagctccatcacatgccagcagaggggacagaggctgtgggaggagggatgggtccttggaaagtcctcaactctctgcaactgcccagggatcctgtggacctggagccttggcattagaattcaaggaggcattatccataaccccttctctcagggatgtcactaagagactcattgagaacagtgcgttgtcattggtccatggtggcagtagcatgtacctgcaggccagagggttttgcttctaggagaacaaacaggcttgtggggtgagaaccccaggggataggggccattttgatccctattctccagacagggaggatcacagagattaagctgctggcccaaggtcatggggtaggaggtggcaaagccaggatttgaatccagattgctccttcctctgcaggagcagaatttttccaagcagagaatgaggggaaaggtgttctagacacaggcaggcacatgccaggtgctggaaaaagaagagagaaaggtaagccaggcatagcggttcacacttgtcatcccagcactttgtgaggtcgaggtgagaggatcactcaagcccaggagtttgagaccagcctgggcaacatagtaagaccctgtctctttaaaaataaaaatattttaaacaaaagaaaggtagaaaatatgagttgtatgtagaatatgaaggttctagaataatcctattaagaattttggattctggctgggcgcggtggctcacgcctgtaatcccagcactttgggaggctgaggccagcggatcacgaggtcaggagatcgagaccatcctggctaacacggtgaaaccccgtctctactaaaaatacaaaaaattagctgggcatggtagtgggcgcctgtagtcccagctactcgggaggctgaggcaggagaatggcgtgaacccggaaggtggagcttgcagtgagccaagatcacgccactgcactccagcctgggtgacagagtgagactccgtctcaaaaaaaaaaaaaaaagtgccggccacggtggctcatgcctgtaatcccagcactctgggaggccgaggcgggcggatcacgaggtcaggaattcgagaccagcctaaccaacatggtgaaaccccgtctctactaaaaatacaaaaattagccgggcgtggtggtgtgtgcctgtaatctcagctacttgggagactgagacgggagcattgcttgaacccgggaggtggaggttgtggtgagctgagatcctgccattgcactccagcctgggcaataagagcgaaactccgtctggaaaaaaaaaaaaaaaaaaagaattttgaattagctggctgcattggtgcatgcctacagtcccagctcctcaggaggctgaggtgggaggatcacttgagccctcgattttctttttccttgagacaatgtctgtttctgttgtccaggctggagtgccgtggcgtgatgatggctcactgcagcttctgtttcctgggttcaagggatcctgtcacctcagcctcctgagcagctgggactaaggagtgtgcccagctaattcttttttttttttggtagagttggggtcttactacattgccagggctggtcttgaactcctagactcaagcgatcctcccgcctcagcctctcaaagtgctgggatcacaggcatgagccattgtgcccaacccagcccaggaatttgaggccagcctgagcaatatagtgagaccccaggtatagatagataggtagatagataggtaggtaggtaggtagatagatagataggtaggtgggtaggtaggtgggtagataggtaggtaggtacgtaggtagatagatagatagatacatacatacatagatagataagatagatagattgattagatagattagatagccaggtggggtggctcacgcctgtaatcccagtgctttgggaggctgaggtgggtggatcacctgaggtcaggagtttgagaccagcctggctaatgtggcgaaaccctgtctactaaaaatacaaaaattagctggatgtggtggcgcacgcctgtaatctcagctactcgggaggctggggtgggagaatcgcttgaacccaggaggtggaggttgcagtgagctgagatcatgccactgcactccagcctgggccacagagggagacctggtctcaaaaaaaaaaaaaaaaaaaaaaaagatttttgtatttgactgtgctctctcatccaggtggtgacatgcttgtatctgtggttaagaggtagcatctgccaggcgcggtggctcatgcctgtaatcccagtactttgcgaggccgaggcgggtggttcacctgaggtcaggagtttgagaccagcctgaccaacatggcgaaaccccgtctctactaaaaatataaaaattagccgaggctgggcgcggtggctcacgcctgtaatcccagcactttgggaggccgaggcgggtggatcacgaggtcaggagatcgagaccatcctggctaacaggatgaaaccccgtctctactaaaaacacaaaattagctgggcatggtggcaggtgcctgtagtcccagctactcgggaggctgaggcaggagaatggcacaaacccgggaggcggagcttgaggcaggagaatggcgtgaacccgggaggcagagcttgctatgagcagagatcgcgccactgcactccagcctgggtgacagagcgagactccgtctcaaaaaaaaaaaaaagagagagataccattccagttgcaatgtggctgcagcagggctaggtggacatgaggagcccagttcagggctgtcacagtagctccagcagcagatgattgtggctgggcctcccaagtgtcacgttggagaaccggagaaggggacttctttgggatgtactctggacttgttgatagattaagtgtaggtggggtgaggaagagaactcaaagatgacaccaggtgttggagctgagccacggggagaagggtgcaaagggaaagcagtgcgggggctgggaggggagagggtcagtcctgttttgcttgtgctgcatctgaggagcccctcacctgtggaaggagagcagtcccagaggcagtggggtgtgcagttctggaacttagaagaatgatcagggggctgggtgcagtggctcacgcctgtaatcccagcactttgggaggccgaggcgggcggatcaagaggtcaggagattgagaccatcctggctaacatggtgaaaccccgtctctactaaaaatataaaaaattagcagcgcatggtggcaggcacctgtagtcccagctattcaggaggctgaggcaggagagtggcgtgaacccgggagacggagcttgcagtgagctgagattgcgccactgcactccagcctgggcgacagagcgagactccgtctcaaaaaaaaaaaaaacaaaaaattatcaggaataaagatactgggaattcaaccacaaaaaccacaaagtcacgaatgcagagtgagagtcttcagagagagggcagaggcccaggatggcacagagggagagagaagccaccaagatggcagggagccatggccagagagaaaagcaaaccaggcgcctgtggcaccatggaagcagcaggtgatgctggagaagcgtttccatgcagtgacagctgccagagccagattattatggcctgagggctggtggtgctgcagttgggggggaatggagaccgcagcgggggaatggagaccgcaggggcggcaactcctcccagaggttcagtttggaggaaaaagagacagaaggaagggtaaccaaaggatattagaggtcaaggaggggtttattatttctagctggtcaaagtagaatgtggtaaaacccaataaagtaacagcaaataacaaagaggggcttttaatggaaagctgcagtgcctgcccctcacctccctagccccactcctcagaagcagccccctggagcggtttctctttctgctgcttttggaggctacttctgtctctgtaaaggaacttctgtctctgtaaaggaacaagcagaggccacagtgtcttggcaaatgaccgtggcattgtttatcccaacctgctctgagagatggggactctgctgattcacccctcgtccctgcctctttagttccttcagcaaagaactaataatatgtcattaaggcaaaggcagtatttggcacacttggcttctgtgttccaaaaaattccctttttctccaagcgtagattttaatatggtatttaagtatcaaagtgatttgacacaagtgacacaagtgagcagtagtagcatttgcaaaagctacaaatgatgaagtcttgctccaaaagcatattattattattttttaaattccagtttcaagctcaatggataggttgcgtcagtgggttttagtagagaaggggccagtacctatgaagactcccctgtactattacacatgctgcgtcccaagtagggaaactccagtgggtcatcaccccctccctctagcccaagtgggctgctgggtcagggcactgtttgggttgggttgagattcctggatccctaactagcaccttccaaagaatcggccttgcagagaacaaagttcattgccaaaggtattcccaatgtctgtctctcgctctgtgatagggcttctttactccccactttataagatgaggatatctgctataccccattccttcaacctctccacctctttcctcttttgtctgccatgtgattacttttccatcaccaaggttgatgagatccttactgtgtacttactgtctccaagcatccccaggcttccagccagcacgcagcagccaacattggcttcagaaggaaggaggtttgcatttccttctcttgggtccagtgccatggtctcagggttatctccaatgtggaaagttgctagaccaggagcagtttgactccactgtttttcagtctagcaagtttgagtttttcccaagctcttgatgtgtgttcaaatgaatgttctccctttcccaagagacctccctataagggagggtctagtttcccggggtgccctgagaagaaggggtcagcaggggggaggaatggtggaggctgaggcctcaggcaggtgccctgtgaggagtggctgtgacaagcggctgagatcccagcaaagggttgttgcccagaatctggggcctaagcgaggttggaaatcacaaatgcacttggtttctctagcagctggcacatagtaggatcagcccaggagtggcaccttcaaagagaaaggaacgcatgaggctccgagagcggtcggctggcagccagggcctggctggggagggagggcaggtggtgcgctgacctggggatctttgagagtgtgcaggagtatgtggctgaagcggcccagctggtgagccactgaagatgggggtcataggtagatggaggaattgccaggtcagaatctcggtaggagatgacttgagctgatgctgcctggcacataggggtttagaagatattaggaaggaagccccacagcgtgcccaagtgccatgcaggccctggagacggtcattggagggcgtctgtggatggcgcagtgggggatgggaagtccctaatctgctggggctttcccagcaagcagggactgagggggatagtccccaacacatgggccccagggagaagggcctgtttcattgaggtttggagagtgttgagggtaagctaacctgtcaccccacgcccccgagaatggttactgatagggagaggccttttccttgcaggagatggcgtctaccagaaggggatggacttcattttggagaagctcaaccatggggactgggtgcatatcttcccagaaggtcagcagggctgactgggtcgagcccccccagtatgagcgggatgggctcccaagcctcgcctctgtgctctctcaccagggaaagtgaacatgagttccgaattcctgcgtttcaagtggggtaagggctgctggtctctggccacagccatcctcccggcccagagatggccctgtgggcccctggctcccgccccctcgggctggcttgtatgggggtagatgggcgtgtttgtagcgccaggaaggggacaggtgctgagactaggcctgcctctcgcaggggcttgcccaagggagctgaattgaactggaggatgtcgggggtggcagtggccagaggctggcacagaagcttggctcagggcccagcttatgctaacatttctacctcccccctgggcaggaatcgggcgcctgattgctgagtgtcatctcaaccccatcatcctgcccctgtggcatgtcggtgagcctggggacggggacagagagatggcatctggggtggggggcctgggactccctctggtcccaggctgccctgctccaccccacgtctggccttctgtccactgtgctgcaggaatgaatgacgtccttcctaacagtccgccctacttcccccgctttggacaggtgggtggggactgctgaccttcggctgtctgcctgtctgctgtctgctccgtgtctcccactcagcactatggaggccagctgcaggaggagctgagcatgaggctacagcaggggacagagtggaacatagacagggacttcctggcaccgagacattaaaatgagagcagaggaagtcaggctggggcagaggtgggctgtggggtcaggacaggacaggtcatctacagcacaggacccaggaccaggaccttgttttagaggaagagtggcccctggggagtgtgtggcacagcagggccggggcttagcttctggctcccgggttgcttgggctggggctgtgggcactcctactgctcctcatcactcttggcggccaccccacagaaaatcactgtgctgatcgggaagcccttcagtgccctgcctgtactcgagcggctccgggcggagaacaagtcggctgtgagtttcctcctgggtcccccgtagctgtccccggaccccctgctgctggcttccagcagggtgcctccaccctctccatcccgtcaccctcccagggcaccctcccagggcaccttggccaagcttcccgaggggtgcaggccatccctggtcctttccctcaggtggagatgcggaaagccctgacggacttcattcaagaggaattccagcatctgaagactcaggcagagcagctccacaaccacctccagcctgggagataggccttgcttgctgccttctggattcttggcccgcacagagctggggctgagggatggactgatgcttttagctcaaacgtggcttttagacagatttgttcatagaccctctcaagtgccctctccgagctggtaggcattccagctcctccgtgcttcctcagttacacaaaggacctcagctgcttctcccacttggccaagcagggaggaagaagcttaggcagggctctctttccttcttgccttcagatgttctctcccaggggctggcttcaggagggagcatagaaggcaggtgagcaaccagttggctaggggagcagggggcccaccagagctgtggagaggggaccctaagactcctcggcctggctcctacccaccgcccttgccgaaccaggagctgctcactacctcctcagggatggccgttggccacgtcttccttctgcctgagcttcccccccaccacaggccctttcctcaggcaaggtc

SEQ ID NO: 14381 - DNA, 1632 bp, Homo sapiens
gcaccgggccggggtgccagcgcccgccttcccgtttcctcccgttccgcagcgcgcccacggcctgtgaccccggcgaccgctccccagtgacgagagagcggggccgggcgctgctccggcctgacctgcgaagggacctcggtccagtcccctgttgcgccgcgcccccgtccgtccgtgcgcgggccagtcaggggccagtgtctcgagcggtcgaggtcgcagacctagaggcgccccacaggccggcccggggcgctgggagcgccggccgcgggccgggtggggatgcctctgcacgtgaagtggccgttccccgcggtgccgccgctcacctggaccctggccagcagcgtcgtcatgggcttggtgggcacctacagctgcttctggaccagtgagtgggcccaggccgaggcaggcccgcccgggtacccatgcccggccggagagtacatgaaccacctgaccgtgcacaacagggaggtgctgtacgagctcatcgagaagcgaggcccggccacgcccctcatcaccgtgtccaatcaccagtcctgcatggacgaccctcatctctgggggatcctgaaactccgccacatctggaacctgaagttgatgcgttggacccctgcagctgcagacatctgcttcaccaaggagctacactcccacttcttcagcttgggcaagtgtgtgcctgtgtgccgaggagatggcgtctaccagaaggggatggacttcattttggagaagctcaaccatggggactgggtgcatatcttcccagaagggaaagtgaacatgagttccgaattcctgcgtttcaagtggggaatcgggcgcctgattgctgagtgtcatctcaaccccatcatcctgcccctgtggcatgtcggaatgaatgacgtccttcctaacagtccgccctacttcccccgctttggacagaaaatcactgtgctgatcgggaagcccttcagtgccctgcctgtactcgagcggctccgggcggagaacaagtcggctgtggagatgcggaaagccctgacggacttcattcaagaggaattccagcatctgaagactcaggcagagcagctccacaaccacctccagcctgggagataggccttgcttgctgccttctggattcttggcccgcacagagctggggctgagggatggactgatgcttttagctcaaacgtggcttttagacagatttgttcatagaccctctcaagtgccctctccgagctggtaggcattccagctcctccgtgcttcctcagttacacaaaggacctcagctgcttctcccacttggccaagcagggaggaagaagcttaggcagggctctctttccttcttgccttcagatgttctctcccaggggctggcttcaggagggagcatagaaggcaggtgagcaaccagttggctaggggagcagggggcccaccagagctgtggagaggggaccctaagactcctcggcctggctcctacccaccgcccttgccgaaccaggagctgctcactacctcctcagggatggccgttggccacgtcttccttctgcctgagcttcccccccaccacaggccctttcctcaggcaaggtc

SEQ ID NO: 14382 - DNA, 7238 bp, Homo sapiens
ccagatggccgggtggaggggtgcctggggcttccactcctgaacagagagcttaactgtcctagagttcatggggagccacctagccacactggagcccttcagagctcaccctggctgctgggtggagaaaggcctatagatgtcacaggtggatcctgggaggccaggaaggaggacttggagccatccactagcctagactgggctggttgcagtgacagtacagggagaagtatagaagaatgggcattgtccaagtatgttggggaggtaggcagtccaggtgcagtgattagtaagatgtggagggtgggggagagggaggagccagggagaactgaatgatctggcctaagggtctgaaagatgccactttgggctgtagggaaatggtagtgctgctgtccctcattccctgagatggggtgaaggaagggcactccctggggatatgggaagttggggcatgaagcctttcctgtcctctagggatcctgaaactccgccacatctggaacctgaagttgatgcgttggtgaggaggaatgggcccctcgaagtgggccgggccggccccacctgcctctgcccagatttgccctcctcctgctctgcccaggaggtggcgtccagcagtccaggcagggcatggggtggggccccgcaggccctcccctgtgcctcccttctgcatgctgatgctgggggcagggtggtggagcggggtgcagggggcaggactaattgcatctgtccctgcttaggacccctgcagctgcagacatctgcttcaccaaggagctacactcccacttcttcagcttgggcaagtgtgtgcctgtgtgccgaggtgagctgctcctccagcgagtgcagggaggcacttctggggcaggaaagctggtggccagtgtctctgttttggagggacctatgggggtaggcatcccgggagccaacatgaggcccagctccatcacatgccagcagaggggacagaggctgtgggaggagggatgggtccttggaaagtcctcaactctctgcaactgcccagggatcctgtggacctggagccttggcattagaattcaaggaggcattatccataaccccttctctcagggatgtcactaagagactcattgagaacagtgcgttgtcattggtccatggtggcagtagcatgtacctgcaggccagagggttttgcttctaggagaacaaacaggcttgtggggtgagaaccccaggggataggggccattttgatccctattctccagacagggaggatcacagagattaagctgctggcccaaggtcatggggtaggaggtggcaaagccaggatttgaatccagattgctccttcctctgcaggagcagaatttttccaagcagagaatgaggggaaaggtgttctagacacaggcaggcacatgccaggtgctggaaaaagaagagagaaaggtaagccaggcatagcggttcacacttgtcatcccagcactttgtgaggtcgaggtgagaggatcactcaagcccaggagtttgagaccagcctgggcaacatagtaagaccctgtctctttaaaaataaaaatattttaaacaaaagaaaggtagaaaatatgagttgtatgtagaatatgaaggttctagaataatcctattaagaattttggattctggctgggcgcggtggctcacgcctgtaatcccagcactttgggaggctgaggccagcggatcacgaggtcaggagatcgagaccatcctggctaacacggtgaaaccccgtctctactaaaaatacaaaaaattagctgggcatggtagtgggcgcctgtagtcccagctactcgggaggctgaggcaggagaatggcgtgaacccggaaggtggagcttgcagtgagccaagatcacgccactgcactccagcctgggtgacagagtgagactccgtctcaaaaaaaaaaaaaaaagtgccggccacggtggctcatgcctgtaatcccagcactctgggaggccgaggcgggcggatcacgaggtcaggaattcgagaccagcctaaccaacatggtgaaaccccgtctctactaaaaatacaaaaattagccgggcgtggtggtgtgtgcctgtaatctcagctacttgggagactgagacgggagcattgcttgaacccgggaggtggaggttgtggtgagctgagatcctgccattgcactccagcctgggcaataagagcgaaactccgtctggaaaaaaaaaaaaaaaaaaagaattttgaattagctggctgcattggtgcatgcctacagtcccagctcctcaggaggctgaggtgggaggatcacttgagccctcgattttctttttccttgagacaatgtctgtttctgttgtccaggctggagtgccgtggcgtgatgatggctcactgcagcttctgtttcctgggttcaagggatcctgtcacctcagcctcctgagcagctgggactaaggagtgtgcccagctaattcttttttttttttggtagagttggggtcttactacattgccagggctggtcttgaactcctagactcaagcgatcctcccgcctcagcctctcaaagtgctgggatcacaggcatgagccattgtgcccaacccagcccaggaatttgaggccagcctgagcaatatagtgagaccccaggtatagatagataggtagatagataggtaggtaggtaggtagatagatagataggtaggtgggtaggtaggtgggtagataggtaggtaggtacgtaggtagatagatagatagatacatacatacatagatagataagatagatagattgattagatagattagatagccaggtggggtggctcacgcctgtaatcccagtgctttgggaggctgaggtgggtggatcacctgaggtcaggagtttgagaccagcctggctaatgtggcgaaaccctgtctactaaaaatacaaaaattagctggatgtggtggcgcacgcctgtaatctcagctactcgggaggctggggtgggagaatcgcttgaacccaggaggtggaggttgcagtgagctgagatcatgccactgcactccagcctgggccacagagggagacctggtctcaaaaaaaaaaaaaaaaaaaaaaaagatttttgtatttgactgtgctctctcatccaggtggtgacatgcttgtatctgtggttaagaggtagcatctgccaggcgcggtggctcatgcctgtaatcccagtactttgcgaggccgaggcgggtggttcacctgaggtcaggagtttgagaccagcctgaccaacatggcgaaaccccgtctctactaaaaatataaaaattagccgaggctgggcgcggtggctcacgcctgtaatcccagcactttgggaggccgaggcgggtggatcacgaggtcaggagatcgagaccatcctggctaacaggatgaaaccccgtctctactaaaaacacaaaattagctgggcatggtggcaggtgcctgtagtcccagctactcgggaggctgaggcaggagaatggcacaaacccgggaggcggagcttgaggcaggagaatggcgtgaacccgggaggcagagcttgctatgagcagagatcgcgccactgcactccagcctgggtgacagagcgagactccgtctcaaaaaaaaaaaaaagagagagataccattccagttgcaatgtggctgcagcagggctaggtggacatgaggagcccagttcagggctgtcacagtagctccagcagcagatgattgtggctgggcctcccaagtgtcacgttggagaaccggagaaggggacttctttgggatgtactctggacttgttgatagattaagtgtaggtggggtgaggaagagaactcaaagatgacaccaggtgttggagctgagccacggggagaagggtgcaaagggaaagcagtgcgggggctgggaggggagagggtcagtcctgttttgcttgtgctgcatctgaggagcccctcacctgtggaaggagagcagtcccagaggcagtggggtgtgcagttctggaacttagaagaatgatcagggggctgggtgcagtggctcacgcctgtaatcccagcactttgggaggccgaggcgggcggatcaagaggtcaggagattgagaccatcctggctaacatggtgaaaccccgtctctactaaaaatataaaaaattagcagcgcatggtggcaggcacctgtagtcccagctattcaggaggctgaggcaggagagtggcgtgaacccgggagacggagcttgcagtgagctgagattgcgccactgcactccagcctgggcgacagagcgagactccgtctcaaaaaaaaaaaaaacaaaaaattatcaggaataaagatactgggaattcaaccacaaaaaccacaaagtcacgaatgcagagtgagagtcttcagagagagggcagaggcccaggatggcacagagggagagagaagccaccaagatggcagggagccatggccagagagaaaagcaaaccaggcgcctgtggcaccatggaagcagcaggtgatgctggagaagcgtttccatgcagtgacagctgccagagccagattattatggcctgagggctggtggtgctgcagttgggggggaatggagaccgcagcgggggaatggagaccgcaggggcggcaactcctcccagaggttcagtttggaggaaaaagagacagaaggaagggtaaccaaaggatattagaggtcaaggaggggtttattatttctagctggtcaaagtagaatgtggtaaaacccaataaagtaacagcaaataacaaagaggggcttttaatggaaagctgcagtgcctgcccctcacctccctagccccactcctcagaagcagccccctggagcggtttctctttctgctgcttttggaggctacttctgtctctgtaaaggaacttctgtctctgtaaaggaacaagcagaggccacagtgtcttggcaaatgaccgtggcattgtttatcccaacctgctctgagagatggggactctgctgattcacccctcgtccctgcctctttagttccttcagcaaagaactaataatatgtcattaaggcaaaggcagtatttggcacacttggcttctgtgttccaaaaaattccctttttctccaagcgtagattttaatatggtatttaagtatcaaagtgatttgacacaagtgacacaagtgagcagtagtagcatttgcaaaagctacaaatgatgaagtcttgctccaaaagcatattattattattttttaaattccagtttcaagctcaatggataggttgcgtcagtgggttttagtagagaaggggccagtacctatgaagactcccctgtactattacacatgctgcgtcccaagtagggaaactccagtgggtcatcaccccctccctctagcccaagtgggctgctgggtcagggcactgtttgggttgggttgagattcctggatccctaactagcaccttccaaagaatcggccttgcagagaacaaagttcattgccaaaggtattcccaatgtctgtctctcgctctgtgatagggcttctttactccccactttataagatgaggatatctgctataccccattccttcaacctctccacctctttcctcttttgtctgccatgtgattacttttccatcaccaaggttgatgagatccttactgtgtacttactgtctccaagcatccccaggcttccagccagcacgcagcagccaacattggcttcagaaggaaggaggtttgcatttccttctcttgggtccagtgccatggtctcagggttatctccaatgtggaaagttgctagaccaggagcagtttgactccactgtttttcagtctagcaagtttgagtttttcccaagctcttgatgtgtgttcaaatgaatgttctccctttcccaagagacctccctataagggagggtctagtttcccggggtgccctgagaagaaggggtcagcaggggggaggaatggtggaggctgaggcctcaggcaggtgccctgtgaggagtggctgtgacaagcggctgagatcccagcaaagggttgttgcccagaatctggggcctaagcgaggttggaaatcacaaatgcacttggtttctctagcagctggcacatagtaggatcagcccaggagtggcaccttcaaagagaaaggaacgcatgaggctccgagagcggtcggctggcagccagggcctggctggggagggagggcaggtggtgcgctgacctggggatctttgagagtgtgcaggagtatgtggctgaagcggcccagctggtgagccactgaagatgggggtcataggtagatggaggaattgccaggtcagaatctcggtaggagatgacttgagctgatgctgcctggcacataggggtttagaagatattaggaaggaagccccacagcgtgcccaagtgccatgcaggccctggagacggtcattggagggcgtctgtggatggcgcagtgggggatgggaagtccctaatctgctggggctttcccagcaagcagggactgagggggatagtccccaacacatgggccccagggagaagggcctgtttcattgaggtttggagagtgttgagggtaagctaacctgtcaccccacgcccccgagaatggttactgatagggagaggccttttccttgcaggagatggcgtctaccagaaggggatggacttcattttggagaagctcaaccatggggactgggtgcatatcttcccagaaggtcagcagggctgactgggtcgagcccccccagtatgagcgggatgggctcccaagcctcgcctctgtgctctctcaccagggaaagtgaacatgagttccgaattcctgcgtttcaagtggggtaagggctgctggtctctggccacagccatcctcccggcccagagatggccctgtgggcccctggctcccgccccctcgggctggcttgtatgggggtagatgggcgtgtttgtagcgccaggaaggggacaggtgctgagactaggcctgcctctcgcaggggcttgcccaagggagctgaattgaactggaggatgtcggggg

SEQ ID NO: 14383 - DNA, 783 bp, Homo sapiens
ccagatggccgggtggaggggtgcctggggcttccactcctgaacagagagcttaactgtcctagagttcatggggagccacctagccacactggagcccttcagagctcaccctggctgctgggtggagaaaggcctatagatgtcacagggatcctgaaactccgccacatctggaacctgaagttgatgcgttggacccctgcagctgcagacatctgcttcaccaaggagctacactcccacttcttcagcttgggcaagtgtgtgcctgtgtgccgaggagcagaatttttccaagcagagaatgaggggaaaggtgttctagacacaggcaggcacatgccaggtgctggaaaaagaagagagaaaggagatggcgtctaccagaaggggatggacttcattttggagaagctcaaccatggggactgggtgcatatcttcccagaaggtcagcagggctgactgggtcgagcccccccagtatgagcgggatgggctcccaagcctcgcctctgtgctctctcaccagggaaagtgaacatgagttccgaattcctgcgtttcaagtggggtaagggctgctggtctctggccacagccatcctcccggcccagagatggccctgtgggcccctggctcccgccccctcgggctggcttgtatgggggtagatgggcgtgtttgtagcgccaggaaggggacaggtgctgagactaggcctgcctctcgcaggggcttgcccaagggagctgaattgaactggaggatgtcggggg

SEQ ID NO: 14384 - DNA, 2795 bp, Homo sapiens
gccgccgctcacctggaccctggccagcagcgtcgtcatgggcttggtgggcacctacagctgcttctggaccagtgagtgggcccaggccgaggcaggcccgcccgggtacccatgcccggccggaggtgggacttagggtgggggacgccgcggccccgacctagcgggcgagcccggagcgcctgacttctccttccccgccagagtacatgaaccacctgaccgtgcacaacagggaggtgctgtacgagctcatcgagaagcgaggcccggccacgcccctcatcaccgtgtccaatcaccagtcctgcatggacgaccctcatctctggggtacccgggccagtgtgctgggcagggggaggaaaggcgaggattcgggacgggcccagcctcgtcagaacaaaccccttctcgctgccttttcatggagccctggcactccggtttccgggcgttctgccccagggctgagacttggatttgtggctcctgcagcatccctgagggagcatgatttggagagggccttgggcatggagcaggaccaaggaacggccacagggcatatcttacagctcctttaacgtcaggcctccagaaccctctgttctctaaaccatccagggccccacagtcttgggaaaaatttgggggttggacataggatatcctgtgaggaagttctgggccagggactggaagcccagtgtcctggcttcaggtttgcccctggctgggcgtgtaccgttcagccctatttgggagcctggttgccacacctagaggttcctgctctgctgacttcacaggaagttgcttggctctggtaaccagatggccgggtggaggggtgcctggggcttccactcctgaacagagagcttaactgtcctagagttcatggggagccacctagccacactggagcccttcagagctcaccctggctgctgggtggagaaaggcctatagatgtcacaggtggatcctgggaggccaggaaggaggacttggagccatccactagcctagactgggctggttgcagtgacagtacagggagaagtatagaagaatgggcattgtccaagtatgttggggaggtaggcagtccaggtgcagtgattagtaagatgtggagggtgggggagagggaggagccagggagaactgaatgatctggcctaagggtctgaaagatgccactttgggctgtagggaaatggtagtgctgctgtccctcattccctgagatggggtgaaggaagggcactccctggggatatgggaagttggggcatgaagcctttcctgtcctctagggatcctgaaactccgccacatctggaacctgaagttgatgcgttggtgaggaggaatgggcccctcgaagtgggccgggccggccccacctgcctctgcccagatttgccctcctcctgctctgcccaggaggtggcgtccagcagtccaggcagggcatggggtggggccccgcaggccctcccctgtgcctcccttctgcatgctgatgctgggggcagggtggtggagcggggtgcagggggcaggactaattgcatctgtccctgcttaggacccctgcagctgcagacatctgcttcaccaaggagctacactcccacttcttcagcttgggcaagtgtgtgcctgtgtgccgaggtgagctgctcctccagcgagtgcagggaggcacttctggggcaggaaagctggtggccagtgtctctgttttggagggacctatgggggtaggcatcccgggagccaacatgaggcccagctccatcacatgccagcagaggggacagaggctgtgggaggagggatgggtccttggaaagtcctcaactctctgcaactgcccagggatcctgtggacctggagccttggcattagaattcaaggaggcattatccataaccccttctctcagggatgtcactaagagactcattgagaacagtgcgttgtcattggtccatggtggcagtagcatgtacctgcaggccagagggttttgcttctaggagaacaaacaggcttgtggggtgagaaccccaggggataggggccattttgatccctattctccagacagggaggatcacagagattaagctgctggcccaaggtcatggggtaggaggtggcaaagccaggatttgaatccagattgctccttcctctgcaggagcagaatttttccaagcagagaatgaggggaaaggtgttctagacacaggcaggcacatgccaggtgctggaaaaagaagagagaaaggtaagccaggcatagcggttcacacttgtcatcccagcactttgtgaggtcgaggtgagaggatcactcaagcccaggagtttgagaccagcctgggcaacatagtaagaccctgtctctttaaaaataaaaatattttaaacaaaagaaaggtagaaaatatgagttgtatgtagaatatgaaggttctagaataatcctattaagaattttggattctggctgggcgcggtggctcacgcctgtaatcccagcactttgggaggctgaggccagcggatcacgaggtcaggagatcgagaccatcctggctaacacggtgaaaccccgtctctactaaaaatacaaaaaattagctgggcatggtagtgggcgcctgtagtcccagctactcgggaggctgaggcaggagaatggcgtgaacccggaaggtggagcttgcagtgagccaagatcacgccactgcactccagcctgggtgac

SEQ ID NO: 14385 - DNA, 2129 bp, Homo sapiens
gccgccgctcacctggaccctggccagcagcgtcgtcatgggcttggtgggcacctacagctgcttctggaccaagtacatgaaccacctgaccgtgcacaacagggaggtgctgtacgagctcatcgagaagcgaggcccggccacgcccctcatcaccgtgtccaatcaccagtcctgcatggacgaccctcatctctggggtacccgggccagtgtgctgggcagggggaggaaaggcgaggattcgggacgggcccagcctcgtcagaacaaaccccttctcgctgccttttcatggagccctggcactccggtttccgggcgttctgccccagggctgagacttggatttgtggctcctgcagcatccctgagggagcatgatttggagagggccttgggcatggagcaggaccaaggaacggccacagggcatatcttacagctcctttaacgtcaggcctccagaaccctctgttctctaaaccatccagggccccacagtcttgggaaaaatttgggggttggacataggatatcctgtgaggaagttctgggccagggactggaagcccagtgtcctggcttcaggtttgcccctggctgggcgtgtaccgttcagccctatttgggagcctggttgccacacctagaggttcctgctctgctgacttcacaggaagttgcttggctctggtaaccagatggccgggtggaggggtgcctggggcttccactcctgaacagagagcttaactgtcctagagttcatggggagccacctagccacactggagcccttcagagctcaccctggctgctgggtggagaaaggcctatagatgtcacaggtggatcctgggaggccaggaaggaggacttggagccatccactagcctagactgggctggttgcagtgacagtacagggagaagtatagaagaatgggcattgtccaagtatgttggggaggtaggcagtccaggtgcagtgattagtaagatgtggagggtgggggagagggaggagccagggagaactgaatgatctggcctaagggtctgaaagatgccactttgggctgtagggaaatggtagtgctgctgtccctcattccctgagatggggtgaaggaagggcactccctggggatatgggaagttggggcatgaagcctttcctgtcctctagggatcctgaaactccgccacatctggaacctgaagttgatgcgttggtgaggaggaatgggcccctcgaagtgggccgggccggccccacctgcctctgcccagatttgccctcctcctgctctgcccaggaggtggcgtccagcagtccaggcagggcatggggtggggccccgcaggccctcccctgtgcctcccttctgcatgctgatgctgggggcagggtggtggagcggggtgcagggggcaggactaattgcatctgtccctgcttaggacccctgcagctgcagacatctgcttcaccaaggagctacactcccacttcttcagcttgggcaagtgtgtgcctgtgtgccgaggagcagaatttttccaagcagagaatgaggggaaaggtgttctagacacaggcaggcacatgccaggtgctggaaaaagaagagagaaaggtaagccaggcatagcggttcacacttgtcatcccagcactttgtgaggtcgaggtgagaggatcactcaagcccaggagtttgagaccagcctgggcaacatagtaagaccctgtctctttaaaaataaaaatattttaaacaaaagaaaggtagaaaatatgagttgtatgtagaatatgaaggttctagaataatcctattaagaattttggattctggctgggcgcggtggctcacgcctgtaatcccagcactttgggaggctgaggccagcggatcacgaggtcaggagatcgagaccatcctggctaacacggtgaaaccccgtctctactaaaaatacaaaaaattagctgggcatggtagtgggcgcctgtagtcccagctactcgggaggctgaggcaggagaatggcgtgaacccggaaggtggagcttgcagtgagccaagatcacgccactgcactccagcctgggtgac

SEQ ID NO: 14386 - DNA, 847 bp, Homo sapiens
ggccgggtggaggggtgcctggggcttccactcctgaacagagagcttaactgtcctagagttcatggggagccacctagccacactggagcccttcagagctcaccctggctgctgggtggagaaaggcctatagatgtcacaggtggatcctgggaggccaggaaggaggacttggagccatccactagcctagactgggctggttgcagtgacagtacagggagaagtatagaagaatgggcattgtccaagtatgttggggaggtaggcagtccaggtgcagtgattagtaagatgtggagggtgggggagagggaggagccagggagaactgaatgatctggcctaagggtctgaaagatgccactttgggctgtagggaaatggtagtgctgctgtccctcattccctgagatggggtgaaggaagggcactccctggggatatgggaagttggggcatgaagcctttcctgtcctctagggatcctgaaactccgccacatctggaacctgaagttgatgcgttggtgaggaggaatgggcccctcgaagtgggccgggccggccccacctgcctctgcccagatttgccctcctcctgctctgcccaggaggtggcgtccagcagtccaggcagggcatggggtggggccccgcaggccctcccctgtgcctcccttctgcatgctgatgctgggggcagggtggtggagcggggtgcagggggcaggactaattgcatctgtccctgcttaggacccctgcagctgcagacatctgcttcaccaaggagctacactcccacttcttcagcttgggcaagtgtgtgcctgtgtgccgag

SEQ ID NO: 14387 - DNA, 399 bp, Homo sapiens
ggccgggtggaggggtgcctggggcttccactcctgaacagagagcttaactgtcctagagttcatggggagccacctagccacactggagcccttcagagctcaccctggctgctgggtggagaaaggcctatagatgtcacaggtggatcctgggaggccaggaaggaggacttggagccatccactagcctagactgggctggttgcagtgacagtacagggagaagtatagaagaatgggcattgtccaagtatgttggggagggatcctgaaactccgccacatctggaacctgaagttgatgcgttggacccctgcagctgcagacatctgcttcaccaaggagctacactcccacttcttcagcttgggcaagtgtgtgcctgtgtgccgag

SEQ ID NO: 14388 - DNA, 9641 bp, Homo sapiens
agtacatgaaccacctgaccgtgcacaacagggaggtgctgtacgagctcatcgagaagcgaggcccggccacgcccctcatcaccgtgtccaatcaccagtcctgcatggacgaccctcatctctggggtacccgggccagtgtgctgggcagggggaggaaaggcgaggattcgggacgggcccagcctcgtcagaacaaaccccttctcgctgccttttcatggagccctggcactccggtttccgggcgttctgccccagggctgagacttggatttgtggctcctgcagcatccctgagggagcatgatttggagagggccttgggcatggagcaggaccaaggaacggccacagggcatatcttacagctcctttaacgtcaggcctccagaaccctctgttctctaaaccatccagggccccacagtcttgggaaaaatttgggggttggacataggatatcctgtgaggaagttctgggccagggactggaagcccagtgtcctggcttcaggtttgcccctggctgggcgtgtaccgttcagccctatttgggagcctggttgccacacctagaggttcctgctctgctgacttcacaggaagttgcttggctctggtaaccagatggccgggtggaggggtgcctggggcttccactcctgaacagagagcttaactgtcctagagttcatggggagccacctagccacactggagcccttcagagctcaccctggctgctgggtggagaaaggcctatagatgtcacaggtggatcctgggaggccaggaaggaggacttggagccatccactagcctagactgggctggttgcagtgacagtacagggagaagtatagaagaatgggcattgtccaagtatgttggggaggtaggcagtccaggtgcagtgattagtaagatgtggagggtgggggagagggaggagccagggagaactgaatgatctggcctaagggtctgaaagatgccactttgggctgtagggaaatggtagtgctgctgtccctcattccctgagatggggtgaaggaagggcactccctggggatatgggaagttggggcatgaagcctttcctgtcctctagggatcctgaaactccgccacatctggaacctgaagttgatgcgttggtgaggaggaatgggcccctcgaagtgggccgggccggccccacctgcctctgcccagatttgccctcctcctgctctgcccaggaggtggcgtccagcagtccaggcagggcatggggtggggccccgcaggccctcccctgtgcctcccttctgcatgctgatgctgggggcagggtggtggagcggggtgcagggggcaggactaattgcatctgtccctgcttaggacccctgcagctgcagacatctgcttcaccaaggagctacactcccacttcttcagcttgggcaagtgtgtgcctgtgtgccgaggtgagctgctcctccagcgagtgcagggaggcacttctggggcaggaaagctggtggccagtgtctctgttttggagggacctatgggggtaggcatcccgggagccaacatgaggcccagctccatcacatgccagcagaggggacagaggctgtgggaggagggatgggtccttggaaagtcctcaactctctgcaactgcccagggatcctgtggacctggagccttggcattagaattcaaggaggcattatccataaccccttctctcagggatgtcactaagagactcattgagaacagtgcgttgtcattggtccatggtggcagtagcatgtacctgcaggccagagggttttgcttctaggagaacaaacaggcttgtggggtgagaaccccaggggataggggccattttgatccctattctccagacagggaggatcacagagattaagctgctggcccaaggtcatggggtaggaggtggcaaagccaggatttgaatccagattgctccttcctctgcaggagcagaatttttccaagcagagaatgaggggaaaggtgttctagacacaggcaggcacatgccaggtgctggaaaaagaagagagaaaggtaagccaggcatagcggttcacacttgtcatcccagcactttgtgaggtcgaggtgagaggatcactcaagcccaggagtttgagaccagcctgggcaacatagtaagaccctgtctctttaaaaataaaaatattttaaacaaaagaaaggtagaaaatatgagttgtatgtagaatatgaaggttctagaataatcctattaagaattttggattctggctgggcgcggtggctcacgcctgtaatcccagcactttgggaggctgaggccagcggatcacgaggtcaggagatcgagaccatcctggctaacacggtgaaaccccgtctctactaaaaatacaaaaaattagctgggcatggtagtgggcgcctgtagtcccagctactcgggaggctgaggcaggagaatggcgtgaacccggaaggtggagcttgcagtgagccaagatcacgccactgcactccagcctgggtgacagagtgagactccgtctcaaaaaaaaaaaaaaaagtgccggccacggtggctcatgcctgtaatcccagcactctgggaggccgaggcgggcggatcacgaggtcaggaattcgagaccagcctaaccaacatggtgaaaccccgtctctactaaaaatacaaaaattagccgggcgtggtggtgtgtgcctgtaatctcagctacttgggagactgagacgggagcattgcttgaacccgggaggtggaggttgtggtgagctgagatcctgccattgcactccagcctgggcaataagagcgaaactccgtctggaaaaaaaaaaaaaaaaaaagaattttgaattagctggctgcattggtgcatgcctacagtcccagctcctcaggaggctgaggtgggaggatcacttgagccctcgattttctttttccttgagacaatgtctgtttctgttgtccaggctggagtgccgtggcgtgatgatggctcactgcagcttctgtttcctgggttcaagggatcctgtcacctcagcctcctgagcagctgggactaaggagtgtgcccagctaattcttttttttttttggtagagttggggtcttactacattgccagggctggtcttgaactcctagactcaagcgatcctcccgcctcagcctctcaaagtgctgggatcacaggcatgagccattgtgcccaacccagcccaggaatttgaggccagcctgagcaatatagtgagaccccaggtatagatagataggtagatagataggtaggtaggtaggtagatagatagataggtaggtgggtaggtaggtgggtagataggtaggtaggtacgtaggtagatagatagatagatacatacatacatagatagataagatagatagattgattagatagattagatagccaggtggggtggctcacgcctgtaatcccagtgctttgggaggctgaggtgggtggatcacctgaggtcaggagtttgagaccagcctggctaatgtggcgaaaccctgtctactaaaaatacaaaaattagctggatgtggtggcgcacgcctgtaatctcagctactcgggaggctggggtgggagaatcgcttgaacccaggaggtggaggttgcagtgagctgagatcatgccactgcactccagcctgggccacagagggagacctggtctcaaaaaaaaaaaaaaaaaaaaaaaagatttttgtatttgactgtgctctctcatccaggtggtgacatgcttgtatctgtggttaagaggtagcatctgccaggcgcggtggctcatgcctgtaatcccagtactttgcgaggccgaggcgggtggttcacctgaggtcaggagtttgagaccagcctgaccaacatggcgaaaccccgtctctactaaaaatataaaaattagccgaggctgggcgcggtggctcacgcctgtaatcccagcactttgggaggccgaggcgggtggatcacgaggtcaggagatcgagaccatcctggctaacaggatgaaaccccgtctctactaaaaacacaaaattagctgggcatggtggcaggtgcctgtagtcccagctactcgggaggctgaggcaggagaatggcacaaacccgggaggcggagcttgaggcaggagaatggcgtgaacccgggaggcagagcttgctatgagcagagatcgcgccactgcactccagcctgggtgacagagcgagactccgtctcaaaaaaaaaaaaaagagagagataccattccagttgcaatgtggctgcagcagggctaggtggacatgaggagcccagttcagggctgtcacagtagctccagcagcagatgattgtggctgggcctcccaagtgtcacgttggagaaccggagaaggggacttctttgggatgtactctggacttgttgatagattaagtgtaggtggggtgaggaagagaactcaaagatgacaccaggtgttggagctgagccacggggagaagggtgcaaagggaaagcagtgcgggggctgggaggggagagggtcagtcctgttttgcttgtgctgcatctgaggagcccctcacctgtggaaggagagcagtcccagaggcagtggggtgtgcagttctggaacttagaagaatgatcagggggctgggtgcagtggctcacgcctgtaatcccagcactttgggaggccgaggcgggcggatcaagaggtcaggagattgagaccatcctggctaacatggtgaaaccccgtctctactaaaaatataaaaaattagcagcgcatggtggcaggcacctgtagtcccagctattcaggaggctgaggcaggagagtggcgtgaacccgggagacggagcttgcagtgagctgagattgcgccactgcactccagcctgggcgacagagcgagactccgtctcaaaaaaaaaaaaaacaaaaaattatcaggaataaagatactgggaattcaaccacaaaaaccacaaagtcacgaatgcagagtgagagtcttcagagagagggcagaggcccaggatggcacagagggagagagaagccaccaagatggcagggagccatggccagagagaaaagcaaaccaggcgcctgtggcaccatggaagcagcaggtgatgctggagaagcgtttccatgcagtgacagctgccagagccagattattatggcctgagggctggtggtgctgcagttgggggggaatggagaccgcagcgggggaatggagaccgcaggggcggcaactcctcccagaggttcagtttggaggaaaaagagacagaaggaagggtaaccaaaggatattagaggtcaaggaggggtttattatttctagctggtcaaagtagaatgtggtaaaacccaataaagtaacagcaaataacaaagaggggcttttaatggaaagctgcagtgcctgcccctcacctccctagccccactcctcagaagcagccccctggagcggtttctctttctgctgcttttggaggctacttctgtctctgtaaaggaacttctgtctctgtaaaggaacaagcagaggccacagtgtcttggcaaatgaccgtggcattgtttatcccaacctgctctgagagatggggactctgctgattcacccctcgtccctgcctctttagttccttcagcaaagaactaataatatgtcattaaggcaaaggcagtatttggcacacttggcttctgtgttccaaaaaattccctttttctccaagcgtagattttaatatggtatttaagtatcaaagtgatttgacacaagtgacacaagtgagcagtagtagcatttgcaaaagctacaaatgatgaagtcttgctccaaaagcatattattattattttttaaattccagtttcaagctcaatggataggttgcgtcagtgggttttagtagagaaggggccagtacctatgaagactcccctgtactattacacatgctgcgtcccaagtagggaaactccagtgggtcatcaccccctccctctagcccaagtgggctgctgggtcagggcactgtttgggttgggttgagattcctggatccctaactagcaccttccaaagaatcggccttgcagagaacaaagttcattgccaaaggtattcccaatgtctgtctctcgctctgtgatagggcttctttactccccactttataagatgaggatatctgctataccccattccttcaacctctccacctctttcctcttttgtctgccatgtgattacttttccatcaccaaggttgatgagatccttactgtgtacttactgtctccaagcatccccaggcttccagccagcacgcagcagccaacattggcttcagaaggaaggaggtttgcatttccttctcttgggtccagtgccatggtctcagggttatctccaatgtggaaagttgctagaccaggagcagtttgactccactgtttttcagtctagcaagtttgagtttttcccaagctcttgatgtgtgttcaaatgaatgttctccctttcccaagagacctccctataagggagggtctagtttcccggggtgccctgagaagaaggggtcagcaggggggaggaatggtggaggctgaggcctcaggcaggtgccctgtgaggagtggctgtgacaagcggctgagatcccagcaaagggttgttgcccagaatctggggcctaagcgaggttggaaatcacaaatgcacttggtttctctagcagctggcacatagtaggatcagcccaggagtggcaccttcaaagagaaaggaacgcatgaggctccgagagcggtcggctggcagccagggcctggctggggagggagggcaggtggtgcgctgacctggggatctttgagagtgtgcaggagtatgtggctgaagcggcccagctggtgagccactgaagatgggggtcataggtagatggaggaattgccaggtcagaatctcggtaggagatgacttgagctgatgctgcctggcacataggggtttagaagatattaggaaggaagccccacagcgtgcccaagtgccatgcaggccctggagacggtcattggagggcgtctgtggatggcgcagtgggggatgggaagtccctaatctgctggggctttcccagcaagcagggactgagggggatagtccccaacacatgggccccagggagaagggcctgtttcattgaggtttggagagtgttgagggtaagctaacctgtcaccccacgcccccgagaatggttactgatagggagaggccttttccttgcaggagatggcgtctaccagaaggggatggacttcattttggagaagctcaaccatggggactgggtgcatatcttcccagaaggtcagcagggctgactgggtcgagcccccccagtatgagcgggatgggctcccaagcctcgcctctgtgctctctcaccagggaaagtgaacatgagttccgaattcctgcgtttcaagtggggtaagggctgctggtctctggccacagccatcctcccggcccagagatggccctgtgggcccctggctcccgccccctcgggctggcttgtatgggggtagatgggcgtgtttgtagcgccaggaaggggacaggtgctgagactaggcctgcctctcgcaggggcttgcccaagggagctgaattgaactggaggatgtcgggggtggcagtggccagaggctggcacagaagcttggctcagggcccagcttatgctaacatttctacctcccccctgggcaggaatcgggcgcctgattgctgagtgtcatctcaaccccatcatcctgcccctgtggcatgtcggtgagcctggggacggggacagagagatggcatctggggtggggggcctgggactccctctggtcccaggctgccctgctccaccccacgtctggccttctgtccactgtgctgcaggaatgaatgacgtccttcctaacagtccgccctacttcccccgctttggacaggtgggtggggactgctgaccttcggctgtctgcctgtctgctgtctgctccgtgtctcccactcagcactatggaggccagctgcaggaggagctgagcatgaggctacagcaggggacagagtggaacatagacagggacttcctggcaccgagacattaaaatgagagcagaggaagtcaggctggggcagaggtgggctgtggggtcaggacaggacaggtcatctacagcacaggacccaggaccaggaccttgttttagaggaagagtggcccctggggagtgtgtggcacagcagggccggggcttagcttctggctcccgggttgcttgggctggggctgtgggcactcctactgctcctcatcactcttggcggccaccccacagaaaatcactgtgctgatcgggaagcccttcagtgccctgcctgtactcgagcggctccgggcggagaacaagtcggctgtgagtttcctcctgggtcccccgtagctgtccccggaccccctgctgctggcttccagcagggtgcctccaccctctccatcccgtcaccctcccagggcaccctcccagggcaccttggccaagcttcccgaggggtgcaggccatccctggtcctttccctcaggtggagatgcggaaagccctgacggacttcattcaagaggaattccagcatctgaagactcaggcagagcagctccacaaccacctccagcctgggagataggccttgcttgctgccttctggattcttggcccgcacagagctggggctgagggatggactgatgcttttagctcaaacgtggcttttagacagatttgttcatagaccctctcaagtgccctctccgagctggtaggcattccagctcctccgtgcttcctcagttacacaaaggacctcagctgcttctcccacttggccaagcagggaggaagaagcttaggcagggctctctttccttcttgccttcagatgttctctcccaggggctggcttcaggagggagcatagaaggcaggtgagcaaccagttggctaggggagcagggggcccaccagagctgtggagaggggaccctaagactcctcggcctggctcctacccaccgcccttgccgaaccaggagctgctcactacctcctcagggatggccgttggccacgtcttccttctgcctgagcttcccccccaccacaggccctttcctcaggcaaggtctggcctcaggtgggccgcaggcgggaaaagcagcccttggccagaagtcaagcccagccacgtggagcctagagtgagggcctgaggtctggctgcttgcccccatgctggcgccaacaacttctccatcctttctgcctctcaacatcacttgaatcctagggcctgggttttcatgtttttgaaacagaaccataaagcatatgtgttggcttgttgtaaaa

SEQ ID NO: 14389 - DNA, 1483 bp, Homo sapiens
agtacatgaaccacctgaccgtgcacaacagggaggtgctgtacgagctcatcgagaagcgaggcccggccacgcccctcatcaccgtgtccaatcaccagtcctgcatggacgaccctcatctctgggggatcctgaaactccgccacatctggaacctgaagttgatgcgttggacccctgcagctgcagacatctgcttcaccaaggagctacactcccacttcttcagcttgggcaagtgtgtgcctgtgtgccgaggagatggcgtctaccagaaggggatggacttcattttggagaagctcaaccatggggactgggtgcatatcttcccagaaggtcagcagggctgactgggtcgagcccccccagtatgagcgggatgggctcccaagcctcgcctctgtgctctctcaccagggaaagtgaacatgagttccgaattcctgcgtttcaagtggggaatcgggcgcctgattgctgagtgtcatctcaaccccatcatcctgcccctgtggcatgtcggaatgaatgacgtccttcctaacagtccgccctacttcccccgctttggacagaaaatcactgtgctgatcgggaagcccttcagtgccctgcctgtactcgagcggctccgggcggagaacaagtcggctgtggagatgcggaaagccctgacggacttcattcaagaggaattccagcatctgaagactcaggcagagcagctccacaaccacctccagcctgggagataggccttgcttgctgccttctggattcttggcccgcacagagctggggctgagggatggactgatgcttttagctcaaacgtggcttttagacagatttgttcatagaccctctcaagtgccctctccgagctggtaggcattccagctcctccgtgcttcctcagttacacaaaggacctcagctgcttctcccacttggccaagcagggaggaagaagcttaggcagggctctctttccttcttgccttcagatgttctctcccaggggctggcttcaggagggagcatagaaggcaggtgagcaaccagttggctaggggagcagggggcccaccagagctgtggagaggggaccctaagactcctcggcctggctcctacccaccgcccttgccgaaccaggagctgctcactacctcctcagggatggccgttggccacgtcttccttctgcctgagcttcccccccaccacaggccctttcctcaggcaaggtctggcctcaggtgggccgcaggcgggaaaagcagcccttggccagaagtcaagcccagccacgtggagcctagagtgagggcctgaggtctggctgcttgcccccatgctggcgccaacaacttctccatcctttctgcctctcaacatcacttgaatcctagggcctgggttttcatgtttttgaaacagaaccataaagcatatgtgttggcttgttgtaaaa

SEQ ID NO: 14390 - DNA, 7584 bp, Homo sapiens
ctcatctctggggtacccgggccagtgtgctgggcagggggaggaaaggcgaggattcgggacgggcccagcctcgtcagaacaaaccccttctcgctgccttttcatggagccctggcactccggtttccgggcgttctgccccagggctgagacttggatttgtggctcctgcagcatccctgagggagcatgatttggagagggccttgggcatggagcaggaccaaggaacggccacagggcatatcttacagctcctttaacgtcaggcctccagaaccctctgttctctaaaccatccagggccccacagtcttgggaaaaatttgggggttggacataggatatcctgtgaggaagttctgggccagggactggaagcccagtgtcctggcttcaggtttgcccctggctgggcgtgtaccgttcagccctatttgggagcctggttgccacacctagaggttcctgctctgctgacttcacaggaagttgcttggctctggtaaccagatggccgggtggaggggtgcctggggcttccactcctgaacagagagcttaactgtcctagagttcatggggagccacctagccacactggagcccttcagagctcaccctggctgctgggtggagaaaggcctatagatgtcacaggtggatcctgggaggccaggaaggaggacttggagccatccactagcctagactgggctggttgcagtgacagtacagggagaagtatagaagaatgggcattgtccaagtatgttggggaggtaggcagtccaggtgcagtgattagtaagatgtggagggtgggggagagggaggagccagggagaactgaatgatctggcctaagggtctgaaagatgccactttgggctgtagggaaatggtagtgctgctgtccctcattccctgagatggggtgaaggaagggcactccctggggatatgggaagttggggcatgaagcctttcctgtcctctagggatcctgaaactccgccacatctggaacctgaagttgatgcgttggtgaggaggaatgggcccctcgaagtgggccgggccggccccacctgcctctgcccagatttgccctcctcctgctctgcccaggaggtggcgtccagcagtccaggcagggcatggggtggggccccgcaggccctcccctgtgcctcccttctgcatgctgatgctgggggcagggtggtggagcggggtgcagggggcaggactaattgcatctgtccctgcttaggacccctgcagctgcagacatctgcttcaccaaggagctacactcccacttcttcagcttgggcaagtgtgtgcctgtgtgccgaggtgagctgctcctccagcgagtgcagggaggcacttctggggcaggaaagctggtggccagtgtctctgttttggagggacctatgggggtaggcatcccgggagccaacatgaggcccagctccatcacatgccagcagaggggacagaggctgtgggaggagggatgggtccttggaaagtcctcaactctctgcaactgcccagggatcctgtggacctggagccttggcattagaattcaaggaggcattatccataaccccttctctcagggatgtcactaagagactcattgagaacagtgcgttgtcattggtccatggtggcagtagcatgtacctgcaggccagagggttttgcttctaggagaacaaacaggcttgtggggtgagaaccccaggggataggggccattttgatccctattctccagacagggaggatcacagagattaagctgctggcccaaggtcatggggtaggaggtggcaaagccaggatttgaatccagattgctccttcctctgcaggagcagaatttttccaagcagagaatgaggggaaaggtgttctagacacaggcaggcacatgccaggtgctggaaaaagaagagagaaaggtaagccaggcatagcggttcacacttgtcatcccagcactttgtgaggtcgaggtgagaggatcactcaagcccaggagtttgagaccagcctgggcaacatagtaagaccctgtctctttaaaaataaaaatattttaaacaaaagaaaggtagaaaatatgagttgtatgtagaatatgaaggttctagaataatcctattaagaattttggattctggctgggcgcggtggctcacgcctgtaatcccagcactttgggaggctgaggccagcggatcacgaggtcaggagatcgagaccatcctggctaacacggtgaaaccccgtctctactaaaaatacaaaaaattagctgggcatggtagtgggcgcctgtagtcccagctactcgggaggctgaggcaggagaatggcgtgaacccggaaggtggagcttgcagtgagccaagatcacgccactgcactccagcctgggtgacagagtgagactccgtctcaaaaaaaaaaaaaaaagtgccggccacggtggctcatgcctgtaatcccagcactctgggaggccgaggcgggcggatcacgaggtcaggaattcgagaccagcctaaccaacatggtgaaaccccgtctctactaaaaatacaaaaattagccgggcgtggtggtgtgtgcctgtaatctcagctacttgggagactgagacgggagcattgcttgaacccgggaggtggaggttgtggtgagctgagatcctgccattgcactccagcctgggcaataagagcgaaactccgtctggaaaaaaaaaaaaaaaaaaagaattttgaattagctggctgcattggtgcatgcctacagtcccagctcctcaggaggctgaggtgggaggatcacttgagccctcgattttctttttccttgagacaatgtctgtttctgttgtccaggctggagtgccgtggcgtgatgatggctcactgcagcttctgtttcctgggttcaagggatcctgtcacctcagcctcctgagcagctgggactaaggagtgtgcccagctaattcttttttttttttggtagagttggggtcttactacattgccagggctggtcttgaactcctagactcaagcgatcctcccgcctcagcctctcaaagtgctgggatcacaggcatgagccattgtgcccaacccagcccaggaatttgaggccagcctgagcaatatagtgagaccccaggtatagatagataggtagatagataggtaggtaggtaggtagatagatagataggtaggtgggtaggtaggtgggtagataggtaggtaggtacgtaggtagatagatagatagatacatacatacatagatagataagatagatagattgattagatagattagatagccaggtggggtggctcacgcctgtaatcccagtgctttgggaggctgaggtgggtggatcacctgaggtcaggagtttgagaccagcctggctaatgtggcgaaaccctgtctactaaaaatacaaaaattagctggatgtggtggcgcacgcctgtaatctcagctactcgggaggctggggtgggagaatcgcttgaacccaggaggtggaggttgcagtgagctgagatcatgccactgcactccagcctgggccacagagggagacctggtctcaaaaaaaaaaaaaaaaaaaaaaaagatttttgtatttgactgtgctctctcatccaggtggtgacatgcttgtatctgtggttaagaggtagcatctgccaggcgcggtggctcatgcctgtaatcccagtactttgcgaggccgaggcgggtggttcacctgaggtcaggagtttgagaccagcctgaccaacatggcgaaaccccgtctctactaaaaatataaaaattagccgaggctgggcgcggtggctcacgcctgtaatcccagcactttgggaggccgaggcgggtggatcacgaggtcaggagatcgagaccatcctggctaacaggatgaaaccccgtctctactaaaaacacaaaattagctgggcatggtggcaggtgcctgtagtcccagctactcgggaggctgaggcaggagaatggcacaaacccgggaggcggagcttgaggcaggagaatggcgtgaacccgggaggcagagcttgctatgagcagagatcgcgccactgcactccagcctgggtgacagagcgagactccgtctcaaaaaaaaaaaaaagagagagataccattccagttgcaatgtggctgcagcagggctaggtggacatgaggagcccagttcagggctgtcacagtagctccagcagcagatgattgtggctgggcctcccaagtgtcacgttggagaaccggagaaggggacttctttgggatgtactctggacttgttgatagattaagtgtaggtggggtgaggaagagaactcaaagatgacaccaggtgttggagctgagccacggggagaagggtgcaaagggaaagcagtgcgggggctgggaggggagagggtcagtcctgttttgcttgtgctgcatctgaggagcccctcacctgtggaaggagagcagtcccagaggcagtggggtgtgcagttctggaacttagaagaatgatcagggggctgggtgcagtggctcacgcctgtaatcccagcactttgggaggccgaggcgggcggatcaagaggtcaggagattgagaccatcctggctaacatggtgaaaccccgtctctactaaaaatataaaaaattagcagcgcatggtggcaggcacctgtagtcccagctattcaggaggctgaggcaggagagtggcgtgaacccgggagacggagcttgcagtgagctgagattgcgccactgcactccagcctgggcgacagagcgagactccgtctcaaaaaaaaaaaaaacaaaaaattatcaggaataaagatactgggaattcaaccacaaaaaccacaaagtcacgaatgcagagtgagagtcttcagagagagggcagaggcccaggatggcacagagggagagagaagccaccaagatggcagggagccatggccagagagaaaagcaaaccaggcgcctgtggcaccatggaagcagcaggtgatgctggagaagcgtttccatgcagtgacagctgccagagccagattattatggcctgagggctggtggtgctgcagttgggggggaatggagaccgcagcgggggaatggagaccgcaggggcggcaactcctcccagaggttcagtttggaggaaaaagagacagaaggaagggtaaccaaaggatattagaggtcaaggaggggtttattatttctagctggtcaaagtagaatgtggtaaaacccaataaagtaacagcaaataacaaagaggggcttttaatggaaagctgcagtgcctgcccctcacctccctagccccactcctcagaagcagccccctggagcggtttctctttctgctgcttttggaggctacttctgtctctgtaaaggaacttctgtctctgtaaaggaacaagcagaggccacagtgtcttggcaaatgaccgtggcattgtttatcccaacctgctctgagagatggggactctgctgattcacccctcgtccctgcctctttagttccttcagcaaagaactaataatatgtcattaaggcaaaggcagtatttggcacacttggcttctgtgttccaaaaaattccctttttctccaagcgtagattttaatatggtatttaagtatcaaagtgatttgacacaagtgacacaagtgagcagtagtagcatttgcaaaagctacaaatgatgaagtcttgctccaaaagcatattattattattttttaaattccagtttcaagctcaatggataggttgcgtcagtgggttttagtagagaaggggccagtacctatgaagactcccctgtactattacacatgctgcgtcccaagtagggaaactccagtgggtcatcaccccctccctctagcccaagtgggctgctgggtcagggcactgtttgggttgggttgagattcctggatccctaactagcaccttccaaagaatcggccttgcagagaacaaagttcattgccaaaggtattcccaatgtctgtctctcgctctgtgatagggcttctttactccccactttataagatgaggatatctgctataccccattccttcaacctctccacctctttcctcttttgtctgccatgtgattacttttccatcaccaaggttgatgagatccttactgtgtacttactgtctccaagcatccccaggcttccagccagcacgcagcagccaacattggcttcagaaggaaggaggtttgcatttccttctcttgggtccagtgccatggtctcagggttatctccaatgtggaaagttgctagaccaggagcagtttgactccactgtttttcagtctagcaagtttgagtttttcccaagctcttgatgtgtgttcaaatgaatgttctccctttcccaagagacctccctataagggagggtctagtttcccggggtgccctgagaagaaggggtcagcaggggggaggaatggtggaggctgaggcctcaggcaggtgccctgtgaggagtggctgtgacaagcggctgagatcccagcaaagggttgttgcccagaatctggggcctaagcgaggttggaaatcacaaatgcacttggtttctctagcagctggcacatagtaggatcagcccaggagtggcaccttcaaagagaaaggaacgcatgaggctccgagagcggtcggctggcagccagggcctggctggggagggagggcaggtggtgcgctgacctggggatctttgagagtgtgcaggagtatgtggctgaagcggcccagctggtgagccactgaagatgggggtcataggtagatggaggaattgccaggtcagaatctcggtaggagatgacttgagctgatgctgcctggcacataggggtttagaagatattaggaaggaagccccacagcgtgcccaagtgccatgcaggccctggagacggtcattggagggcgtctgtggatggcgcagtgggggatgggaagtccctaatctgctggggctttcccagcaagcagggactgagggggatagtccccaacacatgggccccagggagaagggcctgtttcattgaggtttggagagtgttgagggtaagctaacctgtcaccccacgcccccgagaatggttactgatagggagaggccttttccttgcaggagatggcgtctaccagaaggggatggacttcattttggagaagctcaaccatggggactgggtgcatatcttcccagaaggtcagcagggctgactgggtcgagcccccccagtatgagcgggatgggctcccaagcctcgcctctgtgctctctcaccagggaaagtgaacatgagttccgaattcctgcgtttcaagtggggtaagggctgctggtctctggccacagccatcctcccggc

SEQ ID NO: 14391 - DNA, 388 bp, Homo sapiens
ctcatctctgggggatcctgaaactccgccacatctggaacctgaagttgatgcgttggacccctgcagctgcagacatctgcttcaccaaggagctacactcccacttcttcagcttgggcaagtgtgtgcctgtgtgccgaggagatggcgtctaccagaaggggatggacttcattttggagaagctcaaccatggggactgggtgcatatcttcccagaaggtcagcagggctgactgggtcgagcccccccagtatgagcgggatgggctcccaagcctcgcctctgtgctctctcaccagggaaagtgaacatgagttccgaattcctgcgtttcaagtggggtaagggctgctggtctctggccacagccatcctcccggc

SEQ ID NO: 14392 - DNA, 3248 bp, Homo sapiens
tgtctgccatgtgattacttttccatcaccaaggttgatgagatccttactgtgtacttactgtctccaagcatccccaggcttccagccagcacgcagcagccaacattggcttcagaaggaaggaggtttgcatttccttctcttgggtccagtgccatggtctcagggttatctccaatgtggaaagttgctagaccaggagcagtttgactccactgtttttcagtctagcaagtttgagtttttcccaagctcttgatgtgtgttcaaatgaatgttctccctttcccaagagacctccctataagggagggtctagtttcccggggtgccctgagaagaaggggtcagcaggggggaggaatggtggaggctgaggcctcaggcaggtgccctgtgaggagtggctgtgacaagcggctgagatcccagcaaagggttgttgcccagaatctggggcctaagcgaggttggaaatcacaaatgcacttggtttctctagcagctggcacatagtaggatcagcccaggagtggcaccttcaaagagaaaggaacgcatgaggctccgagagcggtcggctggcagccagggcctggctggggagggagggcaggtggtgcgctgacctggggatctttgagagtgtgcaggagtatgtggctgaagcggcccagctggtgagccactgaagatgggggtcataggtagatggaggaattgccaggtcagaatctcggtaggagatgacttgagctgatgctgcctggcacataggggtttagaagatattaggaaggaagccccacagcgtgcccaagtgccatgcaggccctggagacggtcattggagggcgtctgtggatggcgcagtgggggatgggaagtccctaatctgctggggctttcccagcaagcagggactgagggggatagtccccaacacatgggccccagggagaagggcctgtttcattgaggtttggagagtgttgagggtaagctaacctgtcaccccacgcccccgagaatggttactgatagggagaggccttttccttgcaggagatggcgtctaccagaaggggatggacttcattttggagaagctcaaccatggggactgggtgcatatcttcccagaaggtcagcagggctgactgggtcgagcccccccagtatgagcgggatgggctcccaagcctcgcctctgtgctctctcaccagggaaagtgaacatgagttccgaattcctgcgtttcaagtggggtaagggctgctggtctctggccacagccatcctcccggcccagagatggccctgtgggcccctggctcccgccccctcgggctggcttgtatgggggtagatgggcgtgtttgtagcgccaggaaggggacaggtgctgagactaggcctgcctctcgcaggggcttgcccaagggagctgaattgaactggaggatgtcgggggtggcagtggccagaggctggcacagaagcttggctcagggcccagcttatgctaacatttctacctcccccctgggcaggaatcgggcgcctgattgctgagtgtcatctcaaccccatcatcctgcccctgtggcatgtcggtgagcctggggacggggacagagagatggcatctggggtggggggcctgggactccctctggtcccaggctgccctgctccaccccacgtctggccttctgtccactgtgctgcaggaatgaatgacgtccttcctaacagtccgccctacttcccccgctttggacaggtgggtggggactgctgaccttcggctgtctgcctgtctgctgtctgctccgtgtctcccactcagcactatggaggccagctgcaggaggagctgagcatgaggctacagcaggggacagagtggaacatagacagggacttcctggcaccgagacattaaaatgagagcagaggaagtcaggctggggcagaggtgggctgtggggtcaggacaggacaggtcatctacagcacaggacccaggaccaggaccttgttttagaggaagagtggcccctggggagtgtgtggcacagcagggccggggcttagcttctggctcccgggttgcttgggctggggctgtgggcactcctactgctcctcatcactcttggcggccaccccacagaaaatcactgtgctgatcgggaagcccttcagtgccctgcctgtactcgagcggctccgggcggagaacaagtcggctgtgagtttcctcctgggtcccccgtagctgtccccggaccccctgctgctggcttccagcagggtgcctccaccctctccatcccgtcaccctcccagggcaccctcccagggcaccttggccaagcttcccgaggggtgcaggccatccctggtcctttccctcaggtggagatgcggaaagccctgacggacttcattcaagaggaattccagcatctgaagactcaggcagagcagctccacaaccacctccagcctgggagataggccttgcttgctgccttctggattcttggcccgcacagagctggggctgagggatggactgatgcttttagctcaaacgtggcttttagacagatttgttcatagaccctctcaagtgccctctccgagctggtaggcattccagctcctccgtgcttcctcagttacacaaaggacctcagctgcttctcccacttggccaagcagggaggaagaagcttaggcagggctctctttccttcttgccttcagatgttctctcccaggggctggcttcaggagggagcatagaaggcaggtgagcaaccagttggctaggggagcagggggcccaccagagctgtggagaggggaccctaagactcctcggcctggctcctacccaccgcccttgccgaaccaggagctgctcactacctcctcagggatggccgttggccacgtcttccttctgcctgagcttcccccccaccacaggccctttcctcaggcaaggtctggcctcaggtgggccgcaggcgggaaaagcagcccttggccagaagtcaagcccagccacgtggagcctagagtgagggcctgaggtctggctgcttgcccccatgctggcgccaacaacttctccatcctttctgcctctcaacatcacttgaatcctagggcctgggttttcatgtttttgaaacagaaccataaagcatatgtgttggcttgttgt

SEQ ID NO: 14393 - DNA, 2286 bp, Homo sapiens
tgtctgccatgtgattacttttccatcaccaaggttgatgagatccttactgtgtacttactgtctccaagcatccccaggcttccagccagcacgcagcagccaacattggcttcagaaggaaggaggtttgcatttccttctcttgggtccagtgccatggtctcagggttatctccaatgtggaaagttgctagaccaggagcagtttgactccactgtttttcagtctagcaagtttgagtttttcccaagctcttgatgtgtgttcaaatgaatgttctccctttcccaagagacctccctataagggagggtctagtttcccggggtgccctgagaagaaggggtcagcaggggggaggaatggtggaggctgaggcctcaggcaggtgccctgtgaggagtggctgtgacaagcggctgagatcccagcaaagggttgttgcccagaatctggggcctaagcgaggttggaaatcacaaatgcacttggtttctctagcagctggcacatagtaggatcagcccaggagtggcaccttcaaagagaaaggaacgcatgaggctccgagagcggtcggctggcagccagggcctggctggggagggagggcaggtggtgcgctgacctggggatctttgagagtgtgcaggagtatgtggctgaagcggcccagctggtgagccactgaagatgggggtcataggtagatggaggaattgccaggtcagaatctcggtaggagatgacttgagctgatgctgcctggcacataggggtttagaagatattaggaaggaagccccacagcgtgcccaagtgccatgcaggccctggagacggtcattggagggcgtctgtggatggcgcagtgggggatgggaagtccctaatctgctggggctttcccagcaagcagggactgagggggatagtccccaacacatgggccccagggagaagggcctgtttcattgaggtttggagagtgttgagggtaagctaacctgtcaccccacgcccccgagaatggttactgatagggagaggccttttccttgcaggagatggcgtctaccagaaggggatggacttcattttggagaagctcaaccatggggactgggtgcatatcttcccagaaggtcagcagggctgactgggtcgagcccccccagtatgagcgggatgggctcccaagcctcgcctctgtgctctctcaccagggaaagtgaacatgagttccgaattcctgcgtttcaagtggggaatcgggcgcctgattgctgagtgtcatctcaaccccatcatcctgcccctgtggcatgtcggaatgaatgacgtccttcctaacagtccgccctacttcccccgctttggacagaaaatcactgtgctgatcgggaagcccttcagtgccctgcctgtactcgagcggctccgggcggagaacaagtcggctgtggagatgcggaaagccctgacggacttcattcaagaggaattccagcatctgaagactcaggcagagcagctccacaaccacctccagcctgggagataggccttgcttgctgccttctggattcttggcccgcacagagctggggctgagggatggactgatgcttttagctcaaacgtggcttttagacagatttgttcatagaccctctcaagtgccctctccgagctggtaggcattccagctcctccgtgcttcctcagttacacaaaggacctcagctgcttctcccacttggccaagcagggaggaagaagcttaggcagggctctctttccttcttgccttcagatgttctctcccaggggctggcttcaggagggagcatagaaggcaggtgagcaaccagttggctaggggagcagggggcccaccagagctgtggagaggggaccctaagactcctcggcctggctcctacccaccgcccttgccgaaccaggagctgctcactacctcctcagggatggccgttggccacgtcttccttctgcctgagcttcccccccaccacaggccctttcctcaggcaaggtctggcctcaggtgggccgcaggcgggaaaagcagcccttggccagaagtcaagcccagccacgtggagcctagagtgagggcctgaggtctggctgcttgcccccatgctggcgccaacaacttctccatcctttctgcctctcaacatcacttgaatcctagggcctgggttttcatgtttttgaaacagaaccataaagcatatgtgttggcttgttgt

SEQ ID NO: 14394 - DNA, 1334 bp, Homo sapiens
ggcccagcttatgctaacatttctacctcccccctgggcaggaatcgggcgcctgattgctgagtgtcatctcaaccccatcatcctgcccctgtggcatgtcggtgagcctggggacggggacagagagatggcatctggggtggggggcctgggactccctctggtcccaggctgccctgctccaccccacgtctggccttctgtccactgtgctgcaggaatgaatgacgtccttcctaacagtccgccctacttcccccgctttggacaggtgggtggggactgctgaccttcggctgtctgcctgtctgctgtctgctccgtgtctcccactcagcactatggaggccagctgcaggaggagctgagcatgaggctacagcaggggacagagtggaacatagacagggacttcctggcaccgagacattaaaatgagagcagaggaagtcaggctggggcagaggtgggctgtggggtcaggacaggacaggtcatctacagcacaggacccaggaccaggaccttgttttagaggaagagtggcccctggggagtgtgtggcacagcagggccggggcttagcttctggctcccgggttgcttgggctggggctgtgggcactcctactgctcctcatcactcttggcggccaccccacagaaaatcactgtgctgatcgggaagcccttcagtgccctgcctgtactcgagcggctccgggcggagaacaagtcggctgtgagtttcctcctgggtcccccgtagctgtccccggaccccctgctgctggcttccagcagggtgcctccaccctctccatcccgtcaccctcccagggcaccctcccagggcaccttggccaagcttcccgaggggtgcaggccatccctggtcctttccctcaggtggagatgcggaaagccctgacggacttcattcaagaggaattccagcatctgaagactcaggcagagcagctccacaaccacctccagcctgggagataggccttgcttgctgccttctggattcttggcccgcacagagctggggctgagggatggactgatgcttttagctcaaacgtggcttttagacagatttgttcatagaccctctcaagtgccctctccgagctggtaggcattccagctcctccgtgcttcctcagttacacaaaggacctcagctgcttctcccacttggccaagcagggaggaagaagcttaggcagggctctctttccttcttgccttcagatgttctctcccaggggctggcttcaggagggagcatagaaggcaggtgagcaaccagttggctaggg

SEQ ID NO: 14395 - DNA, 537 bp, Homo sapiens
ggcccagcttatgctaacatttctacctcccccctgggcaggaatcgggcgcctgattgctgagtgtcatctcaaccccatcatcctgcccctgtggcatgtcggaatgaatgacgtccttcctaacagtccgccctacttcccccgctttggacagaaaatcactgtgctgatcgggaagcccttcagtgccctgcctgtactcgagcggctccgggcggagaacaagtcggctgtggagatgcggaaagccctgacggacttcattcaagaggaattccagcatctgaagactcaggcagagcagctccacaaccacctccagcctgggagataggccttgcttgctgccttctggattcttggcccgcacagagctggggctgagggatggactgatgcttttagctcaaacgtggcttttagacagatttgttcatagaccctctcaagtgccctctccgagctgatgttctctcccaggggctggcttcaggagggagcatagaaggcaggtgagcaaccagttggctaggg

SEQ ID NO: 14396 - DNA, 10188 bp, Homo sapiens
gctttccggcggttgcaccgggccggggtgccagcgcccgccttcccgtttcctcccgttccgcagcgcgcccacggcctgtgaccccggcgaccgctccccagtgacgagagagcggggccgggcgctgctccggcctgacctgcgaagggacctcggtccagtcccctgttgcgccgcgcccccgtccgtccgtgcgcgggccagtcaggggccagtgtctcgagcggtcgaggtcgcagacctagaggcgccccacaggccggcccggggcgctgggagcgccggccgcgggccgggtggggatgcctctgcacgtgaagtggccgttccccgcggtgccgccgctcacctggaccctggccagcagcgtcgtcatgggcttggtgggcacctacagctgcttctggaccagtgagtgggcccaggccgaggcaggcccgcccgggtacccatgcccggccggaggtgggacttagggtgggggacgccgcggccccgacctagcgggcgagcccggagcgcctgacttctccttccccgccagagtacatgaaccacctgaccgtgcacaacagggaggtgctgtacgagctcatcgagaagcgaggcccggccacgcccctcatcaccgtgtccaatcaccagtcctgcatggacgaccctcatctctggggtacccgggccagtgtgctgggcagggggaggaaaggcgaggattcgggacgggcccagcctcgtcagaacaaaccccttctcgctgccttttcatggagccctggcactccggtttccgggcgttctgccccagggctgagacttggatttgtggctcctgcagcatccctgagggagcatgatttggagagggccttgggcatggagcaggaccaaggaacggccacagggcatatcttacagctcctttaacgtcaggcctccagaaccctctgttctctaaaccatccagggccccacagtcttgggaaaaatttgggggttggacataggatatcctgtgaggaagttctgggccagggactggaagcccagtgtcctggcttcaggtttgcccctggctgggcgtgtaccgttcagccctatttgggagcctggttgccacacctagaggttcctgctctgctgacttcacaggaagttgcttggctctggtaaccagatggccgggtggaggggtgcctggggcttccactcctgaacagagagcttaactgtcctagagttcatggggagccacctagccacactggagcccttcagagctcaccctggctgctgggtggagaaaggcctatagatgtcacaggtggatcctgggaggccaggaaggaggacttggagccatccactagcctagactgggctggttgcagtgacagtacagggagaagtatagaagaatgggcattgtccaagtatgttggggaggtaggcagtccaggtgcagtgattagtaagatgtggagggtgggggagagggaggagccagggagaactgaatgatctggcctaagggtctgaaagatgccactttgggctgtagggaaatggtagtgctgctgtccctcattccctgagatggggtgaaggaagggcactccctggggatatgggaagttggggcatgaagcctttcctgtcctctagggatcctgaaactccgccacatctggaacctgaagttgatgcgttggtgaggaggaatgggcccctcgaagtgggccgggccggccccacctgcctctgcccagatttgccctcctcctgctctgcccaggaggtggcgtccagcagtccaggcagggcatggggtggggccccgcaggccctcccctgtgcctcccttctgcatgctgatgctgggggcagggtggtggagcggggtgcagggggcaggactaattgcatctgtccctgcttaggacccctgcagctgcagacatctgcttcaccaaggagctacactcccacttcttcagcttgggcaagtgtgtgcctgtgtgccgaggtgagctgctcctccagcgagtgcagggaggcacttctggggcaggaaagctggtggccagtgtctctgttttggagggacctatgggggtaggcatcccgggagccaacatgaggcccagctccatcacatgccagcagaggggacagaggctgtgggaggagggatgggtccttggaaagtcctcaactctctgcaactgcccagggatcctgtggacctggagccttggcattagaattcaaggaggcattatccataaccccttctctcagggatgtcactaagagactcattgagaacagtgcgttgtcattggtccatggtggcagtagcatgtacctgcaggccagagggttttgcttctaggagaacaaacaggcttgtggggtgagaaccccaggggataggggccattttgatccctattctccagacagggaggatcacagagattaagctgctggcccaaggtcatggggtaggaggtggcaaagccaggatttgaatccagattgctccttcctctgcaggagcagaatttttccaagcagagaatgaggggaaaggtgttctagacacaggcaggcacatgccaggtgctggaaaaagaagagagaaaggtaagccaggcatagcggttcacacttgtcatcccagcactttgtgaggtcgaggtgagaggatcactcaagcccaggagtttgagaccagcctgggcaacatagtaagaccctgtctctttaaaaataaaaatattttaaacaaaagaaaggtagaaaatatgagttgtatgtagaatatgaaggttctagaataatcctattaagaattttggattctggctgggcgcggtggctcacgcctgtaatcccagcactttgggaggctgaggccagcggatcacgaggtcaggagatcgagaccatcctggctaacacggtgaaaccccgtctctactaaaaatacaaaaaattagctgggcatggtagtgggcgcctgtagtcccagctactcgggaggctgaggcaggagaatggcgtgaacccggaaggtggagcttgcagtgagccaagatcacgccactgcactccagcctgggtgacagagtgagactccgtctcaaaaaaaaaaaaaaaagtgccggccacggtggctcatgcctgtaatcccagcactctgggaggccgaggcgggcggatcacgaggtcaggaattcgagaccagcctaaccaacatggtgaaaccccgtctctactaaaaatacaaaaattagccgggcgtggtggtgtgtgcctgtaatctcagctacttgggagactgagacgggagcattgcttgaacccgggaggtggaggttgtggtgagctgagatcctgccattgcactccagcctgggcaataagagcgaaactccgtctggaaaaaaaaaaaaaaaaaaagaattttgaattagctggctgcattggtgcatgcctacagtcccagctcctcaggaggctgaggtgggaggatcacttgagccctcgattttctttttccttgagacaatgtctgtttctgttgtccaggctggagtgccgtggcgtgatgatggctcactgcagcttctgtttcctgggttcaagggatcctgtcacctcagcctcctgagcagctgggactaaggagtgtgcccagctaattcttttttttttttggtagagttggggtcttactacattgccagggctggtcttgaactcctagactcaagcgatcctcccgcctcagcctctcaaagtgctgggatcacaggcatgagccattgtgcccaacccagcccaggaatttgaggccagcctgagcaatatagtgagaccccaggtatagatagataggtagatagataggtaggtaggtaggtagatagatagataggtaggtgggtaggtaggtgggtagataggtaggtaggtacgtaggtagatagatagatagatacatacatacatagatagataagatagatagattgattagatagattagatagccaggtggggtggctcacgcctgtaatcccagtgctttgggaggctgaggtgggtggatcacctgaggtcaggagtttgagaccagcctggctaatgtggcgaaaccctgtctactaaaaatacaaaaattagctggatgtggtggcgcacgcctgtaatctcagctactcgggaggctggggtgggagaatcgcttgaacccaggaggtggaggttgcagtgagctgagatcatgccactgcactccagcctgggccacagagggagacctggtctcaaaaaaaaaaaaaaaaaaaaaaaagatttttgtatttgactgtgctctctcatccaggtggtgacatgcttgtatctgtggttaagaggtagcatctgccaggcgcggtggctcatgcctgtaatcccagtactttgcgaggccgaggcgggtggttcacctgaggtcaggagtttgagaccagcctgaccaacatggcgaaaccccgtctctactaaaaatataaaaattagccgaggctgggcgcggtggctcacgcctgtaatcccagcactttgggaggccgaggcgggtggatcacgaggtcaggagatcgagaccatcctggctaacaggatgaaaccccgtctctactaaaaacacaaaattagctgggcatggtggcaggtgcctgtagtcccagctactcgggaggctgaggcaggagaatggcacaaacccgggaggcggagcttgaggcaggagaatggcgtgaacccgggaggcagagcttgctatgagcagagatcgcgccactgcactccagcctgggtgacagagcgagactccgtctcaaaaaaaaaaaaaagagagagataccattccagttgcaatgtggctgcagcagggctaggtggacatgaggagcccagttcagggctgtcacagtagctccagcagcagatgattgtggctgggcctcccaagtgtcacgttggagaaccggagaaggggacttctttgggatgtactctggacttgttgatagattaagtgtaggtggggtgaggaagagaactcaaagatgacaccaggtgttggagctgagccacggggagaagggtgcaaagggaaagcagtgcgggggctgggaggggagagggtcagtcctgttttgcttgtgctgcatctgaggagcccctcacctgtggaaggagagcagtcccagaggcagtggggtgtgcagttctggaacttagaagaatgatcagggggctgggtgcagtggctcacgcctgtaatcccagcactttgggaggccgaggcgggcggatcaagaggtcaggagattgagaccatcctggctaacatggtgaaaccccgtctctactaaaaatataaaaaattagcagcgcatggtggcaggcacctgtagtcccagctattcaggaggctgaggcaggagagtggcgtgaacccgggagacggagcttgcagtgagctgagattgcgccactgcactccagcctgggcgacagagcgagactccgtctcaaaaaaaaaaaaaacaaaaaattatcaggaataaagatactgggaattcaaccacaaaaaccacaaagtcacgaatgcagagtgagagtcttcagagagagggcagaggcccaggatggcacagagggagagagaagccaccaagatggcagggagccatggccagagagaaaagcaaaccaggcgcctgtggcaccatggaagcagcaggtgatgctggagaagcgtttccatgcagtgacagctgccagagccagattattatggcctgagggctggtggtgctgcagttgggggggaatggagaccgcagcgggggaatggagaccgcaggggcggcaactcctcccagaggttcagtttggaggaaaaagagacagaaggaagggtaaccaaaggatattagaggtcaaggaggggtttattatttctagctggtcaaagtagaatgtggtaaaacccaataaagtaacagcaaataacaaagaggggcttttaatggaaagctgcagtgcctgcccctcacctccctagccccactcctcagaagcagccccctggagcggtttctctttctgctgcttttggaggctacttctgtctctgtaaaggaacttctgtctctgtaaaggaacaagcagaggccacagtgtcttggcaaatgaccgtggcattgtttatcccaacctgctctgagagatggggactctgctgattcacccctcgtccctgcctctttagttccttcagcaaagaactaataatatgtcattaaggcaaaggcagtatttggcacacttggcttctgtgttccaaaaaattccctttttctccaagcgtagattttaatatggtatttaagtatcaaagtgatttgacacaagtgacacaagtgagcagtagtagcatttgcaaaagctacaaatgatgaagtcttgctccaaaagcatattattattattttttaaattccagtttcaagctcaatggataggttgcgtcagtgggttttagtagagaaggggccagtacctatgaagactcccctgtactattacacatgctgcgtcccaagtagggaaactccagtgggtcatcaccccctccctctagcccaagtgggctgctgggtcagggcactgtttgggttgggttgagattcctggatccctaactagcaccttccaaagaatcggccttgcagagaacaaagttcattgccaaaggtattcccaatgtctgtctctcgctctgtgatagggcttctttactccccactttataagatgaggatatctgctataccccattccttcaacctctccacctctttcctcttttgtctgccatgtgattacttttccatcaccaaggttgatgagatccttactgtgtacttactgtctccaagcatccccaggcttccagccagcacgcagcagccaacattggcttcagaaggaaggaggtttgcatttccttctcttgggtccagtgccatggtctcagggttatctccaatgtggaaagttgctagaccaggagcagtttgactccactgtttttcagtctagcaagtttgagtttttcccaagctcttgatgtgtgttcaaatgaatgttctccctttcccaagagacctccctataagggagggtctagtttcccggggtgccctgagaagaaggggtcagcaggggggaggaatggtggaggctgaggcctcaggcaggtgccctgtgaggagtggctgtgacaagcggctgagatcccagcaaagggttgttgcccagaatctggggcctaagcgaggttggaaatcacaaatgcacttggtttctctagcagctggcacatagtaggatcagcccaggagtggcaccttcaaagagaaaggaacgcatgaggctccgagagcggtcggctggcagccagggcctggctggggagggagggcaggtggtgcgctgacctggggatctttgagagtgtgcaggagtatgtggctgaagcggcccagctggtgagccactgaagatgggggtcataggtagatggaggaattgccaggtcagaatctcggtaggagatgacttgagctgatgctgcctggcacataggggtttagaagatattaggaaggaagccccacagcgtgcccaagtgccatgcaggccctggagacggtcattggagggcgtctgtggatggcgcagtgggggatgggaagtccctaatctgctggggctttcccagcaagcagggactgagggggatagtccccaacacatgggccccagggagaagggcctgtttcattgaggtttggagagtgttgagggtaagctaacctgtcaccccacgcccccgagaatggttactgatagggagaggccttttccttgcaggagatggcgtctaccagaaggggatggacttcattttggagaagctcaaccatggggactgggtgcatatcttcccagaaggtcagcagggctgactgggtcgagcccccccagtatgagcgggatgggctcccaagcctcgcctctgtgctctctcaccagggaaagtgaacatgagttccgaattcctgcgtttcaagtggggtaagggctgctggtctctggccacagccatcctcccggcccagagatggccctgtgggcccctggctcccgccccctcgggctggcttgtatgggggtagatgggcgtgtttgtagcgccaggaaggggacaggtgctgagactaggcctgcctctcgcaggggcttgcccaagggagctgaattgaactggaggatgtcgggggtggcagtggccagaggctggcacagaagcttggctcagggcccagcttatgctaacatttctacctcccccctgggcaggaatcgggcgcctgattgctgagtgtcatctcaaccccatcatcctgcccctgtggcatgtcggtgagcctggggacggggacagagagatggcatctggggtggggggcctgggactccctctggtcccaggctgccctgctccaccccacgtctggccttctgtccactgtgctgcaggaatgaatgacgtccttcctaacagtccgccctacttcccccgctttggacaggtgggtggggactgctgaccttcggctgtctgcctgtctgctgtctgctccgtgtctcccactcagcactatggaggccagctgcaggaggagctgagcatgaggctacagcaggggacagagtggaacatagacagggacttcctggcaccgagacattaaaatgagagcagaggaagtcaggctggggcagaggtgggctgtggggtcaggacaggacaggtcatctacagcacaggacccaggaccaggaccttgttttagaggaagagtggcccctggggagtgtgtggcacagcagggccggggcttagcttctggctcccgggttgcttgggctggggctgtgggcactcctactgctcctcatcactcttggcggccaccccacagaaaatcactgtgctgatcgggaagcccttcagtgccctgcctgtactcgagcggctccgggcggagaacaagtcggctgtgagtttcctcctgggtcccccgtagctgtccccggaccccctgctgctggcttccagcagggtgcctccaccctctccatcccgtcaccctcccagggcaccctcccagggcaccttggccaagcttcccgaggggtgcaggccatccctggtcctttccctcaggtggagatgcggaaagccctgacggacttcattcaagaggaattccagcatctgaagactcaggcagagcagctccacaaccacctccagcctgggagataggccttgcttgctgccttctggattcttggcccgcacagagctggggctgagggatggactgatgcttttagctcaaacgtggcttttagacagatttgttcatagaccctctcaagtgccctctccgagctggtaggcattccagctcctccgtgcttcctcagttacacaaaggacctcagctgcttctcccacttggccaagcagggaggaagaagcttaggcagggctctctttccttcttgccttcagatgttctctcccaggggctggcttcaggagggagcatagaaggcaggtgagcaaccagttggctaggggagcagggggcccaccagagctgtggagaggggaccctaagactcctcggcctggctcctacccaccgcccttgccgaaccaggagctgctcactacctcctcagggatggccgttggccacgtcttccttctgcctgagcttcccccccaccacaggccctttcctcaggcaaggtctggcctcaggtgggccgcaggcgggaaaagcagcccttggccagaagtcaagcccagccacgtggagcctagagtgagggcctgaggtctggctgcttgcccccatgctggcgccaacaacttctccatcctttctgcctctcaacatcacttgaatcctagggcctgggttttcatgtttttgaaacagaaccataaagcatatgtgttggcttgttgtaaaa

SEQ ID NO: 14397 - DNA, 1906 bp, Homo sapiens
gctttccggcggttgcaccgggccggggtgccagcgcccgccttcccgtttcctcccgttccgcagcgcgcccacggcctgtgaccccggcgaccgctccccagtgacgagagagcggggccgggcgctgctccggcctgacctgcgaagggacctcggtccagtcccctgttgcgccgcgcccccgtccgtccgtgcgcgggccagtcaggggccagtgtctcgagcggtcgaggtcgcagacctagaggcgccccacaggccggcccggggcgctgggagcgccggccgcgggccgggtggggatgcctctgcacgtgaagtggccgttccccgcggtgccgccgctcacctggaccctggccagcagcgtcgtcatgggcttggtgggcacctacagctgcttctggaccaagtacatgaaccacctgaccgtgcacaacagggaggtgctgtacgagctcatcgagaagcgaggcccggccacgcccctcatcaccgtgtccaatcaccagtcctgcatggacgaccctcatctctgggggatcctgaaactccgccacatctggaacctgaagttgatgcgttggacccctgcagctgcagacatctgcttcaccaaggagctacactcccacttcttcagcttgggcaagtgtgtgcctgtgtgccgaggagcagaatttttccaagcagagaatgaggggaaaggtgttctagacacaggcaggcacatgccaggtgctggaaaaagaagagagaaaggagatggcgtctaccagaaggggatggacttcattttggagaagctcaaccatggggactgggtgcatatcttcccagaagggaaagtgaacatgagttccgaattcctgcgtttcaagtggggaatcgggcgcctgattgctgagtgtcatctcaaccccatcatcctgcccctgtggcatgtcggaatgaatgacgtccttcctaacagtccgccctacttcccccgctttggacagaaaatcactgtgctgatcgggaagcccttcagtgccctgcctgtactcgagcggctccgggcggagaacaagtcggctgtggagatgcggaaagccctgacggacttcattcaagaggaattccagcatctgaagactcaggcagagcagctccacaaccacctccagcctgggagataggccttgcttgctgccttctggattcttggcccgcacagagctggggctgagggatggactgatgcttttagctcaaacgtggcttttagacagatttgttcatagaccctctcaagtgccctctccgagctggtaggcattccagctcctccgtgcttcctcagttacacaaaggacctcagctgcttctcccacttggccaagcagggaggaagaagcttaggcagggctctctttccttcttgccttcagatgttctctcccaggggctggcttcaggagggagcatagaaggcaggtgagcaaccagttggctaggggagcagggggcccaccagagctgtggagaggggaccctaagactcctcggcctggctcctacccaccgcccttgccgaaccaggagctgctcactacctcctcagggatggccgttggccacgtcttccttctgcctgagcttcccccccaccacaggccctttcctcaggcaaggtctggcctcaggtgggccgcaggcgggaaaagcagcccttggccagaagtcaagcccagccacgtggagcctagagtgagggcctgaggtctggctgcttgcccccatgctggcgccaacaacttctccatcctttctgcctctcaacatcacttgaatcctagggcctgggttttcatgtttttgaaacagaaccataaagcatatgtgttggcttgttgtaaaa

SEQ ID NO: 14398 - DNA, 9554 bp, Homo sapiens
agagcggggccgggcgctgctccggcctgacctgcgaagggacctcggtccagtcccctgttgcgccgcgcccccgtccgtccgtgcgcgggccagtcaggggccagtgtctcgagcggtcgaggtcgcagacctagaggcgccccacaggccggcccggggcgctgggagcgccggccgcgggccgggtggggatgcctctgcacgtgaagtggccgttccccgcggtgccgccgctcacctggaccctggccagcagcgtcgtcatgggcttggtgggcacctacagctgcttctggaccagtgagtgggcccaggccgaggcaggcccgcccgggtacccatgcccggccggaggtgggacttagggtgggggacgccgcggccccgacctagcgggcgagcccggagcgcctgacttctccttccccgccagagtacatgaaccacctgaccgtgcacaacagggaggtgctgtacgagctcatcgagaagcgaggcccggccacgcccctcatcaccgtgtccaatcaccagtcctgcatggacgaccctcatctctggggtacccgggccagtgtgctgggcagggggaggaaaggcgaggattcgggacgggcccagcctcgtcagaacaaaccccttctcgctgccttttcatggagccctggcactccggtttccgggcgttctgccccagggctgagacttggatttgtggctcctgcagcatccctgagggagcatgatttggagagggccttgggcatggagcaggaccaaggaacggccacagggcatatcttacagctcctttaacgtcaggcctccagaaccctctgttctctaaaccatccagggccccacagtcttgggaaaaatttgggggttggacataggatatcctgtgaggaagttctgggccagggactggaagcccagtgtcctggcttcaggtttgcccctggctgggcgtgtaccgttcagccctatttgggagcctggttgccacacctagaggttcctgctctgctgacttcacaggaagttgcttggctctggtaaccagatggccgggtggaggggtgcctggggcttccactcctgaacagagagcttaactgtcctagagttcatggggagccacctagccacactggagcccttcagagctcaccctggctgctgggtggagaaaggcctatagatgtcacaggtggatcctgggaggccaggaaggaggacttggagccatccactagcctagactgggctggttgcagtgacagtacagggagaagtatagaagaatgggcattgtccaagtatgttggggaggtaggcagtccaggtgcagtgattagtaagatgtggagggtgggggagagggaggagccagggagaactgaatgatctggcctaagggtctgaaagatgccactttgggctgtagggaaatggtagtgctgctgtccctcattccctgagatggggtgaaggaagggcactccctggggatatgggaagttggggcatgaagcctttcctgtcctctagggatcctgaaactccgccacatctggaacctgaagttgatgcgttggtgaggaggaatgggcccctcgaagtgggccgggccggccccacctgcctctgcccagatttgccctcctcctgctctgcccaggaggtggcgtccagcagtccaggcagggcatggggtggggccccgcaggccctcccctgtgcctcccttctgcatgctgatgctgggggcagggtggtggagcggggtgcagggggcaggactaattgcatctgtccctgcttaggacccctgcagctgcagacatctgcttcaccaaggagctacactcccacttcttcagcttgggcaagtgtgtgcctgtgtgccgaggtgagctgctcctccagcgagtgcagggaggcacttctggggcaggaaagctggtggccagtgtctctgttttggagggacctatgggggtaggcatcccgggagccaacatgaggcccagctccatcacatgccagcagaggggacagaggctgtgggaggagggatgggtccttggaaagtcctcaactctctgcaactgcccagggatcctgtggacctggagccttggcattagaattcaaggaggcattatccataaccccttctctcagggatgtcactaagagactcattgagaacagtgcgttgtcattggtccatggtggcagtagcatgtacctgcaggccagagggttttgcttctaggagaacaaacaggcttgtggggtgagaaccccaggggataggggccattttgatccctattctccagacagggaggatcacagagattaagctgctggcccaaggtcatggggtaggaggtggcaaagccaggatttgaatccagattgctccttcctctgcaggagcagaatttttccaagcagagaatgaggggaaaggtgttctagacacaggcaggcacatgccaggtgctggaaaaagaagagagaaaggtaagccaggcatagcggttcacacttgtcatcccagcactttgtgaggtcgaggtgagaggatcactcaagcccaggagtttgagaccagcctgggcaacatagtaagaccctgtctctttaaaaataaaaatattttaaacaaaagaaaggtagaaaatatgagttgtatgtagaatatgaaggttctagaataatcctattaagaattttggattctggctgggcgcggtggctcacgcctgtaatcccagcactttgggaggctgaggccagcggatcacgaggtcaggagatcgagaccatcctggctaacacggtgaaaccccgtctctactaaaaatacaaaaaattagctgggcatggtagtgggcgcctgtagtcccagctactcgggaggctgaggcaggagaatggcgtgaacccggaaggtggagcttgcagtgagccaagatcacgccactgcactccagcctgggtgacagagtgagactccgtctcaaaaaaaaaaaaaaaagtgccggccacggtggctcatgcctgtaatcccagcactctgggaggccgaggcgggcggatcacgaggtcaggaattcgagaccagcctaaccaacatggtgaaaccccgtctctactaaaaatacaaaaattagccgggcgtggtggtgtgtgcctgtaatctcagctacttgggagactgagacgggagcattgcttgaacccgggaggtggaggttgtggtgagctgagatcctgccattgcactccagcctgggcaataagagcgaaactccgtctggaaaaaaaaaaaaaaaaaaagaattttgaattagctggctgcattggtgcatgcctacagtcccagctcctcaggaggctgaggtgggaggatcacttgagccctcgattttctttttccttgagacaatgtctgtttctgttgtccaggctggagtgccgtggcgtgatgatggctcactgcagcttctgtttcctgggttcaagggatcctgtcacctcagcctcctgagcagctgggactaaggagtgtgcccagctaattcttttttttttttggtagagttggggtcttactacattgccagggctggtcttgaactcctagactcaagcgatcctcccgcctcagcctctcaaagtgctgggatcacaggcatgagccattgtgcccaacccagcccaggaatttgaggccagcctgagcaatatagtgagaccccaggtatagatagataggtagatagataggtaggtaggtaggtagatagatagataggtaggtgggtaggtaggtgggtagataggtaggtaggtacgtaggtagatagatagatagatacatacatacatagatagataagatagatagattgattagatagattagatagccaggtggggtggctcacgcctgtaatcccagtgctttgggaggctgaggtgggtggatcacctgaggtcaggagtttgagaccagcctggctaatgtggcgaaaccctgtctactaaaaatacaaaaattagctggatgtggtggcgcacgcctgtaatctcagctactcgggaggctggggtgggagaatcgcttgaacccaggaggtggaggttgcagtgagctgagatcatgccactgcactccagcctgggccacagagggagacctggtctcaaaaaaaaaaaaaaaaaaaaaaaagatttttgtatttgactgtgctctctcatccaggtggtgacatgcttgtatctgtggttaagaggtagcatctgccaggcgcggtggctcatgcctgtaatcccagtactttgcgaggccgaggcgggtggttcacctgaggtcaggagtttgagaccagcctgaccaacatggcgaaaccccgtctctactaaaaatataaaaattagccgaggctgggcgcggtggctcacgcctgtaatcccagcactttgggaggccgaggcgggtggatcacgaggtcaggagatcgagaccatcctggctaacaggatgaaaccccgtctctactaaaaacacaaaattagctgggcatggtggcaggtgcctgtagtcccagctactcgggaggctgaggcaggagaatggcacaaacccgggaggcggagcttgaggcaggagaatggcgtgaacccgggaggcagagcttgctatgagcagagatcgcgccactgcactccagcctgggtgacagagcgagactccgtctcaaaaaaaaaaaaaagagagagataccattccagttgcaatgtggctgcagcagggctaggtggacatgaggagcccagttcagggctgtcacagtagctccagcagcagatgattgtggctgggcctcccaagtgtcacgttggagaaccggagaaggggacttctttgggatgtactctggacttgttgatagattaagtgtaggtggggtgaggaagagaactcaaagatgacaccaggtgttggagctgagccacggggagaagggtgcaaagggaaagcagtgcgggggctgggaggggagagggtcagtcctgttttgcttgtgctgcatctgaggagcccctcacctgtggaaggagagcagtcccagaggcagtggggtgtgcagttctggaacttagaagaatgatcagggggctgggtgcagtggctcacgcctgtaatcccagcactttgggaggccgaggcgggcggatcaagaggtcaggagattgagaccatcctggctaacatggtgaaaccccgtctctactaaaaatataaaaaattagcagcgcatggtggcaggcacctgtagtcccagctattcaggaggctgaggcaggagagtggcgtgaacccgggagacggagcttgcagtgagctgagattgcgccactgcactccagcctgggcgacagagcgagactccgtctcaaaaaaaaaaaaaacaaaaaattatcaggaataaagatactgggaattcaaccacaaaaaccacaaagtcacgaatgcagagtgagagtcttcagagagagggcagaggcccaggatggcacagagggagagagaagccaccaagatggcagggagccatggccagagagaaaagcaaaccaggcgcctgtggcaccatggaagcagcaggtgatgctggagaagcgtttccatgcagtgacagctgccagagccagattattatggcctgagggctggtggtgctgcagttgggggggaatggagaccgcagcgggggaatggagaccgcaggggcggcaactcctcccagaggttcagtttggaggaaaaagagacagaaggaagggtaaccaaaggatattagaggtcaaggaggggtttattatttctagctggtcaaagtagaatgtggtaaaacccaataaagtaacagcaaataacaaagaggggcttttaatggaaagctgcagtgcctgcccctcacctccctagccccactcctcagaagcagccccctggagcggtttctctttctgctgcttttggaggctacttctgtctctgtaaaggaacttctgtctctgtaaaggaacaagcagaggccacagtgtcttggcaaatgaccgtggcattgtttatcccaacctgctctgagagatggggactctgctgattcacccctcgtccctgcctctttagttccttcagcaaagaactaataatatgtcattaaggcaaaggcagtatttggcacacttggcttctgtgttccaaaaaattccctttttctccaagcgtagattttaatatggtatttaagtatcaaagtgatttgacacaagtgacacaagtgagcagtagtagcatttgcaaaagctacaaatgatgaagtcttgctccaaaagcatattattattattttttaaattccagtttcaagctcaatggataggttgcgtcagtgggttttagtagagaaggggccagtacctatgaagactcccctgtactattacacatgctgcgtcccaagtagggaaactccagtgggtcatcaccccctccctctagcccaagtgggctgctgggtcagggcactgtttgggttgggttgagattcctggatccctaactagcaccttccaaagaatcggccttgcagagaacaaagttcattgccaaaggtattcccaatgtctgtctctcgctctgtgatagggcttctttactccccactttataagatgaggatatctgctataccccattccttcaacctctccacctctttcctcttttgtctgccatgtgattacttttccatcaccaaggttgatgagatccttactgtgtacttactgtctccaagcatccccaggcttccagccagcacgcagcagccaacattggcttcagaaggaaggaggtttgcatttccttctcttgggtccagtgccatggtctcagggttatctccaatgtggaaagttgctagaccaggagcagtttgactccactgtttttcagtctagcaagtttgagtttttcccaagctcttgatgtgtgttcaaatgaatgttctccctttcccaagagacctccctataagggagggtctagtttcccggggtgccctgagaagaaggggtcagcaggggggaggaatggtggaggctgaggcctcaggcaggtgccctgtgaggagtggctgtgacaagcggctgagatcccagcaaagggttgttgcccagaatctggggcctaagcgaggttggaaatcacaaatgcacttggtttctctagcagctggcacatagtaggatcagcccaggagtggcaccttcaaagagaaaggaacgcatgaggctccgagagcggtcggctggcagccagggcctggctggggagggagggcaggtggtgcgctgacctggggatctttgagagtgtgcaggagtatgtggctgaagcggcccagctggtgagccactgaagatgggggtcataggtagatggaggaattgccaggtcagaatctcggtaggagatgacttgagctgatgctgcctggcacataggggtttagaagatattaggaaggaagccccacagcgtgcccaagtgccatgcaggccctggagacggtcattggagggcgtctgtggatggcgcagtgggggatgggaagtccctaatctgctggggctttcccagcaagcagggactgagggggatagtccccaacacatgggccccagggagaagggcctgtttcattgaggtttggagagtgttgagggtaagctaacctgtcaccccacgcccccgagaatggttactgatagggagaggccttttccttgcaggagatggcgtctaccagaaggggatggacttcattttggagaagctcaaccatggggactgggtgcatatcttcccagaaggtcagcagggctgactgggtcgagcccccccagtatgagcgggatgggctcccaagcctcgcctctgtgctctctcaccagggaaagtgaacatgagttccgaattcctgcgtttcaagtggggtaagggctgctggtctctggccacagccatcctcccggcccagagatggccctgtgggcccctggctcccgccccctcgggctggcttgtatgggggtagatgggcgtgtttgtagcgccaggaaggggacaggtgctgagactaggcctgcctctcgcaggggcttgcccaagggagctgaattgaactggaggatgtcgggggtggcagtggccagaggctggcacagaagcttggctcagggcccagcttatgctaacatttctacctcccccctgggcaggaatcgggcgcctgattgctgagtgtcatctcaaccccatcatcctgcccctgtggcatgtcggtgagcctggggacggggacagagagatggcatctggggtggggggcctgggactccctctggtcccaggctgccctgctccaccccacgtctggccttctgtccactgtgctgcaggaatgaatgacgtccttcctaacagtccgccctacttcccccgctttggacaggtgggtggggactgctgaccttcggctgtctgcctgtctgctgtctgctccgtgtctcccactcagcactatggaggccagctgcaggaggagctgagcatgaggctacagcaggggacagagtggaacatagacagggacttcctggcaccgagacattaaaatgagagcagaggaagtcaggctggggcagaggtgggctgtggggtcaggacaggacaggtcatctacagcacaggacccaggaccaggaccttgttttagaggaagagtggcccctggggagtgtgtggcacagcagggccggggcttagcttctggctcccgggttgcttgggctggggctgtgggcactcctactgctcctcatcactcttggcggccaccccacagaaaatcactgtgctgatcgggaagcccttcagtgccctgcctgtactcgagcggctccgggcggagaacaagtcggctgtgagtttcctcctgggtcccccgtagctgtccccggaccccctgctgctggcttccagcagggtgcctccaccctctccatcccgtcaccctcccagggcaccctcccagggcaccttggccaagcttcccgaggggtgcaggccatccctggtcctttccctcaggtggagatgcggaaagccctgacggacttcattcaagaggaattccagcatctgaagactcaggcagagcagctccacaaccacctccagcctgggagataggccttgcttgctgccttctggattcttggcccgcacagagctggggctgagggatggactgatgcttttagctcaaacgtggcttttagacagatttgttcatagaccctctcaagtgccctctccgagctggtaggcattccagctcctccgtgcttcctcagttacacaaaggacctcagctgcttctcccacttgg

SEQ ID NO: 14399 - DNA, 1230 bp, Homo sapiens
agagcggggccgggcgctgctccggcctgacctgcgaagggacctcggtccagtcccctgttgcgccgcgcccccgtccgtccgtgcgcgggccagtcaggggccagtgtctcgagcggtcgaggtcgcagacctagaggcgccccacaggccggcccggggcgctgggagcgccggccgcgggccgggtggggatgcctctgcacgtgaagtggccgttccccgcggtgccgccgctcacctggaccctggccagcagcgtcgtcatgggcttggtgggcacctacagctgcttctggaccaagtacatgaaccacctgaccgtgcacaacagggaggtgctgtacgagctcatcgagaagcgaggcccggccacgcccctcatcaccgtgtccaatcaccagtcctgcatggacgaccctcatctctgggggatcctgaaactccgccacatctggaacctgaagttgatgcgttggacccctgcagctgcagacatctgcttcaccaaggagctacactcccacttcttcagcttgggcaagtgtgtgcctgtgtgccgaggagcagaatttttccaagcagagaatgaggggaaaggtgttctagacacaggcaggcacatgccaggtgctggaaaaagaagagagaaaggagatggcgtctaccagaaggggatggacttcattttggagaagctcaaccatggggactgggtgcatatcttcccagaaggaatcgggcgcctgattgctgagtgtcatctcaaccccatcatcctgcccctgtggcatgtcggaatgaatgacgtccttcctaacagtccgccctacttcccccgctttggacagaaaatcactgtgctgatcgggaagcccttcagtgccctgcctgtactcgagcggctccgggcggagaacaagtcggctgtggagatgcggaaagccctgacggacttcattcaagaggaattccagcatctgaagactcaggcagagcagctccacaaccacctccagcctgggagataggccttgcttgctgccttctggattcttggcccgcacagagctggggctgagggatggactgatgcttttagctcaaacgtggcttttagacagatttgttcatagaccctctcaagtgccctctccgagctggtaggcattccagctcctccgtgcttcctcagttacacaaaggacctcagctgcttctcccacttgg

SEQ ID NO: 14400 - DNA, 10162 bp, Homo sapiens
gctttccggcggttgcaccgggccggggtgccagcgcccgccttcccgtttcctcccgttccgcagcgcgcccacggcctgtgaccccggcgaccgctccccagtgacgagagagcggggccgggcgctgctccggcctgacctgcgaagggacctcggtccagtcccctgttgcgccgcgcccccgtccgtccgtgcgcgggccagtcaggggccagtgtctcgagcggtcgaggtcgcagacctagaggcgccccacaggccggcccggggcgctgggagcgccggccgcgggccgggtggggatgcctctgcacgtgaagtggccgttccccgcggtgccgccgctcacctggaccctggccagcagcgtcgtcatgggcttggtgggcacctacagctgcttctggaccagtgagtgggcccaggccgaggcaggcccgcccgggtacccatgcccggccggaggtgggacttagggtgggggacgccgcggccccgacctagcgggcgagcccggagcgcctgacttctccttccccgccagagtacatgaaccacctgaccgtgcacaacagggaggtgctgtacgagctcatcgagaagcgaggcccggccacgcccctcatcaccgtgtccaatcaccagtcctgcatggacgaccctcatctctggggtacccgggccagtgtgctgggcagggggaggaaaggcgaggattcgggacgggcccagcctcgtcagaacaaaccccttctcgctgccttttcatggagccctggcactccggtttccgggcgttctgccccagggctgagacttggatttgtggctcctgcagcatccctgagggagcatgatttggagagggccttgggcatggagcaggaccaaggaacggccacagggcatatcttacagctcctttaacgtcaggcctccagaaccctctgttctctaaaccatccagggccccacagtcttgggaaaaatttgggggttggacataggatatcctgtgaggaagttctgggccagggactggaagcccagtgtcctggcttcaggtttgcccctggctgggcgtgtaccgttcagccctatttgggagcctggttgccacacctagaggttcctgctctgctgacttcacaggaagttgcttggctctggtaaccagatggccgggtggaggggtgcctggggcttccactcctgaacagagagcttaactgtcctagagttcatggggagccacctagccacactggagcccttcagagctcaccctggctgctgggtggagaaaggcctatagatgtcacaggtggatcctgggaggccaggaaggaggacttggagccatccactagcctagactgggctggttgcagtgacagtacagggagaagtatagaagaatgggcattgtccaagtatgttggggaggtaggcagtccaggtgcagtgattagtaagatgtggagggtgggggagagggaggagccagggagaactgaatgatctggcctaagggtctgaaagatgccactttgggctgtagggaaatggtagtgctgctgtccctcattccctgagatggggtgaaggaagggcactccctggggatatgggaagttggggcatgaagcctttcctgtcctctagggatcctgaaactccgccacatctggaacctgaagttgatgcgttggtgaggaggaatgggcccctcgaagtgggccgggccggccccacctgcctctgcccagatttgccctcctcctgctctgcccaggaggtggcgtccagcagtccaggcagggcatggggtggggccccgcaggccctcccctgtgcctcccttctgcatgctgatgctgggggcagggtggtggagcggggtgcagggggcaggactaattgcatctgtccctgcttaggacccctgcagctgcagacatctgcttcaccaaggagctacactcccacttcttcagcttgggcaagtgtgtgcctgtgtgccgaggtgagctgctcctccagcgagtgcagggaggcacttctggggcaggaaagctggtggccagtgtctctgttttggagggacctatgggggtaggcatcccgggagccaacatgaggcccagctccatcacatgccagcagaggggacagaggctgtgggaggagggatgggtccttggaaagtcctcaactctctgcaactgcccagggatcctgtggacctggagccttggcattagaattcaaggaggcattatccataaccccttctctcagggatgtcactaagagactcattgagaacagtgcgttgtcattggtccatggtggcagtagcatgtacctgcaggccagagggttttgcttctaggagaacaaacaggcttgtggggtgagaaccccaggggataggggccattttgatccctattctccagacagggaggatcacagagattaagctgctggcccaaggtcatggggtaggaggtggcaaagccaggatttgaatccagattgctccttcctctgcaggagcagaatttttccaagcagagaatgaggggaaaggtgttctagacacaggcaggcacatgccaggtgctggaaaaagaagagagaaaggtaagccaggcatagcggttcacacttgtcatcccagcactttgtgaggtcgaggtgagaggatcactcaagcccaggagtttgagaccagcctgggcaacatagtaagaccctgtctctttaaaaataaaaatattttaaacaaaagaaaggtagaaaatatgagttgtatgtagaatatgaaggttctagaataatcctattaagaattttggattctggctgggcgcggtggctcacgcctgtaatcccagcactttgggaggctgaggccagcggatcacgaggtcaggagatcgagaccatcctggctaacacggtgaaaccccgtctctactaaaaatacaaaaaattagctgggcatggtagtgggcgcctgtagtcccagctactcgggaggctgaggcaggagaatggcgtgaacccggaaggtggagcttgcagtgagccaagatcacgccactgcactccagcctgggtgacagagtgagactccgtctcaaaaaaaaaaaaaaaagtgccggccacggtggctcatgcctgtaatcccagcactctgggaggccgaggcgggcggatcacgaggtcaggaattcgagaccagcctaaccaacatggtgaaaccccgtctctactaaaaatacaaaaattagccgggcgtggtggtgtgtgcctgtaatctcagctacttgggagactgagacgggagcattgcttgaacccgggaggtggaggttgtggtgagctgagatcctgccattgcactccagcctgggcaataagagcgaaactccgtctggaaaaaaaaaaaaaaaaaaagaattttgaattagctggctgcattggtgcatgcctacagtcccagctcctcaggaggctgaggtgggaggatcacttgagccctcgattttctttttccttgagacaatgtctgtttctgttgtccaggctggagtgccgtggcgtgatgatggctcactgcagcttctgtttcctgggttcaagggatcctgtcacctcagcctcctgagcagctgggactaaggagtgtgcccagctaattcttttttttttttggtagagttggggtcttactacattgccagggctggtcttgaactcctagactcaagcgatcctcccgcctcagcctctcaaagtgctgggatcacaggcatgagccattgtgcccaacccagcccaggaatttgaggccagcctgagcaatatagtgagaccccaggtatagatagataggtagatagataggtaggtaggtaggtagatagatagataggtaggtgggtaggtaggtgggtagataggtaggtaggtacgtaggtagatagatagatagatacatacatacatagatagataagatagatagattgattagatagattagatagccaggtggggtggctcacgcctgtaatcccagtgctttgggaggctgaggtgggtggatcacctgaggtcaggagtttgagaccagcctggctaatgtggcgaaaccctgtctactaaaaatacaaaaattagctggatgtggtggcgcacgcctgtaatctcagctactcgggaggctggggtgggagaatcgcttgaacccaggaggtggaggttgcagtgagctgagatcatgccactgcactccagcctgggccacagagggagacctggtctcaaaaaaaaaaaaaaaaaaaaaaaagatttttgtatttgactgtgctctctcatccaggtggtgacatgcttgtatctgtggttaagaggtagcatctgccaggcgcggtggctcatgcctgtaatcccagtactttgcgaggccgaggcgggtggttcacctgaggtcaggagtttgagaccagcctgaccaacatggcgaaaccccgtctctactaaaaatataaaaattagccgaggctgggcgcggtggctcacgcctgtaatcccagcactttgggaggccgaggcgggtggatcacgaggtcaggagatcgagaccatcctggctaacaggatgaaaccccgtctctactaaaaacacaaaattagctgggcatggtggcaggtgcctgtagtcccagctactcgggaggctgaggcaggagaatggcacaaacccgggaggcggagcttgaggcaggagaatggcgtgaacccgggaggcagagcttgctatgagcagagatcgcgccactgcactccagcctgggtgacagagcgagactccgtctcaaaaaaaaaaaaaagagagagataccattccagttgcaatgtggctgcagcagggctaggtggacatgaggagcccagttcagggctgtcacagtagctccagcagcagatgattgtggctgggcctcccaagtgtcacgttggagaaccggagaaggggacttctttgggatgtactctggacttgttgatagattaagtgtaggtggggtgaggaagagaactcaaagatgacaccaggtgttggagctgagccacggggagaagggtgcaaagggaaagcagtgcgggggctgggaggggagagggtcagtcctgttttgcttgtgctgcatctgaggagcccctcacctgtggaaggagagcagtcccagaggcagtggggtgtgcagttctggaacttagaagaatgatcagggggctgggtgcagtggctcacgcctgtaatcccagcactttgggaggccgaggcgggcggatcaagaggtcaggagattgagaccatcctggctaacatggtgaaaccccgtctctactaaaaatataaaaaattagcagcgcatggtggcaggcacctgtagtcccagctattcaggaggctgaggcaggagagtggcgtgaacccgggagacggagcttgcagtgagctgagattgcgccactgcactccagcctgggcgacagagcgagactccgtctcaaaaaaaaaaaaaacaaaaaattatcaggaataaagatactgggaattcaaccacaaaaaccacaaagtcacgaatgcagagtgagagtcttcagagagagggcagaggcccaggatggcacagagggagagagaagccaccaagatggcagggagccatggccagagagaaaagcaaaccaggcgcctgtggcaccatggaagcagcaggtgatgctggagaagcgtttccatgcagtgacagctgccagagccagattattatggcctgagggctggtggtgctgcagttgggggggaatggagaccgcagcgggggaatggagaccgcaggggcggcaactcctcccagaggttcagtttggaggaaaaagagacagaaggaagggtaaccaaaggatattagaggtcaaggaggggtttattatttctagctggtcaaagtagaatgtggtaaaacccaataaagtaacagcaaataacaaagaggggcttttaatggaaagctgcagtgcctgcccctcacctccctagccccactcctcagaagcagccccctggagcggtttctctttctgctgcttttggaggctacttctgtctctgtaaaggaacttctgtctctgtaaaggaacaagcagaggccacagtgtcttggcaaatgaccgtggcattgtttatcccaacctgctctgagagatggggactctgctgattcacccctcgtccctgcctctttagttccttcagcaaagaactaataatatgtcattaaggcaaaggcagtatttggcacacttggcttctgtgttccaaaaaattccctttttctccaagcgtagattttaatatggtatttaagtatcaaagtgatttgacacaagtgacacaagtgagcagtagtagcatttgcaaaagctacaaatgatgaagtcttgctccaaaagcatattattattattttttaaattccagtttcaagctcaatggataggttgcgtcagtgggttttagtagagaaggggccagtacctatgaagactcccctgtactattacacatgctgcgtcccaagtagggaaactccagtgggtcatcaccccctccctctagcccaagtgggctgctgggtcagggcactgtttgggttgggttgagattcctggatccctaactagcaccttccaaagaatcggccttgcagagaacaaagttcattgccaaaggtattcccaatgtctgtctctcgctctgtgatagggcttctttactccccactttataagatgaggatatctgctataccccattccttcaacctctccacctctttcctcttttgtctgccatgtgattacttttccatcaccaaggttgatgagatccttactgtgtacttactgtctccaagcatccccaggcttccagccagcacgcagcagccaacattggcttcagaaggaaggaggtttgcatttccttctcttgggtccagtgccatggtctcagggttatctccaatgtggaaagttgctagaccaggagcagtttgactccactgtttttcagtctagcaagtttgagtttttcccaagctcttgatgtgtgttcaaatgaatgttctccctttcccaagagacctccctataagggagggtctagtttcccggggtgccctgagaagaaggggtcagcaggggggaggaatggtggaggctgaggcctcaggcaggtgccctgtgaggagtggctgtgacaagcggctgagatcccagcaaagggttgttgcccagaatctggggcctaagcgaggttggaaatcacaaatgcacttggtttctctagcagctggcacatagtaggatcagcccaggagtggcaccttcaaagagaaaggaacgcatgaggctccgagagcggtcggctggcagccagggcctggctggggagggagggcaggtggtgcgctgacctggggatctttgagagtgtgcaggagtatgtggctgaagcggcccagctggtgagccactgaagatgggggtcataggtagatggaggaattgccaggtcagaatctcggtaggagatgacttgagctgatgctgcctggcacataggggtttagaagatattaggaaggaagccccacagcgtgcccaagtgccatgcaggccctggagacggtcattggagggcgtctgtggatggcgcagtgggggatgggaagtccctaatctgctggggctttcccagcaagcagggactgagggggatagtccccaacacatgggccccagggagaagggcctgtttcattgaggtttggagagtgttgagggtaagctaacctgtcaccccacgcccccgagaatggttactgatagggagaggccttttccttgcaggagatggcgtctaccagaaggggatggacttcattttggagaagctcaaccatggggactgggtgcatatcttcccagaaggtcagcagggctgactgggtcgagcccccccagtatgagcgggatgggctcccaagcctcgcctctgtgctctctcaccagggaaagtgaacatgagttccgaattcctgcgtttcaagtggggtaagggctgctggtctctggccacagccatcctcccggcccagagatggccctgtgggcccctggctcccgccccctcgggctggcttgtatgggggtagatgggcgtgtttgtagcgccaggaaggggacaggtgctgagactaggcctgcctctcgcaggggcttgcccaagggagctgaattgaactggaggatgtcgggggtggcagtggccagaggctggcacagaagcttggctcagggcccagcttatgctaacatttctacctcccccctgggcaggaatcgggcgcctgattgctgagtgtcatctcaaccccatcatcctgcccctgtggcatgtcggtgagcctggggacggggacagagagatggcatctggggtggggggcctgggactccctctggtcccaggctgccctgctccaccccacgtctggccttctgtccactgtgctgcaggaatgaatgacgtccttcctaacagtccgccctacttcccccgctttggacaggtgggtggggactgctgaccttcggctgtctgcctgtctgctgtctgctccgtgtctcccactcagcactatggaggccagctgcaggaggagctgagcatgaggctacagcaggggacagagtggaacatagacagggacttcctggcaccgagacattaaaatgagagcagaggaagtcaggctggggcagaggtgggctgtggggtcaggacaggacaggtcatctacagcacaggacccaggaccaggaccttgttttagaggaagagtggcccctggggagtgtgtggcacagcagggccggggcttagcttctggctcccgggttgcttgggctggggctgtgggcactcctactgctcctcatcactcttggcggccaccccacagaaaatcactgtgctgatcgggaagcccttcagtgccctgcctgtactcgagcggctccgggcggagaacaagtcggctgtgagtttcctcctgggtcccccgtagctgtccccggaccccctgctgctggcttccagcagggtgcctccaccctctccatcccgtcaccctcccagggcaccctcccagggcaccttggccaagcttcccgaggggtgcaggccatccctggtcctttccctcaggtggagatgcggaaagccctgacggacttcattcaagaggaattccagcatctgaagactcaggcagagcagctccacaaccacctccagcctgggagataggccttgcttgctgccttctggattcttggcccgcacagagctggggctgagggatggactgatgcttttagctcaaacgtggcttttagacagatttgttcatagaccctctcaagtgccctctccgagctggtaggcattccagctcctccgtgcttcctcagttacacaaaggacctcagctgcttctcccacttggccaagcagggaggaagaagcttaggcagggctctctttccttcttgccttcagatgttctctcccaggggctggcttcaggagggagcatagaaggcaggtgagcaaccagttggctaggggagcagggggcccaccagagctgtggagaggggaccctaagactcctcggcctggctcctacccaccgcccttgccgaaccaggagctgctcactacctcctcagggatggccgttggccacgtcttccttctgcctgagcttcccccccaccacaggccctttcctcaggcaaggtctggcctcaggtgggccgcaggcgggaaaagcagcccttggccagaagtcaagcccagccacgtggagcctagagtgagggcctgaggtctggctgcttgcccccatgctggcgccaacaacttctccatcctttctgcctctcaacatcacttgaatcctagggcctgggttttcatgtttttgaaacagaaccataa

SEQ ID NO: 14401 - DNA, 1790 bp, Homo sapiens
gctttccggcggttgcaccgggccggggtgccagcgcccgccttcccgtttcctcccgttccgcagcgcgcccacggcctgtgaccccggcgaccgctccccagtgacgagagagcggggccgggcgctgctccggcctgacctgcgaagggacctcggtccagtcccctgttgcgccgcgcccccgtccgtccgtgcgcgggccagtcaggggccagtgtctcgagcggtcgaggtcgcagacctagaggcgccccacaggccggcccggggcgctgggagcgccggccgcgggccgggtggggatgcctctgcacgtgaagtggccgttccccgcggtgccgccgctcacctggaccctggccagcagcgtcgtcatgggcttggtgggcacctacagctgcttctggaccaagtacatgaaccacctgaccgtgcacaacagggaggtgctgtacgagctcatcgagaagcgaggcccggccacgcccctcatcaccgtgtccaatcaccagtcctgcatggacgaccctcatctctgggggatcctgaaactccgccacatctggaacctgaagttgatgcgttggacccctgcagctgcagacatctgcttcaccaaggagctacactcccacttcttcagcttgggcaagtgtgtgcctgtgtgccgaggagatggcgtctaccagaaggggatggacttcattttggagaagctcaaccatggggactgggtgcatatcttcccagaagggaaagtgaacatgagttccgaattcctgcgtttcaagtggggaatcgggcgcctgattgctgagtgtcatctcaaccccatcatcctgcccctgtggcatgtcggaatgaatgacgtccttcctaacagtccgccctacttcccccgctttggacagaaaatcactgtgctgatcgggaagcccttcagtgccctgcctgtactcgagcggctccgggcggagaacaagtcggctgtggagatgcggaaagccctgacggacttcattcaagaggaattccagcatctgaagactcaggcagagcagctccacaaccacctccagcctgggagataggccttgcttgctgccttctggattcttggcccgcacagagctggggctgagggatggactgatgcttttagctcaaacgtggcttttagacagatttgttcatagaccctctcaagtgccctctccgagctggtaggcattccagctcctccgtgcttcctcagttacacaaaggacctcagctgcttctcccacttggccaagcagggaggaagaagcttaggcagggctctctttccttcttgccttcagatgttctctcccaggggctggcttcaggagggagcatagaaggcaggtgagcaaccagttggctaggggagcagggggcccaccagagctgtggagaggggaccctaagactcctcggcctggctcctacccaccgcccttgccgaaccaggagctgctcactacctcctcagggatggccgttggccacgtcttccttctgcctgagcttcccccccaccacaggccctttcctcaggcaaggtctggcctcaggtgggccgcaggcgggaaaagcagcccttggccagaagtcaagcccagccacgtggagcctagagtgagggcctgaggtctggctgcttgcccccatgctggcgccaacaacttctccatcctttctgcctctcaacatcacttgaatcctagggcctgggttttcatgtttttgaaacagaaccataa

SEQ ID NO: 14402 - DNA, 9899 bp, Homo sapiens
tttccggcggttgcaccgggccggggtgccagcgcccgccttcccgtttcctcccgttccgcagcgcgcccacggcctgtgaccccggcgaccgctccccagtgacgagagagcggggccgggcgctgctccggcctgacctgcgaagggacctcggtccagtcccctgttgcgccgcgcccccgtccgtccgtgcgcgggccagtcaggggccagtgtctcgagcggtcgaggtcgcagacctagaggcgccccacaggccggcccggggcgctgggagcgccggccgcgggccgggtggggatgcctctgcacgtgaagtggccgttccccgcggtgccgccgctcacctggaccctggccagcagcgtcgtcatgggcttggtgggcacctacagctgcttctggaccagtgagtgggcccaggccgaggcaggcccgcccgggtacccatgcccggccggaggtgggacttagggtgggggacgccgcggccccgacctagcgggcgagcccggagcgcctgacttctccttccccgccagagtacatgaaccacctgaccgtgcacaacagggaggtgctgtacgagctcatcgagaagcgaggcccggccacgcccctcatcaccgtgtccaatcaccagtcctgcatggacgaccctcatctctggggtacccgggccagtgtgctgggcagggggaggaaaggcgaggattcgggacgggcccagcctcgtcagaacaaaccccttctcgctgccttttcatggagccctggcactccggtttccgggcgttctgccccagggctgagacttggatttgtggctcctgcagcatccctgagggagcatgatttggagagggccttgggcatggagcaggaccaaggaacggccacagggcatatcttacagctcctttaacgtcaggcctccagaaccctctgttctctaaaccatccagggccccacagtcttgggaaaaatttgggggttggacataggatatcctgtgaggaagttctgggccagggactggaagcccagtgtcctggcttcaggtttgcccctggctgggcgtgtaccgttcagccctatttgggagcctggttgccacacctagaggttcctgctctgctgacttcacaggaagttgcttggctctggtaaccagatggccgggtggaggggtgcctggggcttccactcctgaacagagagcttaactgtcctagagttcatggggagccacctagccacactggagcccttcagagctcaccctggctgctgggtggagaaaggcctatagatgtcacaggtggatcctgggaggccaggaaggaggacttggagccatccactagcctagactgggctggttgcagtgacagtacagggagaagtatagaagaatgggcattgtccaagtatgttggggaggtaggcagtccaggtgcagtgattagtaagatgtggagggtgggggagagggaggagccagggagaactgaatgatctggcctaagggtctgaaagatgccactttgggctgtagggaaatggtagtgctgctgtccctcattccctgagatggggtgaaggaagggcactccctggggatatgggaagttggggcatgaagcctttcctgtcctctagggatcctgaaactccgccacatctggaacctgaagttgatgcgttggtgaggaggaatgggcccctcgaagtgggccgggccggccccacctgcctctgcccagatttgccctcctcctgctctgcccaggaggtggcgtccagcagtccaggcagggcatggggtggggccccgcaggccctcccctgtgcctcccttctgcatgctgatgctgggggcagggtggtggagcggggtgcagggggcaggactaattgcatctgtccctgcttaggacccctgcagctgcagacatctgcttcaccaaggagctacactcccacttcttcagcttgggcaagtgtgtgcctgtgtgccgaggtgagctgctcctccagcgagtgcagggaggcacttctggggcaggaaagctggtggccagtgtctctgttttggagggacctatgggggtaggcatcccgggagccaacatgaggcccagctccatcacatgccagcagaggggacagaggctgtgggaggagggatgggtccttggaaagtcctcaactctctgcaactgcccagggatcctgtggacctggagccttggcattagaattcaaggaggcattatccataaccccttctctcagggatgtcactaagagactcattgagaacagtgcgttgtcattggtccatggtggcagtagcatgtacctgcaggccagagggttttgcttctaggagaacaaacaggcttgtggggtgagaaccccaggggataggggccattttgatccctattctccagacagggaggatcacagagattaagctgctggcccaaggtcatggggtaggaggtggcaaagccaggatttgaatccagattgctccttcctctgcaggagcagaatttttccaagcagagaatgaggggaaaggtgttctagacacaggcaggcacatgccaggtgctggaaaaagaagagagaaaggtaagccaggcatagcggttcacacttgtcatcccagcactttgtgaggtcgaggtgagaggatcactcaagcccaggagtttgagaccagcctgggcaacatagtaagaccctgtctctttaaaaataaaaatattttaaacaaaagaaaggtagaaaatatgagttgtatgtagaatatgaaggttctagaataatcctattaagaattttggattctggctgggcgcggtggctcacgcctgtaatcccagcactttgggaggctgaggccagcggatcacgaggtcaggagatcgagaccatcctggctaacacggtgaaaccccgtctctactaaaaatacaaaaaattagctgggcatggtagtgggcgcctgtagtcccagctactcgggaggctgaggcaggagaatggcgtgaacccggaaggtggagcttgcagtgagccaagatcacgccactgcactccagcctgggtgacagagtgagactccgtctcaaaaaaaaaaaaaaaagtgccggccacggtggctcatgcctgtaatcccagcactctgggaggccgaggcgggcggatcacgaggtcaggaattcgagaccagcctaaccaacatggtgaaaccccgtctctactaaaaatacaaaaattagccgggcgtggtggtgtgtgcctgtaatctcagctacttgggagactgagacgggagcattgcttgaacccgggaggtggaggttgtggtgagctgagatcctgccattgcactccagcctgggcaataagagcgaaactccgtctggaaaaaaaaaaaaaaaaaaagaattttgaattagctggctgcattggtgcatgcctacagtcccagctcctcaggaggctgaggtgggaggatcacttgagccctcgattttctttttccttgagacaatgtctgtttctgttgtccaggctggagtgccgtggcgtgatgatggctcactgcagcttctgtttcctgggttcaagggatcctgtcacctcagcctcctgagcagctgggactaaggagtgtgcccagctaattcttttttttttttggtagagttggggtcttactacattgccagggctggtcttgaactcctagactcaagcgatcctcccgcctcagcctctcaaagtgctgggatcacaggcatgagccattgtgcccaacccagcccaggaatttgaggccagcctgagcaatatagtgagaccccaggtatagatagataggtagatagataggtaggtaggtaggtagatagatagataggtaggtgggtaggtaggtgggtagataggtaggtaggtacgtaggtagatagatagatagatacatacatacatagatagataagatagatagattgattagatagattagatagccaggtggggtggctcacgcctgtaatcccagtgctttgggaggctgaggtgggtggatcacctgaggtcaggagtttgagaccagcctggctaatgtggcgaaaccctgtctactaaaaatacaaaaattagctggatgtggtggcgcacgcctgtaatctcagctactcgggaggctggggtgggagaatcgcttgaacccaggaggtggaggttgcagtgagctgagatcatgccactgcactccagcctgggccacagagggagacctggtctcaaaaaaaaaaaaaaaaaaaaaaaagatttttgtatttgactgtgctctctcatccaggtggtgacatgcttgtatctgtggttaagaggtagcatctgccaggcgcggtggctcatgcctgtaatcccagtactttgcgaggccgaggcgggtggttcacctgaggtcaggagtttgagaccagcctgaccaacatggcgaaaccccgtctctactaaaaatataaaaattagccgaggctgggcgcggtggctcacgcctgtaatcccagcactttgggaggccgaggcgggtggatcacgaggtcaggagatcgagaccatcctggctaacaggatgaaaccccgtctctactaaaaacacaaaattagctgggcatggtggcaggtgcctgtagtcccagctactcgggaggctgaggcaggagaatggcacaaacccgggaggcggagcttgaggcaggagaatggcgtgaacccgggaggcagagcttgctatgagcagagatcgcgccactgcactccagcctgggtgacagagcgagactccgtctcaaaaaaaaaaaaaagagagagataccattccagttgcaatgtggctgcagcagggctaggtggacatgaggagcccagttcagggctgtcacagtagctccagcagcagatgattgtggctgggcctcccaagtgtcacgttggagaaccggagaaggggacttctttgggatgtactctggacttgttgatagattaagtgtaggtggggtgaggaagagaactcaaagatgacaccaggtgttggagctgagccacggggagaagggtgcaaagggaaagcagtgcgggggctgggaggggagagggtcagtcctgttttgcttgtgctgcatctgaggagcccctcacctgtggaaggagagcagtcccagaggcagtggggtgtgcagttctggaacttagaagaatgatcagggggctgggtgcagtggctcacgcctgtaatcccagcactttgggaggccgaggcgggcggatcaagaggtcaggagattgagaccatcctggctaacatggtgaaaccccgtctctactaaaaatataaaaaattagcagcgcatggtggcaggcacctgtagtcccagctattcaggaggctgaggcaggagagtggcgtgaacccgggagacggagcttgcagtgagctgagattgcgccactgcactccagcctgggcgacagagcgagactccgtctcaaaaaaaaaaaaaacaaaaaattatcaggaataaagatactgggaattcaaccacaaaaaccacaaagtcacgaatgcagagtgagagtcttcagagagagggcagaggcccaggatggcacagagggagagagaagccaccaagatggcagggagccatggccagagagaaaagcaaaccaggcgcctgtggcaccatggaagcagcaggtgatgctggagaagcgtttccatgcagtgacagctgccagagccagattattatggcctgagggctggtggtgctgcagttgggggggaatggagaccgcagcgggggaatggagaccgcaggggcggcaactcctcccagaggttcagtttggaggaaaaagagacagaaggaagggtaaccaaaggatattagaggtcaaggaggggtttattatttctagctggtcaaagtagaatgtggtaaaacccaataaagtaacagcaaataacaaagaggggcttttaatggaaagctgcagtgcctgcccctcacctccctagccccactcctcagaagcagccccctggagcggtttctctttctgctgcttttggaggctacttctgtctctgtaaaggaacttctgtctctgtaaaggaacaagcagaggccacagtgtcttggcaaatgaccgtggcattgtttatcccaacctgctctgagagatggggactctgctgattcacccctcgtccctgcctctttagttccttcagcaaagaactaataatatgtcattaaggcaaaggcagtatttggcacacttggcttctgtgttccaaaaaattccctttttctccaagcgtagattttaatatggtatttaagtatcaaagtgatttgacacaagtgacacaagtgagcagtagtagcatttgcaaaagctacaaatgatgaagtcttgctccaaaagcatattattattattttttaaattccagtttcaagctcaatggataggttgcgtcagtgggttttagtagagaaggggccagtacctatgaagactcccctgtactattacacatgctgcgtcccaagtagggaaactccagtgggtcatcaccccctccctctagcccaagtgggctgctgggtcagggcactgtttgggttgggttgagattcctggatccctaactagcaccttccaaagaatcggccttgcagagaacaaagttcattgccaaaggtattcccaatgtctgtctctcgctctgtgatagggcttctttactccccactttataagatgaggatatctgctataccccattccttcaacctctccacctctttcctcttttgtctgccatgtgattacttttccatcaccaaggttgatgagatccttactgtgtacttactgtctccaagcatccccaggcttccagccagcacgcagcagccaacattggcttcagaaggaaggaggtttgcatttccttctcttgggtccagtgccatggtctcagggttatctccaatgtggaaagttgctagaccaggagcagtttgactccactgtttttcagtctagcaagtttgagtttttcccaagctcttgatgtgtgttcaaatgaatgttctccctttcccaagagacctccctataagggagggtctagtttcccggggtgccctgagaagaaggggtcagcaggggggaggaatggtggaggctgaggcctcaggcaggtgccctgtgaggagtggctgtgacaagcggctgagatcccagcaaagggttgttgcccagaatctggggcctaagcgaggttggaaatcacaaatgcacttggtttctctagcagctggcacatagtaggatcagcccaggagtggcaccttcaaagagaaaggaacgcatgaggctccgagagcggtcggctggcagccagggcctggctggggagggagggcaggtggtgcgctgacctggggatctttgagagtgtgcaggagtatgtggctgaagcggcccagctggtgagccactgaagatgggggtcataggtagatggaggaattgccaggtcagaatctcggtaggagatgacttgagctgatgctgcctggcacataggggtttagaagatattaggaaggaagccccacagcgtgcccaagtgccatgcaggccctggagacggtcattggagggcgtctgtggatggcgcagtgggggatgggaagtccctaatctgctggggctttcccagcaagcagggactgagggggatagtccccaacacatgggccccagggagaagggcctgtttcattgaggtttggagagtgttgagggtaagctaacctgtcaccccacgcccccgagaatggttactgatagggagaggccttttccttgcaggagatggcgtctaccagaaggggatggacttcattttggagaagctcaaccatggggactgggtgcatatcttcccagaaggtcagcagggctgactgggtcgagcccccccagtatgagcgggatgggctcccaagcctcgcctctgtgctctctcaccagggaaagtgaacatgagttccgaattcctgcgtttcaagtggggtaagggctgctggtctctggccacagccatcctcccggcccagagatggccctgtgggcccctggctcccgccccctcgggctggcttgtatgggggtagatgggcgtgtttgtagcgccaggaaggggacaggtgctgagactaggcctgcctctcgcaggggcttgcccaagggagctgaattgaactggaggatgtcgggggtggcagtggccagaggctggcacagaagcttggctcagggcccagcttatgctaacatttctacctcccccctgggcaggaatcgggcgcctgattgctgagtgtcatctcaaccccatcatcctgcccctgtggcatgtcggtgagcctggggacggggacagagagatggcatctggggtggggggcctgggactccctctggtcccaggctgccctgctccaccccacgtctggccttctgtccactgtgctgcaggaatgaatgacgtccttcctaacagtccgccctacttcccccgctttggacaggtgggtggggactgctgaccttcggctgtctgcctgtctgctgtctgctccgtgtctcccactcagcactatggaggccagctgcaggaggagctgagcatgaggctacagcaggggacagagtggaacatagacagggacttcctggcaccgagacattaaaatgagagcagaggaagtcaggctggggcagaggtgggctgtggggtcaggacaggacaggtcatctacagcacaggacccaggaccaggaccttgttttagaggaagagtggcccctggggagtgtgtggcacagcagggccggggcttagcttctggctcccgggttgcttgggctggggctgtgggcactcctactgctcctcatcactcttggcggccaccccacagaaaatcactgtgctgatcgggaagcccttcagtgccctgcctgtactcgagcggctccgggcggagaacaagtcggctgtgagtttcctcctgggtcccccgtagctgtccccggaccccctgctgctggcttccagcagggtgcctccaccctctccatcccgtcaccctcccagggcaccctcccagggcaccttggccaagcttcccgaggggtgcaggccatccctggtcctttccctcaggtggagatgcggaaagccctgacggacttcattcaagaggaattccagcatctgaagactcaggcagagcagctccacaaccacctccagcctgggagataggccttgcttgctgccttctggattcttggcccgcacagagctggggctgagggatggactgatgcttttagctcaaacgtggcttttagacagatttgttcatagaccctctcaagtgccctctccgagctggtaggcattccagctcctccgtgcttcctcagttacacaaaggacctcagctgcttctcccacttggccaagcagggaggaagaagcttaggcagggctctctttccttcttgccttcagatgttctctcccaggggctggcttcaggagggagcatagaaggcaggtgagcaaccagttggctaggggagcagggggcccaccagagctgtggagaggggaccctaagactcctcggcctggctcctacccaccgcccttgccgaaccaggagctgctcactacctcctcagggatggccgt

SEQ ID NO: 14403 - DNA, 1485 bp, Homo sapiens
tttccggcggttgcaccgggccggggtgccagcgcccgccttcccgtttcctcccgttccgcagcgcgcccacggcctgtgaccccggcgaccgctccccagtgacgagagagcggggccgggcgctgctccggcctgacctgcgaagggacctcggtccagtcccctgttgcgccgcgcccccgtccgtccgtgcgcgggccagtcaggggccagtgtctcgagcggtcgaggtcgcagacctagaggcgccccacaggccggcccggggcgctgggagcgccggccgcgggccgggtggggatgcctctgcacgtgaagtggccgttccccgcggtgccgccgctcacctggaccctggccagcagcgtcgtcatgggcttggtgggcacctacagctgcttctggaccaagtacatgaaccacctgaccgtgcacaacagggaggtgctgtacgagctcatcgagaagcgaggcccggccacgcccctcatcaccgtgtccaatcaccagtcctgcatggacgaccctcatctctgggggatcctgaaactccgccacatctggaacctgaagttgatgcgttggacccctgcagctgcagacatctgcttcaccaaggagctacactcccacttcttcagcttgggcaagtgtgtgcctgtgtgccgaggagatggcgtctaccagaaggggatggacttcattttggagaagctcaaccatggggactgggtgcatatcttcccagaaggaatcgggcgcctgattgctgagtgtcatctcaaccccatcatcctgcccctgtggcatgtcggaatgaatgacgtccttcctaacagtccgccctacttcccccgctttggacagaaaatcactgtgctgatcgggaagcccttcagtgccctgcctgtactcgagcggctccgggcggagaacaagtcggctgtggagatgcggaaagccctgacggacttcattcaagaggaattccagcatctgaagactcaggcagagcagctccacaaccacctccagcctgggagataggccttgcttgctgccttctggattcttggcccgcacagagctggggctgagggatggactgatgcttttagctcaaacgtggcttttagacagatttgttcatagaccctctcaagtgccctctccgagctggtaggcattccagctcctccgtgcttcctcagttacacaaaggacctcagctgcttctcccacttggccaagcagggaggaagaagcttaggcagggctctctttccttcttgccttcagatgttctctcccaggggctggcttcaggagggagcatagaaggcaggtgagcaaccagttggctaggggagcagggggcccaccagagctgtggagaggggaccctaagactcctcggcctggctcctacccaccgcccttgccgaaccaggagctgctcactacctcctcagggatggccgt

SEQ ID NO: 14404 - DNA, 8519 bp, Homo sapiens
caccggcgcaggttcgctttccggcggttgcaccgggccggggtgccagcgcccgccttcccgtttcctcccgttccgcagcgcgcccacggcctgtgaccccggcgaccgctccccagtgacgagagagcggggccgggcgctgctccggcctgacctgcgaagggacctcggtccagtcccctgttgcgccgcgcccccgtccgtccgtgcgcgggccagtcaggggccagtgtctcgagcggtcgaggtcgcagacctagaggcgccccacaggccggcccggggcgctgggagcgccggccgcgggccgggtggggatgcctctgcacgtgaagtggccgttccccgcggtgccgccgctcacctggaccctggccagcagcgtcgtcatgggcttggtgggcacctacagctgcttctggaccagtgagtgggcccaggccgaggcaggcccgcccgggtacccatgcccggccggaggtgggacttagggtgggggacgccgcggccccgacctagcgggcgagcccggagcgcctgacttctccttccccgccagagtacatgaaccacctgaccgtgcacaacagggaggtgctgtacgagctcatcgagaagcgaggcccggccacgcccctcatcaccgtgtccaatcaccagtcctgcatggacgaccctcatctctggggtacccgggccagtgtgctgggcagggggaggaaaggcgaggattcgggacgggcccagcctcgtcagaacaaaccccttctcgctgccttttcatggagccctggcactccggtttccgggcgttctgccccagggctgagacttggatttgtggctcctgcagcatccctgagggagcatgatttggagagggccttgggcatggagcaggaccaaggaacggccacagggcatatcttacagctcctttaacgtcaggcctccagaaccctctgttctctaaaccatccagggccccacagtcttgggaaaaatttgggggttggacataggatatcctgtgaggaagttctgggccagggactggaagcccagtgtcctggcttcaggtttgcccctggctgggcgtgtaccgttcagccctatttgggagcctggttgccacacctagaggttcctgctctgctgacttcacaggaagttgcttggctctggtaaccagatggccgggtggaggggtgcctggggcttccactcctgaacagagagcttaactgtcctagagttcatggggagccacctagccacactggagcccttcagagctcaccctggctgctgggtggagaaaggcctatagatgtcacaggtggatcctgggaggccaggaaggaggacttggagccatccactagcctagactgggctggttgcagtgacagtacagggagaagtatagaagaatgggcattgtccaagtatgttggggaggtaggcagtccaggtgcagtgattagtaagatgtggagggtgggggagagggaggagccagggagaactgaatgatctggcctaagggtctgaaagatgccactttgggctgtagggaaatggtagtgctgctgtccctcattccctgagatggggtgaaggaagggcactccctggggatatgggaagttggggcatgaagcctttcctgtcctctagggatcctgaaactccgccacatctggaacctgaagttgatgcgttggtgaggaggaatgggcccctcgaagtgggccgggccggccccacctgcctctgcccagatttgccctcctcctgctctgcccaggaggtggcgtccagcagtccaggcagggcatggggtggggccccgcaggccctcccctgtgcctcccttctgcatgctgatgctgggggcagggtggtggagcggggtgcagggggcaggactaattgcatctgtccctgcttaggacccctgcagctgcagacatctgcttcaccaaggagctacactcccacttcttcagcttgggcaagtgtgtgcctgtgtgccgaggtgagctgctcctccagcgagtgcagggaggcacttctggggcaggaaagctggtggccagtgtctctgttttggagggacctatgggggtaggcatcccgggagccaacatgaggcccagctccatcacatgccagcagaggggacagaggctgtgggaggagggatgggtccttggaaagtcctcaactctctgcaactgcccagggatcctgtggacctggagccttggcattagaattcaaggaggcattatccataaccccttctctcagggatgtcactaagagactcattgagaacagtgcgttgtcattggtccatggtggcagtagcatgtacctgcaggccagagggttttgcttctaggagaacaaacaggcttgtggggtgagaaccccaggggataggggccattttgatccctattctccagacagggaggatcacagagattaagctgctggcccaaggtcatggggtaggaggtggcaaagccaggatttgaatccagattgctccttcctctgcaggagcagaatttttccaagcagagaatgaggggaaaggtgttctagacacaggcaggcacatgccaggtgctggaaaaagaagagagaaaggtaagccaggcatagcggttcacacttgtcatcccagcactttgtgaggtcgaggtgagaggatcactcaagcccaggagtttgagaccagcctgggcaacatagtaagaccctgtctctttaaaaataaaaatattttaaacaaaagaaaggtagaaaatatgagttgtatgtagaatatgaaggttctagaataatcctattaagaattttggattctggctgggcgcggtggctcacgcctgtaatcccagcactttgggaggctgaggccagcggatcacgaggtcaggagatcgagaccatcctggctaacacggtgaaaccccgtctctactaaaaatacaaaaaattagctgggcatggtagtgggcgcctgtagtcccagctactcgggaggctgaggcaggagaatggcgtgaacccggaaggtggagcttgcagtgagccaagatcacgccactgcactccagcctgggtgacagagtgagactccgtctcaaaaaaaaaaaaaaaagtgccggccacggtggctcatgcctgtaatcccagcactctgggaggccgaggcgggcggatcacgaggtcaggaattcgagaccagcctaaccaacatggtgaaaccccgtctctactaaaaatacaaaaattagccgggcgtggtggtgtgtgcctgtaatctcagctacttgggagactgagacgggagcattgcttgaacccgggaggtggaggttgtggtgagctgagatcctgccattgcactccagcctgggcaataagagcgaaactccgtctggaaaaaaaaaaaaaaaaaaagaattttgaattagctggctgcattggtgcatgcctacagtcccagctcctcaggaggctgaggtgggaggatcacttgagccctcgattttctttttccttgagacaatgtctgtttctgttgtccaggctggagtgccgtggcgtgatgatggctcactgcagcttctgtttcctgggttcaagggatcctgtcacctcagcctcctgagcagctgggactaaggagtgtgcccagctaattcttttttttttttggtagagttggggtcttactacattgccagggctggtcttgaactcctagactcaagcgatcctcccgcctcagcctctcaaagtgctgggatcacaggcatgagccattgtgcccaacccagcccaggaatttgaggccagcctgagcaatatagtgagaccccaggtatagatagataggtagatagataggtaggtaggtaggtagatagatagataggtaggtgggtaggtaggtgggtagataggtaggtaggtacgtaggtagatagatagatagatacatacatacatagatagataagatagatagattgattagatagattagatagccaggtggggtggctcacgcctgtaatcccagtgctttgggaggctgaggtgggtggatcacctgaggtcaggagtttgagaccagcctggctaatgtggcgaaaccctgtctactaaaaatacaaaaattagctggatgtggtggcgcacgcctgtaatctcagctactcgggaggctggggtgggagaatcgcttgaacccaggaggtggaggttgcagtgagctgagatcatgccactgcactccagcctgggccacagagggagacctggtctcaaaaaaaaaaaaaaaaaaaaaaaagatttttgtatttgactgtgctctctcatccaggtggtgacatgcttgtatctgtggttaagaggtagcatctgccaggcgcggtggctcatgcctgtaatcccagtactttgcgaggccgaggcgggtggttcacctgaggtcaggagtttgagaccagcctgaccaacatggcgaaaccccgtctctactaaaaatataaaaattagccgaggctgggcgcggtggctcacgcctgtaatcccagcactttgggaggccgaggcgggtggatcacgaggtcaggagatcgagaccatcctggctaacaggatgaaaccccgtctctactaaaaacacaaaattagctgggcatggtggcaggtgcctgtagtcccagctactcgggaggctgaggcaggagaatggcacaaacccgggaggcggagcttgaggcaggagaatggcgtgaacccgggaggcagagcttgctatgagcagagatcgcgccactgcactccagcctgggtgacagagcgagactccgtctcaaaaaaaaaaaaaagagagagataccattccagttgcaatgtggctgcagcagggctaggtggacatgaggagcccagttcagggctgtcacagtagctccagcagcagatgattgtggctgggcctcccaagtgtcacgttggagaaccggagaaggggacttctttgggatgtactctggacttgttgatagattaagtgtaggtggggtgaggaagagaactcaaagatgacaccaggtgttggagctgagccacggggagaagggtgcaaagggaaagcagtgcgggggctgggaggggagagggtcagtcctgttttgcttgtgctgcatctgaggagcccctcacctgtggaaggagagcagtcccagaggcagtggggtgtgcagttctggaacttagaagaatgatcagggggctgggtgcagtggctcacgcctgtaatcccagcactttgggaggccgaggcgggcggatcaagaggtcaggagattgagaccatcctggctaacatggtgaaaccccgtctctactaaaaatataaaaaattagcagcgcatggtggcaggcacctgtagtcccagctattcaggaggctgaggcaggagagtggcgtgaacccgggagacggagcttgcagtgagctgagattgcgccactgcactccagcctgggcgacagagcgagactccgtctcaaaaaaaaaaaaaacaaaaaattatcaggaataaagatactgggaattcaaccacaaaaaccacaaagtcacgaatgcagagtgagagtcttcagagagagggcagaggcccaggatggcacagagggagagagaagccaccaagatggcagggagccatggccagagagaaaagcaaaccaggcgcctgtggcaccatggaagcagcaggtgatgctggagaagcgtttccatgcagtgacagctgccagagccagattattatggcctgagggctggtggtgctgcagttgggggggaatggagaccgcagcgggggaatggagaccgcaggggcggcaactcctcccagaggttcagtttggaggaaaaagagacagaaggaagggtaaccaaaggatattagaggtcaaggaggggtttattatttctagctggtcaaagtagaatgtggtaaaacccaataaagtaacagcaaataacaaagaggggcttttaatggaaagctgcagtgcctgcccctcacctccctagccccactcctcagaagcagccccctggagcggtttctctttctgctgcttttggaggctacttctgtctctgtaaaggaacttctgtctctgtaaaggaacaagcagaggccacagtgtcttggcaaatgaccgtggcattgtttatcccaacctgctctgagagatggggactctgctgattcacccctcgtccctgcctctttagttccttcagcaaagaactaataatatgtcattaaggcaaaggcagtatttggcacacttggcttctgtgttccaaaaaattccctttttctccaagcgtagattttaatatggtatttaagtatcaaagtgatttgacacaagtgacacaagtgagcagtagtagcatttgcaaaagctacaaatgatgaagtcttgctccaaaagcatattattattattttttaaattccagtttcaagctcaatggataggttgcgtcagtgggttttagtagagaaggggccagtacctatgaagactcccctgtactattacacatgctgcgtcccaagtagggaaactccagtgggtcatcaccccctccctctagcccaagtgggctgctgggtcagggcactgtttgggttgggttgagattcctggatccctaactagcaccttccaaagaatcggccttgcagagaacaaagttcattgccaaaggtattcccaatgtctgtctctcgctctgtgatagggcttctttactccccactttataagatgaggatatctgctataccccattccttcaacctctccacctctttcctcttttgtctgccatgtgattacttttccatcaccaaggttgatgagatccttactgtgtacttactgtctccaagcatccccaggcttccagccagcacgcagcagccaacattggcttcagaaggaaggaggtttgcatttccttctcttgggtccagtgccatggtctcagggttatctccaatgtggaaagttgctagaccaggagcagtttgactccactgtttttcagtctagcaagtttgagtttttcccaagctcttgatgtgtgttcaaatgaatgttctccctttcccaagagacctccctataagggagggtctagtttcccggggtgccctgagaagaaggggtcagcaggggggaggaatggtggaggctgaggcctcaggcaggtgccctgtgaggagtggctgtgacaagcggctgagatcccagcaaagggttgttgcccagaatctggggcctaagcgaggttggaaatcacaaatgcacttggtttctctagcagctggcacatagtaggatcagcccaggagtggcaccttcaaagagaaaggaacgcatgaggctccgagagcggtcggctggcagccagggcctggctggggagggagggcaggtggtgcgctgacctggggatctttgagagtgtgcaggagtatgtggctgaagcggcccagctggtgagccactgaagatgggggtcataggtagatggaggaattgccaggtcagaatctcggtaggagatgacttgagctgatgctgcctggcacataggggtttagaagatattaggaaggaagccccacagcgtgcccaagtgccatgcaggccctggagacggtcattggagggcgtctgtggatggcgcagtgggggatgggaagtccctaatctgctggggctttcccagcaagcagggactgagggggatagtccccaacacatgggccccagggagaagggcctgtttcattgaggtttggagagtgttgagggtaagctaacctgtcaccccacgcccccgagaatggttactgatagggagaggccttttccttgcaggagatggcgtctaccagaaggggatggacttcattttggagaagctcaaccatggggactgggtgcatatcttcccagaaggtcagcagggctgactgggtcgagcccccccagtatgagcgggatgggctcccaagcctcgcctctgtgctctctcaccagggaaagtgaacatgagttccgaattcctgcgtttcaagtggggtaagggctgctggtctctggccacagccatcctcccggcccagagatggccctgtgggcccctggctcccgccccctcgggctggcttgtatgggggtagatgggcgtgtttgtagcgccaggaaggggacaggtgctgagactaggcctgcctctcgcaggggcttgcccaagggagctgaattgaactggaggatgtcgggggtggcagtggccagaggctggcacagaagcttggctcagggcccagcttatgctaacatttctacctcccccctgggcaggaatcgggcgc

SEQ ID NO: 14405 - DNA, 1109 bp, Homo sapiens
caccggcgcaggttcgctttccggcggttgcaccgggccggggtgccagcgcccgccttcccgtttcctcccgttccgcagcgcgcccacggcctgtgaccccggcgaccgctccccagtgacgagagagcggggccgggcgctgctccggcctgacctgcgaagggacctcggtccagtcccctgttgcgccgcgcccccgtccgtccgtgcgcgggccagtcaggggccagtgtctcgagcggtcgaggtcgcagacctagaggcgccccacaggccggcccggggcgctgggagcgccggccgcgggccgggtggggatgcctctgcacgtgaagtggccgttccccgcggtgccgccgctcacctggaccctggccagcagcgtcgtcatgggcttggtgggcacctacagctgcttctggaccaagtacatgaaccacctgaccgtgcacaacagggaggtgctgtacgagctcatcgagaagcgaggcccggccacgcccctcatcaccgtgtccaatcaccagtcctgcatggacgaccctcatctctgggggatcctgaaactccgccacatctggaacctgaagttgatgcgttggacccctgcagctgcagacatctgcttcaccaaggagctacactcccacttcttcagcttgggcaagtgtgtgcctgtgtgccgaggagatggcgtctaccagaaggggatggacttcattttggagaagctcaaccatggggactgggtgcatatcttcccagaagggaaagtgaacatgagttccgaattcctgcgtttcaagtggggtaagggctgctggtctctggccacagccatcctcccggcccagagatggccctgtgggcccctggctcccgccccctcgggctggcttgtatgggggtagatgggcgtgtttgtagcgccaggaaggggacaggtgctgagactaggcctgcctctcgcaggggcttgcccaagggagctgaattgaactggaggatgtcgggggtggcagtggccagaggctggcacagaagcttggctcagggcccagcttatgctaacatttctacctcccccctgggcaggaatcgggcgc

SEQ ID NO: 14406 - DNA, 9428 bp, Homo sapiens
gtgaccccggcgaccgctccccagtgacgagagagcggggccgggcgctgctccggcctgacctgcgaagggacctcggtccagtcccctgttgcgccgcgcccccgtccgtccgtgcgcgggccagtcaggggccagtgtctcgagcggtcgaggtcgcagacctagaggcgccccacaggccggcccggggcgctgggagcgccggccgcgggccgggtggggatgcctctgcacgtgaagtggccgttccccgcggtgccgccgctcacctggaccctggccagcagcgtcgtcatgggcttggtgggcacctacagctgcttctggaccagtgagtgggcccaggccgaggcaggcccgcccgggtacccatgcccggccggaggtgggacttagggtgggggacgccgcggccccgacctagcgggcgagcccggagcgcctgacttctccttccccgccagagtacatgaaccacctgaccgtgcacaacagggaggtgctgtacgagctcatcgagaagcgaggcccggccacgcccctcatcaccgtgtccaatcaccagtcctgcatggacgaccctcatctctggggtacccgggccagtgtgctgggcagggggaggaaaggcgaggattcgggacgggcccagcctcgtcagaacaaaccccttctcgctgccttttcatggagccctggcactccggtttccgggcgttctgccccagggctgagacttggatttgtggctcctgcagcatccctgagggagcatgatttggagagggccttgggcatggagcaggaccaaggaacggccacagggcatatcttacagctcctttaacgtcaggcctccagaaccctctgttctctaaaccatccagggccccacagtcttgggaaaaatttgggggttggacataggatatcctgtgaggaagttctgggccagggactggaagcccagtgtcctggcttcaggtttgcccctggctgggcgtgtaccgttcagccctatttgggagcctggttgccacacctagaggttcctgctctgctgacttcacaggaagttgcttggctctggtaaccagatggccgggtggaggggtgcctggggcttccactcctgaacagagagcttaactgtcctagagttcatggggagccacctagccacactggagcccttcagagctcaccctggctgctgggtggagaaaggcctatagatgtcacaggtggatcctgggaggccaggaaggaggacttggagccatccactagcctagactgggctggttgcagtgacagtacagggagaagtatagaagaatgggcattgtccaagtatgttggggaggtaggcagtccaggtgcagtgattagtaagatgtggagggtgggggagagggaggagccagggagaactgaatgatctggcctaagggtctgaaagatgccactttgggctgtagggaaatggtagtgctgctgtccctcattccctgagatggggtgaaggaagggcactccctggggatatgggaagttggggcatgaagcctttcctgtcctctagggatcctgaaactccgccacatctggaacctgaagttgatgcgttggtgaggaggaatgggcccctcgaagtgggccgggccggccccacctgcctctgcccagatttgccctcctcctgctctgcccaggaggtggcgtccagcagtccaggcagggcatggggtggggccccgcaggccctcccctgtgcctcccttctgcatgctgatgctgggggcagggtggtggagcggggtgcagggggcaggactaattgcatctgtccctgcttaggacccctgcagctgcagacatctgcttcaccaaggagctacactcccacttcttcagcttgggcaagtgtgtgcctgtgtgccgaggtgagctgctcctccagcgagtgcagggaggcacttctggggcaggaaagctggtggccagtgtctctgttttggagggacctatgggggtaggcatcccgggagccaacatgaggcccagctccatcacatgccagcagaggggacagaggctgtgggaggagggatgggtccttggaaagtcctcaactctctgcaactgcccagggatcctgtggacctggagccttggcattagaattcaaggaggcattatccataaccccttctctcagggatgtcactaagagactcattgagaacagtgcgttgtcattggtccatggtggcagtagcatgtacctgcaggccagagggttttgcttctaggagaacaaacaggcttgtggggtgagaaccccaggggataggggccattttgatccctattctccagacagggaggatcacagagattaagctgctggcccaaggtcatggggtaggaggtggcaaagccaggatttgaatccagattgctccttcctctgcaggagcagaatttttccaagcagagaatgaggggaaaggtgttctagacacaggcaggcacatgccaggtgctggaaaaagaagagagaaaggtaagccaggcatagcggttcacacttgtcatcccagcactttgtgaggtcgaggtgagaggatcactcaagcccaggagtttgagaccagcctgggcaacatagtaagaccctgtctctttaaaaataaaaatattttaaacaaaagaaaggtagaaaatatgagttgtatgtagaatatgaaggttctagaataatcctattaagaattttggattctggctgggcgcggtggctcacgcctgtaatcccagcactttgggaggctgaggccagcggatcacgaggtcaggagatcgagaccatcctggctaacacggtgaaaccccgtctctactaaaaatacaaaaaattagctgggcatggtagtgggcgcctgtagtcccagctactcgggaggctgaggcaggagaatggcgtgaacccggaaggtggagcttgcagtgagccaagatcacgccactgcactccagcctgggtgacagagtgagactccgtctcaaaaaaaaaaaaaaaagtgccggccacggtggctcatgcctgtaatcccagcactctgggaggccgaggcgggcggatcacgaggtcaggaattcgagaccagcctaaccaacatggtgaaaccccgtctctactaaaaatacaaaaattagccgggcgtggtggtgtgtgcctgtaatctcagctacttgggagactgagacgggagcattgcttgaacccgggaggtggaggttgtggtgagctgagatcctgccattgcactccagcctgggcaataagagcgaaactccgtctggaaaaaaaaaaaaaaaaaaagaattttgaattagctggctgcattggtgcatgcctacagtcccagctcctcaggaggctgaggtgggaggatcacttgagccctcgattttctttttccttgagacaatgtctgtttctgttgtccaggctggagtgccgtggcgtgatgatggctcactgcagcttctgtttcctgggttcaagggatcctgtcacctcagcctcctgagcagctgggactaaggagtgtgcccagctaattcttttttttttttggtagagttggggtcttactacattgccagggctggtcttgaactcctagactcaagcgatcctcccgcctcagcctctcaaagtgctgggatcacaggcatgagccattgtgcccaacccagcccaggaatttgaggccagcctgagcaatatagtgagaccccaggtatagatagataggtagatagataggtaggtaggtaggtagatagatagataggtaggtgggtaggtaggtgggtagataggtaggtaggtacgtaggtagatagatagatagatacatacatacatagatagataagatagatagattgattagatagattagatagccaggtggggtggctcacgcctgtaatcccagtgctttgggaggctgaggtgggtggatcacctgaggtcaggagtttgagaccagcctggctaatgtggcgaaaccctgtctactaaaaatacaaaaattagctggatgtggtggcgcacgcctgtaatctcagctactcgggaggctggggtgggagaatcgcttgaacccaggaggtggaggttgcagtgagctgagatcatgccactgcactccagcctgggccacagagggagacctggtctcaaaaaaaaaaaaaaaaaaaaaaaagatttttgtatttgactgtgctctctcatccaggtggtgacatgcttgtatctgtggttaagaggtagcatctgccaggcgcggtggctcatgcctgtaatcccagtactttgcgaggccgaggcgggtggttcacctgaggtcaggagtttgagaccagcctgaccaacatggcgaaaccccgtctctactaaaaatataaaaattagccgaggctgggcgcggtggctcacgcctgtaatcccagcactttgggaggccgaggcgggtggatcacgaggtcaggagatcgagaccatcctggctaacaggatgaaaccccgtctctactaaaaacacaaaattagctgggcatggtggcaggtgcctgtagtcccagctactcgggaggctgaggcaggagaatggcacaaacccgggaggcggagcttgaggcaggagaatggcgtgaacccgggaggcagagcttgctatgagcagagatcgcgccactgcactccagcctgggtgacagagcgagactccgtctcaaaaaaaaaaaaaagagagagataccattccagttgcaatgtggctgcagcagggctaggtggacatgaggagcccagttcagggctgtcacagtagctccagcagcagatgattgtggctgggcctcccaagtgtcacgttggagaaccggagaaggggacttctttgggatgtactctggacttgttgatagattaagtgtaggtggggtgaggaagagaactcaaagatgacaccaggtgttggagctgagccacggggagaagggtgcaaagggaaagcagtgcgggggctgggaggggagagggtcagtcctgttttgcttgtgctgcatctgaggagcccctcacctgtggaaggagagcagtcccagaggcagtggggtgtgcagttctggaacttagaagaatgatcagggggctgggtgcagtggctcacgcctgtaatcccagcactttgggaggccgaggcgggcggatcaagaggtcaggagattgagaccatcctggctaacatggtgaaaccccgtctctactaaaaatataaaaaattagcagcgcatggtggcaggcacctgtagtcccagctattcaggaggctgaggcaggagagtggcgtgaacccgggagacggagcttgcagtgagctgagattgcgccactgcactccagcctgggcgacagagcgagactccgtctcaaaaaaaaaaaaaacaaaaaattatcaggaataaagatactgggaattcaaccacaaaaaccacaaagtcacgaatgcagagtgagagtcttcagagagagggcagaggcccaggatggcacagagggagagagaagccaccaagatggcagggagccatggccagagagaaaagcaaaccaggcgcctgtggcaccatggaagcagcaggtgatgctggagaagcgtttccatgcagtgacagctgccagagccagattattatggcctgagggctggtggtgctgcagttgggggggaatggagaccgcagcgggggaatggagaccgcaggggcggcaactcctcccagaggttcagtttggaggaaaaagagacagaaggaagggtaaccaaaggatattagaggtcaaggaggggtttattatttctagctggtcaaagtagaatgtggtaaaacccaataaagtaacagcaaataacaaagaggggcttttaatggaaagctgcagtgcctgcccctcacctccctagccccactcctcagaagcagccccctggagcggtttctctttctgctgcttttggaggctacttctgtctctgtaaaggaacttctgtctctgtaaaggaacaagcagaggccacagtgtcttggcaaatgaccgtggcattgtttatcccaacctgctctgagagatggggactctgctgattcacccctcgtccctgcctctttagttccttcagcaaagaactaataatatgtcattaaggcaaaggcagtatttggcacacttggcttctgtgttccaaaaaattccctttttctccaagcgtagattttaatatggtatttaagtatcaaagtgatttgacacaagtgacacaagtgagcagtagtagcatttgcaaaagctacaaatgatgaagtcttgctccaaaagcatattattattattttttaaattccagtttcaagctcaatggataggttgcgtcagtgggttttagtagagaaggggccagtacctatgaagactcccctgtactattacacatgctgcgtcccaagtagggaaactccagtgggtcatcaccccctccctctagcccaagtgggctgctgggtcagggcactgtttgggttgggttgagattcctggatccctaactagcaccttccaaagaatcggccttgcagagaacaaagttcattgccaaaggtattcccaatgtctgtctctcgctctgtgatagggcttctttactccccactttataagatgaggatatctgctataccccattccttcaacctctccacctctttcctcttttgtctgccatgtgattacttttccatcaccaaggttgatgagatccttactgtgtacttactgtctccaagcatccccaggcttccagccagcacgcagcagccaacattggcttcagaaggaaggaggtttgcatttccttctcttgggtccagtgccatggtctcagggttatctccaatgtggaaagttgctagaccaggagcagtttgactccactgtttttcagtctagcaagtttgagtttttcccaagctcttgatgtgtgttcaaatgaatgttctccctttcccaagagacctccctataagggagggtctagtttcccggggtgccctgagaagaaggggtcagcaggggggaggaatggtggaggctgaggcctcaggcaggtgccctgtgaggagtggctgtgacaagcggctgagatcccagcaaagggttgttgcccagaatctggggcctaagcgaggttggaaatcacaaatgcacttggtttctctagcagctggcacatagtaggatcagcccaggagtggcaccttcaaagagaaaggaacgcatgaggctccgagagcggtcggctggcagccagggcctggctggggagggagggcaggtggtgcgctgacctggggatctttgagagtgtgcaggagtatgtggctgaagcggcccagctggtgagccactgaagatgggggtcataggtagatggaggaattgccaggtcagaatctcggtaggagatgacttgagctgatgctgcctggcacataggggtttagaagatattaggaaggaagccccacagcgtgcccaagtgccatgcaggccctggagacggtcattggagggcgtctgtggatggcgcagtgggggatgggaagtccctaatctgctggggctttcccagcaagcagggactgagggggatagtccccaacacatgggccccagggagaagggcctgtttcattgaggtttggagagtgttgagggtaagctaacctgtcaccccacgcccccgagaatggttactgatagggagaggccttttccttgcaggagatggcgtctaccagaaggggatggacttcattttggagaagctcaaccatggggactgggtgcatatcttcccagaaggtcagcagggctgactgggtcgagcccccccagtatgagcgggatgggctcccaagcctcgcctctgtgctctctcaccagggaaagtgaacatgagttccgaattcctgcgtttcaagtggggtaagggctgctggtctctggccacagccatcctcccggcccagagatggccctgtgggcccctggctcccgccccctcgggctggcttgtatgggggtagatgggcgtgtttgtagcgccaggaaggggacaggtgctgagactaggcctgcctctcgcaggggcttgcccaagggagctgaattgaactggaggatgtcgggggtggcagtggccagaggctggcacagaagcttggctcagggcccagcttatgctaacatttctacctcccccctgggcaggaatcgggcgcctgattgctgagtgtcatctcaaccccatcatcctgcccctgtggcatgtcggtgagcctggggacggggacagagagatggcatctggggtggggggcctgggactccctctggtcccaggctgccctgctccaccccacgtctggccttctgtccactgtgctgcaggaatgaatgacgtccttcctaacagtccgccctacttcccccgctttggacaggtgggtggggactgctgaccttcggctgtctgcctgtctgctgtctgctccgtgtctcccactcagcactatggaggccagctgcaggaggagctgagcatgaggctacagcaggggacagagtggaacatagacagggacttcctggcaccgagacattaaaatgagagcagaggaagtcaggctggggcagaggtgggctgtggggtcaggacaggacaggtcatctacagcacaggacccaggaccaggaccttgttttagaggaagagtggcccctggggagtgtgtggcacagcagggccggggcttagcttctggctcccgggttgcttgggctggggctgtgggcactcctactgctcctcatcactcttggcggccaccccacagaaaatcactgtgctgatcgggaagcccttcagtgccctgcctgtactcgagcggctccgggcggagaacaagtcggctgtgagtttcctcctgggtcccccgtagctgtccccggaccccctgctgctggcttccagcagggtgcctccaccctctccatcccgtcaccctcccagggcaccctcccagggcaccttggccaagcttcccgaggggtgcaggccatccctggtcctttccctcaggtggagatgcggaaagccctgacggacttcattcaagaggaattccagcatctgaagactcaggcagagcagctccacaaccacctccagcctgggagataggccttgcttgctgccttctggattcttggcccgcacagagct

SEQ ID NO: 14407 - DNA, 2268 bp, Homo sapiens
gtgaccccggcgaccgctccccagtgacgagagagcggggccgggcgctgctccggcctgacctgcgaagggacctcggtccagtcccctgttgcgccgcgcccccgtccgtccgtgcgcgggccagtcaggggccagtgtctcgagcggtcgaggtcgcagacctagaggcgccccacaggccggcccggggcgctgggagcgccggccgcgggccgggtggggatgcctctgcacgtgaagtggccgttccccgcggtgccgccgctcacctggaccctggccagcagcgtcgtcatgggcttggtgggcacctacagctgcttctggaccagtgagtgggcccaggccgaggcaggcccgcccgggtacccatgcccggccggaggtgggacttagggtgggggacgccgcggccccgacctagcgggcgagcccggagcgcctgacttctccttccccgccagagtacatgaaccacctgaccgtgcacaacagggaggtgctgtacgagctcatcgagaagcgaggcccggccacgcccctcatcaccgtgtccaatcaccagtcctgcatggacgaccctcatctctggggtacccgggccagtgtgctgggcagggggaggaaaggcgaggattcgggacgggcccagcctcgtcagaacaaaccccttctcgctgccttttcatggagccctggcactccggtttccgggcgttctgccccagggctgagacttggatttgtggctcctgcagcatccctgagggagcatgatttggagagggccttgggcatggagcaggaccaaggaacggccacagggcatatcttacagctcctttaacgtcaggcctccagaaccctctgttctctaaaccatccagggccccacagtcttgggaaaaatttgggggttggacataggatatcctgtgaggaagttctgggccagggactggaagcccagtgtcctggcttcaggtttgcccctggctgggcgtgtaccgttcagccctatttgggagcctggttgccacacctagaggttcctgctctgctgacttcacaggaagttgcttggctctggtaaccagatggccgggtggaggggtgcctggggcttccactcctgaacagagagcttaactgtcctagagttcatggggagccacctagccacactggagcccttcagagctcaccctggctgctgggtggagaaaggcctatagatgtcacaggtggatcctgggaggccaggaaggaggacttggagccatccactagcctagactgggctggttgcagtgacagtacagggagaagtatagaagaatgggcattgtccaagtatgttggggaggtaggcagtccaggtgcagtgattagtaagatgtggagggtgggggagagggaggagccagggagaactgaatgatctggcctaagggtctgaaagatgccactttgggctgtagggaaatggtagtgctgctgtccctcattccctgagatggggtgaaggaagggcactccctggggatatgggaagttggggcatgaagcctttcctgtcctctagggatcctgaaactccgccacatctggaacctgaagttgatgcgttggtgaggaggaatgggcccctcgaagtgggccgggccggccccacctgcctctgcccagatttgccctcctcctgctctgcccaggaggacccctgcagctgcagacatctgcttcaccaaggagctacactcccacttcttcagcttgggcaagtgtgtgcctgtgtgccgaggagatggcgtctaccagaaggggatggacttcattttggagaagctcaaccatggggactgggtgcatatcttcccagaagggaaagtgaacatgagttccgaattcctgcgtttcaagtggggaatcgggcgcctgattgctgagtgtcatctcaaccccatcatcctgcccctgtggcatgtcggaatgaatgacgtccttcctaacagtccgccctacttcccccgctttggacagaaaatcactgtgctgatcgggaagcccttcagtgccctgcctgtactcgagcggctccgggcggagaacaagtcggctgtggagatgcggaaagccctgacggacttcattcaagaggaattccagcatctgaagactcaggcagagcagctccacaaccacctccagcctgggagataggccttgcttgctgccttctggattcttggcccgcacagagct

SEQ ID NO: 14408 - DNA, 9889 bp, Homo sapiens
cgtttcctcccgttccgcagcgcgcccacggcctgtgaccccggcgaccgctccccagtgacgagagagcggggccgggcgctgctccggcctgacctgcgaagggacctcggtccagtcccctgttgcgccgcgcccccgtccgtccgtgcgcgggccagtcaggggccagtgtctcgagcggtcgaggtcgcagacctagaggcgccccacaggccggcccggggcgctgggagcgccggccgcgggccgggtggggatgcctctgcacgtgaagtggccgttccccgcggtgccgccgctcacctggaccctggccagcagcgtcgtcatgggcttggtgggcacctacagctgcttctggaccagtgagtgggcccaggccgaggcaggcccgcccgggtacccatgcccggccggaggtgggacttagggtgggggacgccgcggccccgacctagcgggcgagcccggagcgcctgacttctccttccccgccagagtacatgaaccacctgaccgtgcacaacagggaggtgctgtacgagctcatcgagaagcgaggcccggccacgcccctcatcaccgtgtccaatcaccagtcctgcatggacgaccctcatctctggggtacccgggccagtgtgctgggcagggggaggaaaggcgaggattcgggacgggcccagcctcgtcagaacaaaccccttctcgctgccttttcatggagccctggcactccggtttccgggcgttctgccccagggctgagacttggatttgtggctcctgcagcatccctgagggagcatgatttggagagggccttgggcatggagcaggaccaaggaacggccacagggcatatcttacagctcctttaacgtcaggcctccagaaccctctgttctctaaaccatccagggccccacagtcttgggaaaaatttgggggttggacataggatatcctgtgaggaagttctgggccagggactggaagcccagtgtcctggcttcaggtttgcccctggctgggcgtgtaccgttcagccctatttgggagcctggttgccacacctagaggttcctgctctgctgacttcacaggaagttgcttggctctggtaaccagatggccgggtggaggggtgcctggggcttccactcctgaacagagagcttaactgtcctagagttcatggggagccacctagccacactggagcccttcagagctcaccctggctgctgggtggagaaaggcctatagatgtcacaggtggatcctgggaggccaggaaggaggacttggagccatccactagcctagactgggctggttgcagtgacagtacagggagaagtatagaagaatgggcattgtccaagtatgttggggaggtaggcagtccaggtgcagtgattagtaagatgtggagggtgggggagagggaggagccagggagaactgaatgatctggcctaagggtctgaaagatgccactttgggctgtagggaaatggtagtgctgctgtccctcattccctgagatggggtgaaggaagggcactccctggggatatgggaagttggggcatgaagcctttcctgtcctctagggatcctgaaactccgccacatctggaacctgaagttgatgcgttggtgaggaggaatgggcccctcgaagtgggccgggccggccccacctgcctctgcccagatttgccctcctcctgctctgcccaggaggtggcgtccagcagtccaggcagggcatggggtggggccccgcaggccctcccctgtgcctcccttctgcatgctgatgctgggggcagggtggtggagcggggtgcagggggcaggactaattgcatctgtccctgcttaggacccctgcagctgcagacatctgcttcaccaaggagctacactcccacttcttcagcttgggcaagtgtgtgcctgtgtgccgaggtgagctgctcctccagcgagtgcagggaggcacttctggggcaggaaagctggtggccagtgtctctgttttggagggacctatgggggtaggcatcccgggagccaacatgaggcccagctccatcacatgccagcagaggggacagaggctgtgggaggagggatgggtccttggaaagtcctcaactctctgcaactgcccagggatcctgtggacctggagccttggcattagaattcaaggaggcattatccataaccccttctctcagggatgtcactaagagactcattgagaacagtgcgttgtcattggtccatggtggcagtagcatgtacctgcaggccagagggttttgcttctaggagaacaaacaggcttgtggggtgagaaccccaggggataggggccattttgatccctattctccagacagggaggatcacagagattaagctgctggcccaaggtcatggggtaggaggtggcaaagccaggatttgaatccagattgctccttcctctgcaggagcagaatttttccaagcagagaatgaggggaaaggtgttctagacacaggcaggcacatgccaggtgctggaaaaagaagagagaaaggtaagccaggcatagcggttcacacttgtcatcccagcactttgtgaggtcgaggtgagaggatcactcaagcccaggagtttgagaccagcctgggcaacatagtaagaccctgtctctttaaaaataaaaatattttaaacaaaagaaaggtagaaaatatgagttgtatgtagaatatgaaggttctagaataatcctattaagaattttggattctggctgggcgcggtggctcacgcctgtaatcccagcactttgggaggctgaggccagcggatcacgaggtcaggagatcgagaccatcctggctaacacggtgaaaccccgtctctactaaaaatacaaaaaattagctgggcatggtagtgggcgcctgtagtcccagctactcgggaggctgaggcaggagaatggcgtgaacccggaaggtggagcttgcagtgagccaagatcacgccactgcactccagcctgggtgacagagtgagactccgtctcaaaaaaaaaaaaaaaagtgccggccacggtggctcatgcctgtaatcccagcactctgggaggccgaggcgggcggatcacgaggtcaggaattcgagaccagcctaaccaacatggtgaaaccccgtctctactaaaaatacaaaaattagccgggcgtggtggtgtgtgcctgtaatctcagctacttgggagactgagacgggagcattgcttgaacccgggaggtggaggttgtggtgagctgagatcctgccattgcactccagcctgggcaataagagcgaaactccgtctggaaaaaaaaaaaaaaaaaaagaattttgaattagctggctgcattggtgcatgcctacagtcccagctcctcaggaggctgaggtgggaggatcacttgagccctcgattttctttttccttgagacaatgtctgtttctgttgtccaggctggagtgccgtggcgtgatgatggctcactgcagcttctgtttcctgggttcaagggatcctgtcacctcagcctcctgagcagctgggactaaggagtgtgcccagctaattcttttttttttttggtagagttggggtcttactacattgccagggctggtcttgaactcctagactcaagcgatcctcccgcctcagcctctcaaagtgctgggatcacaggcatgagccattgtgcccaacccagcccaggaatttgaggccagcctgagcaatatagtgagaccccaggtatagatagataggtagatagataggtaggtaggtaggtagatagatagataggtaggtgggtaggtaggtgggtagataggtaggtaggtacgtaggtagatagatagatagatacatacatacatagatagataagatagatagattgattagatagattagatagccaggtggggtggctcacgcctgtaatcccagtgctttgggaggctgaggtgggtggatcacctgaggtcaggagtttgagaccagcctggctaatgtggcgaaaccctgtctactaaaaatacaaaaattagctggatgtggtggcgcacgcctgtaatctcagctactcgggaggctggggtgggagaatcgcttgaacccaggaggtggaggttgcagtgagctgagatcatgccactgcactccagcctgggccacagagggagacctggtctcaaaaaaaaaaaaaaaaaaaaaaaagatttttgtatttgactgtgctctctcatccaggtggtgacatgcttgtatctgtggttaagaggtagcatctgccaggcgcggtggctcatgcctgtaatcccagtactttgcgaggccgaggcgggtggttcacctgaggtcaggagtttgagaccagcctgaccaacatggcgaaaccccgtctctactaaaaatataaaaattagccgaggctgggcgcggtggctcacgcctgtaatcccagcactttgggaggccgaggcgggtggatcacgaggtcaggagatcgagaccatcctggctaacaggatgaaaccccgtctctactaaaaacacaaaattagctgggcatggtggcaggtgcctgtagtcccagctactcgggaggctgaggcaggagaatggcacaaacccgggaggcggagcttgaggcaggagaatggcgtgaacccgggaggcagagcttgctatgagcagagatcgcgccactgcactccagcctgggtgacagagcgagactccgtctcaaaaaaaaaaaaaagagagagataccattccagttgcaatgtggctgcagcagggctaggtggacatgaggagcccagttcagggctgtcacagtagctccagcagcagatgattgtggctgggcctcccaagtgtcacgttggagaaccggagaaggggacttctttgggatgtactctggacttgttgatagattaagtgtaggtggggtgaggaagagaactcaaagatgacaccaggtgttggagctgagccacggggagaagggtgcaaagggaaagcagtgcgggggctgggaggggagagggtcagtcctgttttgcttgtgctgcatctgaggagcccctcacctgtggaaggagagcagtcccagaggcagtggggtgtgcagttctggaacttagaagaatgatcagggggctgggtgcagtggctcacgcctgtaatcccagcactttgggaggccgaggcgggcggatcaagaggtcaggagattgagaccatcctggctaacatggtgaaaccccgtctctactaaaaatataaaaaattagcagcgcatggtggcaggcacctgtagtcccagctattcaggaggctgaggcaggagagtggcgtgaacccgggagacggagcttgcagtgagctgagattgcgccactgcactccagcctgggcgacagagcgagactccgtctcaaaaaaaaaaaaaacaaaaaattatcaggaataaagatactgggaattcaaccacaaaaaccacaaagtcacgaatgcagagtgagagtcttcagagagagggcagaggcccaggatggcacagagggagagagaagccaccaagatggcagggagccatggccagagagaaaagcaaaccaggcgcctgtggcaccatggaagcagcaggtgatgctggagaagcgtttccatgcagtgacagctgccagagccagattattatggcctgagggctggtggtgctgcagttgggggggaatggagaccgcagcgggggaatggagaccgcaggggcggcaactcctcccagaggttcagtttggaggaaaaagagacagaaggaagggtaaccaaaggatattagaggtcaaggaggggtttattatttctagctggtcaaagtagaatgtggtaaaacccaataaagtaacagcaaataacaaagaggggcttttaatggaaagctgcagtgcctgcccctcacctccctagccccactcctcagaagcagccccctggagcggtttctctttctgctgcttttggaggctacttctgtctctgtaaaggaacttctgtctctgtaaaggaacaagcagaggccacagtgtcttggcaaatgaccgtggcattgtttatcccaacctgctctgagagatggggactctgctgattcacccctcgtccctgcctctttagttccttcagcaaagaactaataatatgtcattaaggcaaaggcagtatttggcacacttggcttctgtgttccaaaaaattccctttttctccaagcgtagattttaatatggtatttaagtatcaaagtgatttgacacaagtgacacaagtgagcagtagtagcatttgcaaaagctacaaatgatgaagtcttgctccaaaagcatattattattattttttaaattccagtttcaagctcaatggataggttgcgtcagtgggttttagtagagaaggggccagtacctatgaagactcccctgtactattacacatgctgcgtcccaagtagggaaactccagtgggtcatcaccccctccctctagcccaagtgggctgctgggtcagggcactgtttgggttgggttgagattcctggatccctaactagcaccttccaaagaatcggccttgcagagaacaaagttcattgccaaaggtattcccaatgtctgtctctcgctctgtgatagggcttctttactccccactttataagatgaggatatctgctataccccattccttcaacctctccacctctttcctcttttgtctgccatgtgattacttttccatcaccaaggttgatgagatccttactgtgtacttactgtctccaagcatccccaggcttccagccagcacgcagcagccaacattggcttcagaaggaaggaggtttgcatttccttctcttgggtccagtgccatggtctcagggttatctccaatgtggaaagttgctagaccaggagcagtttgactccactgtttttcagtctagcaagtttgagtttttcccaagctcttgatgtgtgttcaaatgaatgttctccctttcccaagagacctccctataagggagggtctagtttcccggggtgccctgagaagaaggggtcagcaggggggaggaatggtggaggctgaggcctcaggcaggtgccctgtgaggagtggctgtgacaagcggctgagatcccagcaaagggttgttgcccagaatctggggcctaagcgaggttggaaatcacaaatgcacttggtttctctagcagctggcacatagtaggatcagcccaggagtggcaccttcaaagagaaaggaacgcatgaggctccgagagcggtcggctggcagccagggcctggctggggagggagggcaggtggtgcgctgacctggggatctttgagagtgtgcaggagtatgtggctgaagcggcccagctggtgagccactgaagatgggggtcataggtagatggaggaattgccaggtcagaatctcggtaggagatgacttgagctgatgctgcctggcacataggggtttagaagatattaggaaggaagccccacagcgtgcccaagtgccatgcaggccctggagacggtcattggagggcgtctgtggatggcgcagtgggggatgggaagtccctaatctgctggggctttcccagcaagcagggactgagggggatagtccccaacacatgggccccagggagaagggcctgtttcattgaggtttggagagtgttgagggtaagctaacctgtcaccccacgcccccgagaatggttactgatagggagaggccttttccttgcaggagatggcgtctaccagaaggggatggacttcattttggagaagctcaaccatggggactgggtgcatatcttcccagaaggtcagcagggctgactgggtcgagcccccccagtatgagcgggatgggctcccaagcctcgcctctgtgctctctcaccagggaaagtgaacatgagttccgaattcctgcgtttcaagtggggtaagggctgctggtctctggccacagccatcctcccggcccagagatggccctgtgggcccctggctcccgccccctcgggctggcttgtatgggggtagatgggcgtgtttgtagcgccaggaaggggacaggtgctgagactaggcctgcctctcgcaggggcttgcccaagggagctgaattgaactggaggatgtcgggggtggcagtggccagaggctggcacagaagcttggctcagggcccagcttatgctaacatttctacctcccccctgggcaggaatcgggcgcctgattgctgagtgtcatctcaaccccatcatcctgcccctgtggcatgtcggtgagcctggggacggggacagagagatggcatctggggtggggggcctgggactccctctggtcccaggctgccctgctccaccccacgtctggccttctgtccactgtgctgcaggaatgaatgacgtccttcctaacagtccgccctacttcccccgctttggacaggtgggtggggactgctgaccttcggctgtctgcctgtctgctgtctgctccgtgtctcccactcagcactatggaggccagctgcaggaggagctgagcatgaggctacagcaggggacagagtggaacatagacagggacttcctggcaccgagacattaaaatgagagcagaggaagtcaggctggggcagaggtgggctgtggggtcaggacaggacaggtcatctacagcacaggacccaggaccaggaccttgttttagaggaagagtggcccctggggagtgtgtggcacagcagggccggggcttagcttctggctcccgggttgcttgggctggggctgtgggcactcctactgctcctcatcactcttggcggccaccccacagaaaatcactgtgctgatcgggaagcccttcagtgccctgcctgtactcgagcggctccgggcggagaacaagtcggctgtgagtttcctcctgggtcccccgtagctgtccccggaccccctgctgctggcttccagcagggtgcctccaccctctccatcccgtcaccctcccagggcaccctcccagggcaccttggccaagcttcccgaggggtgcaggccatccctggtcctttccctcaggtggagatgcggaaagccctgacggacttcattcaagaggaattccagcatctgaagactcaggcagagcagctccacaaccacctccagcctgggagataggccttgcttgctgccttctggattcttggcccgcacagagctggggctgagggatggactgatgcttttagctcaaacgtggcttttagacagatttgttcatagaccctctcaagtgccctctccgagctggtaggcattccagctcctccgtgcttcctcagttacacaaaggacctcagctgcttctcccacttggccaagcagggaggaagaagcttaggcagggctctctttccttcttgccttcagatgttctctcccaggggctggcttcaggagggagcatagaaggcaggtgagcaaccagttggctaggggagcagggggcccaccagagctgtggagaggggaccctaagactcctcggcctggctcctacccaccgcccttgccgaaccaggagctgctcactacctcctcagggatggccgttggccacgtcttccttctgcctgagcttcccccc

SEQ ID NO: 14409 - DNA, 1937 bp, Homo sapiens
cgtttcctcccgttccgcagcgcgcccacggcctgtgaccccggcgaccgctccccagtgacgagagagcggggccgggcgctgctccggcctgacctgcgaagggacctcggtccagtcccctgttgcgccgcgcccccgtccgtccgtgcgcgggccagtcaggggccagtgtctcgagcggtcgaggtcgcagacctagaggcgccccacaggccggcccggggcgctgggagcgccggccgcgggccgggtggggatgcctctgcacgtgaagtggccgttccccgcggtgccgccgctcacctggaccctggccagcagcgtcgtcatgggcttggtgggcacctacagctgcttctggaccagtgagtgggcccaggccgaggcaggcccgcccgggtacccatgcccggccggagagtacatgaaccacctgaccgtgcacaacagggaggtgctgtacgagctcatcgagaagcgaggcccggccacgcccctcatcaccgtgtccaatcaccagtcctgcatggacgaccctcatctctgggggatcctgaaactccgccacatctggaacctgaagttgatgcgttggacccctgcagctgcagacatctgcttcaccaaggagctacactcccacttcttcagcttgggcaagtgtgtgcctgtgtgccgaggagatggcgtctaccagaaggggatggacttcattttggagaagctcaaccatggggactgggtgcatatcttcccagaaggtcagcagggctgactgggtcgagcccccccagtatgagcgggatgggctcccaagcctcgcctctgtgctctctcaccagggaaagtgaacatgagttccgaattcctgcgtttcaagtggggtaagggctgctggtctctggccacagccatcctcccggcccagagatggccctgtgggcccctggctcccgccccctcgggctggcttgtatgggggtagatgggcgtgtttgtagcgccaggaaggggacaggtgctgagactaggcctgcctctcgcaggggcttgcccaagggagctgaattgaactggaggatgtcgggggtggcagtggccagaggctggcacagaagcttggctcagggcccagcttatgctaacatttctacctcccccctgggcaggaatcgggcgcctgattgctgagtgtcatctcaaccccatcatcctgcccctgtggcatgtcggaatgaatgacgtccttcctaacagtccgccctacttcccccgctttggacagaaaatcactgtgctgatcgggaagcccttcagtgccctgcctgtactcgagcggctccgggcggagaacaagtcggctgtggagatgcggaaagccctgacggacttcattcaagaggaattccagcatctgaagactcaggcagagcagctccacaaccacctccagcctgggagataggccttgcttgctgccttctggattcttggcccgcacagagctggggctgagggatggactgatgcttttagctcaaacgtggcttttagacagatttgttcatagaccctctcaagtgccctctccgagctggtaggcattccagctcctccgtgcttcctcagttacacaaaggacctcagctgcttctcccacttggccaagcagggaggaagaagcttaggcagggctctctttccttcttgccttcagatgttctctcccaggggctggcttcaggagggagcatagaaggcaggtgagcaaccagttggctaggggagcagggggcccaccagagctgtggagaggggaccctaagactcctcggcctggctcctacccaccgcccttgccgaaccaggagctgctcactacctcctcagggatggccgttggccacgtcttccttctgcctgagcttcccccc

SEQ ID NO: 14410 - DNA, 10166 bp, Homo sapiens
ccggggtgccagcgcccgccttcccgtttcctcccgttccgcagcgcgcccacggcctgtgaccccggcgaccgctccccagtgacgagagagcggggccgggcgctgctccggcctgacctgcgaagggacctcggtccagtcccctgttgcgccgcgcccccgtccgtccgtgcgcgggccagtcaggggccagtgtctcgagcggtcgaggtcgcagacctagaggcgccccacaggccggcccggggcgctgggagcgccggccgcgggccgggtggggatgcctctgcacgtgaagtggccgttccccgcggtgccgccgctcacctggaccctggccagcagcgtcgtcatgggcttggtgggcacctacagctgcttctggaccagtgagtgggcccaggccgaggcaggcccgcccgggtacccatgcccggccggaggtgggacttagggtgggggacgccgcggccccgacctagcgggcgagcccggagcgcctgacttctccttccccgccagagtacatgaaccacctgaccgtgcacaacagggaggtgctgtacgagctcatcgagaagcgaggcccggccacgcccctcatcaccgtgtccaatcaccagtcctgcatggacgaccctcatctctggggtacccgggccagtgtgctgggcagggggaggaaaggcgaggattcgggacgggcccagcctcgtcagaacaaaccccttctcgctgccttttcatggagccctggcactccggtttccgggcgttctgccccagggctgagacttggatttgtggctcctgcagcatccctgagggagcatgatttggagagggccttgggcatggagcaggaccaaggaacggccacagggcatatcttacagctcctttaacgtcaggcctccagaaccctctgttctctaaaccatccagggccccacagtcttgggaaaaatttgggggttggacataggatatcctgtgaggaagttctgggccagggactggaagcccagtgtcctggcttcaggtttgcccctggctgggcgtgtaccgttcagccctatttgggagcctggttgccacacctagaggttcctgctctgctgacttcacaggaagttgcttggctctggtaaccagatggccgggtggaggggtgcctggggcttccactcctgaacagagagcttaactgtcctagagttcatggggagccacctagccacactggagcccttcagagctcaccctggctgctgggtggagaaaggcctatagatgtcacaggtggatcctgggaggccaggaaggaggacttggagccatccactagcctagactgggctggttgcagtgacagtacagggagaagtatagaagaatgggcattgtccaagtatgttggggaggtaggcagtccaggtgcagtgattagtaagatgtggagggtgggggagagggaggagccagggagaactgaatgatctggcctaagggtctgaaagatgccactttgggctgtagggaaatggtagtgctgctgtccctcattccctgagatggggtgaaggaagggcactccctggggatatgggaagttggggcatgaagcctttcctgtcctctagggatcctgaaactccgccacatctggaacctgaagttgatgcgttggtgaggaggaatgggcccctcgaagtgggccgggccggccccacctgcctctgcccagatttgccctcctcctgctctgcccaggaggtggcgtccagcagtccaggcagggcatggggtggggccccgcaggccctcccctgtgcctcccttctgcatgctgatgctgggggcagggtggtggagcggggtgcagggggcaggactaattgcatctgtccctgcttaggacccctgcagctgcagacatctgcttcaccaaggagctacactcccacttcttcagcttgggcaagtgtgtgcctgtgtgccgaggtgagctgctcctccagcgagtgcagggaggcacttctggggcaggaaagctggtggccagtgtctctgttttggagggacctatgggggtaggcatcccgggagccaacatgaggcccagctccatcacatgccagcagaggggacagaggctgtgggaggagggatgggtccttggaaagtcctcaactctctgcaactgcccagggatcctgtggacctggagccttggcattagaattcaaggaggcattatccataaccccttctctcagggatgtcactaagagactcattgagaacagtgcgttgtcattggtccatggtggcagtagcatgtacctgcaggccagagggttttgcttctaggagaacaaacaggcttgtggggtgagaaccccaggggataggggccattttgatccctattctccagacagggaggatcacagagattaagctgctggcccaaggtcatggggtaggaggtggcaaagccaggatttgaatccagattgctccttcctctgcaggagcagaatttttccaagcagagaatgaggggaaaggtgttctagacacaggcaggcacatgccaggtgctggaaaaagaagagagaaaggtaagccaggcatagcggttcacacttgtcatcccagcactttgtgaggtcgaggtgagaggatcactcaagcccaggagtttgagaccagcctgggcaacatagtaagaccctgtctctttaaaaataaaaatattttaaacaaaagaaaggtagaaaatatgagttgtatgtagaatatgaaggttctagaataatcctattaagaattttggattctggctgggcgcggtggctcacgcctgtaatcccagcactttgggaggctgaggccagcggatcacgaggtcaggagatcgagaccatcctggctaacacggtgaaaccccgtctctactaaaaatacaaaaaattagctgggcatggtagtgggcgcctgtagtcccagctactcgggaggctgaggcaggagaatggcgtgaacccggaaggtggagcttgcagtgagccaagatcacgccactgcactccagcctgggtgacagagtgagactccgtctcaaaaaaaaaaaaaaaagtgccggccacggtggctcatgcctgtaatcccagcactctgggaggccgaggcgggcggatcacgaggtcaggaattcgagaccagcctaaccaacatggtgaaaccccgtctctactaaaaatacaaaaattagccgggcgtggtggtgtgtgcctgtaatctcagctacttgggagactgagacgggagcattgcttgaacccgggaggtggaggttgtggtgagctgagatcctgccattgcactccagcctgggcaataagagcgaaactccgtctggaaaaaaaaaaaaaaaaaaagaattttgaattagctggctgcattggtgcatgcctacagtcccagctcctcaggaggctgaggtgggaggatcacttgagccctcgattttctttttccttgagacaatgtctgtttctgttgtccaggctggagtgccgtggcgtgatgatggctcactgcagcttctgtttcctgggttcaagggatcctgtcacctcagcctcctgagcagctgggactaaggagtgtgcccagctaattcttttttttttttggtagagttggggtcttactacattgccagggctggtcttgaactcctagactcaagcgatcctcccgcctcagcctctcaaagtgctgggatcacaggcatgagccattgtgcccaacccagcccaggaatttgaggccagcctgagcaatatagtgagaccccaggtatagatagataggtagatagataggtaggtaggtaggtagatagatagataggtaggtgggtaggtaggtgggtagataggtaggtaggtacgtaggtagatagatagatagatacatacatacatagatagataagatagatagattgattagatagattagatagccaggtggggtggctcacgcctgtaatcccagtgctttgggaggctgaggtgggtggatcacctgaggtcaggagtttgagaccagcctggctaatgtggcgaaaccctgtctactaaaaatacaaaaattagctggatgtggtggcgcacgcctgtaatctcagctactcgggaggctggggtgggagaatcgcttgaacccaggaggtggaggttgcagtgagctgagatcatgccactgcactccagcctgggccacagagggagacctggtctcaaaaaaaaaaaaaaaaaaaaaaaagatttttgtatttgactgtgctctctcatccaggtggtgacatgcttgtatctgtggttaagaggtagcatctgccaggcgcggtggctcatgcctgtaatcccagtactttgcgaggccgaggcgggtggttcacctgaggtcaggagtttgagaccagcctgaccaacatggcgaaaccccgtctctactaaaaatataaaaattagccgaggctgggcgcggtggctcacgcctgtaatcccagcactttgggaggccgaggcgggtggatcacgaggtcaggagatcgagaccatcctggctaacaggatgaaaccccgtctctactaaaaacacaaaattagctgggcatggtggcaggtgcctgtagtcccagctactcgggaggctgaggcaggagaatggcacaaacccgggaggcggagcttgaggcaggagaatggcgtgaacccgggaggcagagcttgctatgagcagagatcgcgccactgcactccagcctgggtgacagagcgagactccgtctcaaaaaaaaaaaaaagagagagataccattccagttgcaatgtggctgcagcagggctaggtggacatgaggagcccagttcagggctgtcacagtagctccagcagcagatgattgtggctgggcctcccaagtgtcacgttggagaaccggagaaggggacttctttgggatgtactctggacttgttgatagattaagtgtaggtggggtgaggaagagaactcaaagatgacaccaggtgttggagctgagccacggggagaagggtgcaaagggaaagcagtgcgggggctgggaggggagagggtcagtcctgttttgcttgtgctgcatctgaggagcccctcacctgtggaaggagagcagtcccagaggcagtggggtgtgcagttctggaacttagaagaatgatcagggggctgggtgcagtggctcacgcctgtaatcccagcactttgggaggccgaggcgggcggatcaagaggtcaggagattgagaccatcctggctaacatggtgaaaccccgtctctactaaaaatataaaaaattagcagcgcatggtggcaggcacctgtagtcccagctattcaggaggctgaggcaggagagtggcgtgaacccgggagacggagcttgcagtgagctgagattgcgccactgcactccagcctgggcgacagagcgagactccgtctcaaaaaaaaaaaaaacaaaaaattatcaggaataaagatactgggaattcaaccacaaaaaccacaaagtcacgaatgcagagtgagagtcttcagagagagggcagaggcccaggatggcacagagggagagagaagccaccaagatggcagggagccatggccagagagaaaagcaaaccaggcgcctgtggcaccatggaagcagcaggtgatgctggagaagcgtttccatgcagtgacagctgccagagccagattattatggcctgagggctggtggtgctgcagttgggggggaatggagaccgcagcgggggaatggagaccgcaggggcggcaactcctcccagaggttcagtttggaggaaaaagagacagaaggaagggtaaccaaaggatattagaggtcaaggaggggtttattatttctagctggtcaaagtagaatgtggtaaaacccaataaagtaacagcaaataacaaagaggggcttttaatggaaagctgcagtgcctgcccctcacctccctagccccactcctcagaagcagccccctggagcggtttctctttctgctgcttttggaggctacttctgtctctgtaaaggaacttctgtctctgtaaaggaacaagcagaggccacagtgtcttggcaaatgaccgtggcattgtttatcccaacctgctctgagagatggggactctgctgattcacccctcgtccctgcctctttagttccttcagcaaagaactaataatatgtcattaaggcaaaggcagtatttggcacacttggcttctgtgttccaaaaaattccctttttctccaagcgtagattttaatatggtatttaagtatcaaagtgatttgacacaagtgacacaagtgagcagtagtagcatttgcaaaagctacaaatgatgaagtcttgctccaaaagcatattattattattttttaaattccagtttcaagctcaatggataggttgcgtcagtgggttttagtagagaaggggccagtacctatgaagactcccctgtactattacacatgctgcgtcccaagtagggaaactccagtgggtcatcaccccctccctctagcccaagtgggctgctgggtcagggcactgtttgggttgggttgagattcctggatccctaactagcaccttccaaagaatcggccttgcagagaacaaagttcattgccaaaggtattcccaatgtctgtctctcgctctgtgatagggcttctttactccccactttataagatgaggatatctgctataccccattccttcaacctctccacctctttcctcttttgtctgccatgtgattacttttccatcaccaaggttgatgagatccttactgtgtacttactgtctccaagcatccccaggcttccagccagcacgcagcagccaacattggcttcagaaggaaggaggtttgcatttccttctcttgggtccagtgccatggtctcagggttatctccaatgtggaaagttgctagaccaggagcagtttgactccactgtttttcagtctagcaagtttgagtttttcccaagctcttgatgtgtgttcaaatgaatgttctccctttcccaagagacctccctataagggagggtctagtttcccggggtgccctgagaagaaggggtcagcaggggggaggaatggtggaggctgaggcctcaggcaggtgccctgtgaggagtggctgtgacaagcggctgagatcccagcaaagggttgttgcccagaatctggggcctaagcgaggttggaaatcacaaatgcacttggtttctctagcagctggcacatagtaggatcagcccaggagtggcaccttcaaagagaaaggaacgcatgaggctccgagagcggtcggctggcagccagggcctggctggggagggagggcaggtggtgcgctgacctggggatctttgagagtgtgcaggagtatgtggctgaagcggcccagctggtgagccactgaagatgggggtcataggtagatggaggaattgccaggtcagaatctcggtaggagatgacttgagctgatgctgcctggcacataggggtttagaagatattaggaaggaagccccacagcgtgcccaagtgccatgcaggccctggagacggtcattggagggcgtctgtggatggcgcagtgggggatgggaagtccctaatctgctggggctttcccagcaagcagggactgagggggatagtccccaacacatgggccccagggagaagggcctgtttcattgaggtttggagagtgttgagggtaagctaacctgtcaccccacgcccccgagaatggttactgatagggagaggccttttccttgcaggagatggcgtctaccagaaggggatggacttcattttggagaagctcaaccatggggactgggtgcatatcttcccagaaggtcagcagggctgactgggtcgagcccccccagtatgagcgggatgggctcccaagcctcgcctctgtgctctctcaccagggaaagtgaacatgagttccgaattcctgcgtttcaagtggggtaagggctgctggtctctggccacagccatcctcccggcccagagatggccctgtgggcccctggctcccgccccctcgggctggcttgtatgggggtagatgggcgtgtttgtagcgccaggaaggggacaggtgctgagactaggcctgcctctcgcaggggcttgcccaagggagctgaattgaactggaggatgtcgggggtggcagtggccagaggctggcacagaagcttggctcagggcccagcttatgctaacatttctacctcccccctgggcaggaatcgggcgcctgattgctgagtgtcatctcaaccccatcatcctgcccctgtggcatgtcggtgagcctggggacggggacagagagatggcatctggggtggggggcctgggactccctctggtcccaggctgccctgctccaccccacgtctggccttctgtccactgtgctgcaggaatgaatgacgtccttcctaacagtccgccctacttcccccgctttggacaggtgggtggggactgctgaccttcggctgtctgcctgtctgctgtctgctccgtgtctcccactcagcactatggaggccagctgcaggaggagctgagcatgaggctacagcaggggacagagtggaacatagacagggacttcctggcaccgagacattaaaatgagagcagaggaagtcaggctggggcagaggtgggctgtggggtcaggacaggacaggtcatctacagcacaggacccaggaccaggaccttgttttagaggaagagtggcccctggggagtgtgtggcacagcagggccggggcttagcttctggctcccgggttgcttgggctggggctgtgggcactcctactgctcctcatcactcttggcggccaccccacagaaaatcactgtgctgatcgggaagcccttcagtgccctgcctgtactcgagcggctccgggcggagaacaagtcggctgtgagtttcctcctgggtcccccgtagctgtccccggaccccctgctgctggcttccagcagggtgcctccaccctctccatcccgtcaccctcccagggcaccctcccagggcaccttggccaagcttcccgaggggtgcaggccatccctggtcctttccctcaggtggagatgcggaaagccctgacggacttcattcaagaggaattccagcatctgaagactcaggcagagcagctccacaaccacctccagcctgggagataggccttgcttgctgccttctggattcttggcccgcacagagctggggctgagggatggactgatgcttttagctcaaacgtggcttttagacagatttgttcatagaccctctcaagtgccctctccgagctggtaggcattccagctcctccgtgcttcctcagttacacaaaggacctcagctgcttctcccacttggccaagcagggaggaagaagcttaggcagggctctctttccttcttgccttcagatgttctctcccaggggctggcttcaggagggagcatagaaggcaggtgagcaaccagttggctaggggagcagggggcccaccagagctgtggagaggggaccctaagactcctcggcctggctcctacccaccgcccttgccgaaccaggagctgctcactacctcctcagggatggccgttggccacgtcttccttctgcctgagcttcccccccaccacaggccctttcctcaggcaaggtctggcctcaggtgggccgcaggcgggaaaagcagcccttggccagaagtcaagcccagccacgtggagcctagagtgagggcctgaggtctggctgcttgcccccatgctggcgccaacaacttctccatcctttctgcctctcaacatcacttgaatcctagggcctgggttttcatgtttttgaaacagaaccataaagcatatgtgttggcttgttgtaaaa

SEQ ID NO: 14411 - DNA, 1900 bp, Homo sapiens
ccggggtgccagcgcccgccttcccgtttcctcccgttccgcagcgcgcccacggcctgtgaccccggcgaccgctccccagtgacgagagagcggggccgggcgctgctccggcctgacctgcgaagggacctcggtccagtcccctgttgcgccgcgcccccgtccgtccgtgcgcgggccagtcaggggccagtgtctcgagcggtcgaggtcgcagacctagaggcgccccacaggccggcccggggcgctgggagcgccggccgcgggccgggtggggatgcctctgcacgtgaagtggccgttccccgcggtgccgccgctcacctggaccctggccagcagcgtcgtcatgggcttggtgggcacctacagctgcttctggaccaagtacatgaaccacctgaccgtgcacaacagggaggtgctgtacgagctcatcgagaagcgaggcccggccacgcccctcatcaccgtgtccaatcaccagtcctgcatggacgaccctcatctctgggggatcctgaaactccgccacatctggaacctgaagttgatgcgttggtgaggaggaatgggcccctcgaagtgggccgggccggccccacctgcctctgcccagatttgccctcctcctgctctgcccaggaggtggcgtccagcagtccaggacccctgcagctgcagacatctgcttcaccaaggagctacactcccacttcttcagcttgggcaagtgtgtgcctgtgtgccgaggagatggcgtctaccagaaggggatggacttcattttggagaagctcaaccatggggactgggtgcatatcttcccagaagggaaagtgaacatgagttccgaattcctgcgtttcaagtggggaatcgggcgcctgattgctgagtgtcatctcaaccccatcatcctgcccctgtggcatgtcggaatgaatgacgtccttcctaacagtccgccctacttcccccgctttggacagaaaatcactgtgctgatcgggaagcccttcagtgccctgcctgtactcgagcggctccgggcggagaacaagtcggctgtggagatgcggaaagccctgacggacttcattcaagaggaattccagcatctgaagactcaggcagagcagctccacaaccacctccagcctgggagataggccttgcttgctgccttctggattcttggcccgcacagagctggggctgagggatggactgatgcttttagctcaaacgtggcttttagacagatttgttcatagaccctctcaagtgccctctccgagctggtaggcattccagctcctccgtgcttcctcagttacacaaaggacctcagctgcttctcccacttggccaagcagggaggaagaagcttaggcagggctctctttccttcttgccttcagatgttctctcccaggggctggcttcaggagggagcatagaaggcaggtgagcaaccagttggctaggggagcagggggcccaccagagctgtggagaggggaccctaagactcctcggcctggctcctacccaccgcccttgccgaaccaggagctgctcactacctcctcagggatggccgttggccacgtcttccttctgcctgagcttcccccccaccacaggccctttcctcaggcaaggtctggcctcaggtgggccgcaggcgggaaaagcagcccttggccagaagtcaagcccagccacgtggagcctagagtgagggcctgaggtctggctgcttgcccccatgctggcgccaacaacttctccatcctttctgcctctcaacatcacttgaatcctagggcctgggttttcatgtttttgaaacagaaccataaagcatatgtgttggcttgttgtaaaa

SEQ ID NO: 14412 - DNA, 9161 bp, Homo sapiens
atgcctctgcacgtgaagtggccgttccccgcggtgccgccgctcacctggaccctggccagcagcgtcgtcatgggcttggtgggcacctacagctgcttctggaccagtgagtgggcccaggccgaggcaggcccgcccgggtacccatgcccggccggaggtgggacttagggtgggggacgccgcggccccgacctagcgggcgagcccggagcgcctgacttctccttccccgccagagtacatgaaccacctgaccgtgcacaacagggaggtgctgtacgagctcatcgagaagcgaggcccggccacgcccctcatcaccgtgtccaatcaccagtcctgcatggacgaccctcatctctggggtacccgggccagtgtgctgggcagggggaggaaaggcgaggattcgggacgggcccagcctcgtcagaacaaaccccttctcgctgccttttcatggagccctggcactccggtttccgggcgttctgccccagggctgagacttggatttgtggctcctgcagcatccctgagggagcatgatttggagagggccttgggcatggagcaggaccaaggaacggccacagggcatatcttacagctcctttaacgtcaggcctccagaaccctctgttctctaaaccatccagggccccacagtcttgggaaaaatttgggggttggacataggatatcctgtgaggaagttctgggccagggactggaagcccagtgtcctggcttcaggtttgcccctggctgggcgtgtaccgttcagccctatttgggagcctggttgccacacctagaggttcctgctctgctgacttcacaggaagttgcttggctctggtaaccagatggccgggtggaggggtgcctggggcttccactcctgaacagagagcttaactgtcctagagttcatggggagccacctagccacactggagcccttcagagctcaccctggctgctgggtggagaaaggcctatagatgtcacaggtggatcctgggaggccaggaaggaggacttggagccatccactagcctagactgggctggttgcagtgacagtacagggagaagtatagaagaatgggcattgtccaagtatgttggggaggtaggcagtccaggtgcagtgattagtaagatgtggagggtgggggagagggaggagccagggagaactgaatgatctggcctaagggtctgaaagatgccactttgggctgtagggaaatggtagtgctgctgtccctcattccctgagatggggtgaaggaagggcactccctggggatatgggaagttggggcatgaagcctttcctgtcctctagggatcctgaaactccgccacatctggaacctgaagttgatgcgttggtgaggaggaatgggcccctcgaagtgggccgggccggccccacctgcctctgcccagatttgccctcctcctgctctgcccaggaggtggcgtccagcagtccaggcagggcatggggtggggccccgcaggccctcccctgtgcctcccttctgcatgctgatgctgggggcagggtggtggagcggggtgcagggggcaggactaattgcatctgtccctgcttaggacccctgcagctgcagacatctgcttcaccaaggagctacactcccacttcttcagcttgggcaagtgtgtgcctgtgtgccgaggtgagctgctcctccagcgagtgcagggaggcacttctggggcaggaaagctggtggccagtgtctctgttttggagggacctatgggggtaggcatcccgggagccaacatgaggcccagctccatcacatgccagcagaggggacagaggctgtgggaggagggatgggtccttggaaagtcctcaactctctgcaactgcccagggatcctgtggacctggagccttggcattagaattcaaggaggcattatccataaccccttctctcagggatgtcactaagagactcattgagaacagtgcgttgtcattggtccatggtggcagtagcatgtacctgcaggccagagggttttgcttctaggagaacaaacaggcttgtggggtgagaaccccaggggataggggccattttgatccctattctccagacagggaggatcacagagattaagctgctggcccaaggtcatggggtaggaggtggcaaagccaggatttgaatccagattgctccttcctctgcaggagcagaatttttccaagcagagaatgaggggaaaggtgttctagacacaggcaggcacatgccaggtgctggaaaaagaagagagaaaggtaagccaggcatagcggttcacacttgtcatcccagcactttgtgaggtcgaggtgagaggatcactcaagcccaggagtttgagaccagcctgggcaacatagtaagaccctgtctctttaaaaataaaaatattttaaacaaaagaaaggtagaaaatatgagttgtatgtagaatatgaaggttctagaataatcctattaagaattttggattctggctgggcgcggtggctcacgcctgtaatcccagcactttgggaggctgaggccagcggatcacgaggtcaggagatcgagaccatcctggctaacacggtgaaaccccgtctctactaaaaatacaaaaaattagctgggcatggtagtgggcgcctgtagtcccagctactcgggaggctgaggcaggagaatggcgtgaacccggaaggtggagcttgcagtgagccaagatcacgccactgcactccagcctgggtgacagagtgagactccgtctcaaaaaaaaaaaaaaaagtgccggccacggtggctcatgcctgtaatcccagcactctgggaggccgaggcgggcggatcacgaggtcaggaattcgagaccagcctaaccaacatggtgaaaccccgtctctactaaaaatacaaaaattagccgggcgtggtggtgtgtgcctgtaatctcagctacttgggagactgagacgggagcattgcttgaacccgggaggtggaggttgtggtgagctgagatcctgccattgcactccagcctgggcaataagagcgaaactccgtctggaaaaaaaaaaaaaaaaaaagaattttgaattagctggctgcattggtgcatgcctacagtcccagctcctcaggaggctgaggtgggaggatcacttgagccctcgattttctttttccttgagacaatgtctgtttctgttgtccaggctggagtgccgtggcgtgatgatggctcactgcagcttctgtttcctgggttcaagggatcctgtcacctcagcctcctgagcagctgggactaaggagtgtgcccagctaattcttttttttttttggtagagttggggtcttactacattgccagggctggtcttgaactcctagactcaagcgatcctcccgcctcagcctctcaaagtgctgggatcacaggcatgagccattgtgcccaacccagcccaggaatttgaggccagcctgagcaatatagtgagaccccaggtatagatagataggtagatagataggtaggtaggtaggtagatagatagataggtaggtgggtaggtaggtgggtagataggtaggtaggtacgtaggtagatagatagatagatacatacatacatagatagataagatagatagattgattagatagattagatagccaggtggggtggctcacgcctgtaatcccagtgctttgggaggctgaggtgggtggatcacctgaggtcaggagtttgagaccagcctggctaatgtggcgaaaccctgtctactaaaaatacaaaaattagctggatgtggtggcgcacgcctgtaatctcagctactcgggaggctggggtgggagaatcgcttgaacccaggaggtggaggttgcagtgagctgagatcatgccactgcactccagcctgggccacagagggagacctggtctcaaaaaaaaaaaaaaaaaaaaaaaagatttttgtatttgactgtgctctctcatccaggtggtgacatgcttgtatctgtggttaagaggtagcatctgccaggcgcggtggctcatgcctgtaatcccagtactttgcgaggccgaggcgggtggttcacctgaggtcaggagtttgagaccagcctgaccaacatggcgaaaccccgtctctactaaaaatataaaaattagccgaggctgggcgcggtggctcacgcctgtaatcccagcactttgggaggccgaggcgggtggatcacgaggtcaggagatcgagaccatcctggctaacaggatgaaaccccgtctctactaaaaacacaaaattagctgggcatggtggcaggtgcctgtagtcccagctactcgggaggctgaggcaggagaatggcacaaacccgggaggcggagcttgaggcaggagaatggcgtgaacccgggaggcagagcttgctatgagcagagatcgcgccactgcactccagcctgggtgacagagcgagactccgtctcaaaaaaaaaaaaaagagagagataccattccagttgcaatgtggctgcagcagggctaggtggacatgaggagcccagttcagggctgtcacagtagctccagcagcagatgattgtggctgggcctcccaagtgtcacgttggagaaccggagaaggggacttctttgggatgtactctggacttgttgatagattaagtgtaggtggggtgaggaagagaactcaaagatgacaccaggtgttggagctgagccacggggagaagggtgcaaagggaaagcagtgcgggggctgggaggggagagggtcagtcctgttttgcttgtgctgcatctgaggagcccctcacctgtggaaggagagcagtcccagaggcagtggggtgtgcagttctggaacttagaagaatgatcagggggctgggtgcagtggctcacgcctgtaatcccagcactttgggaggccgaggcgggcggatcaagaggtcaggagattgagaccatcctggctaacatggtgaaaccccgtctctactaaaaatataaaaaattagcagcgcatggtggcaggcacctgtagtcccagctattcaggaggctgaggcaggagagtggcgtgaacccgggagacggagcttgcagtgagctgagattgcgccactgcactccagcctgggcgacagagcgagactccgtctcaaaaaaaaaaaaaacaaaaaattatcaggaataaagatactgggaattcaaccacaaaaaccacaaagtcacgaatgcagagtgagagtcttcagagagagggcagaggcccaggatggcacagagggagagagaagccaccaagatggcagggagccatggccagagagaaaagcaaaccaggcgcctgtggcaccatggaagcagcaggtgatgctggagaagcgtttccatgcagtgacagctgccagagccagattattatggcctgagggctggtggtgctgcagttgggggggaatggagaccgcagcgggggaatggagaccgcaggggcggcaactcctcccagaggttcagtttggaggaaaaagagacagaaggaagggtaaccaaaggatattagaggtcaaggaggggtttattatttctagctggtcaaagtagaatgtggtaaaacccaataaagtaacagcaaataacaaagaggggcttttaatggaaagctgcagtgcctgcccctcacctccctagccccactcctcagaagcagccccctggagcggtttctctttctgctgcttttggaggctacttctgtctctgtaaaggaacttctgtctctgtaaaggaacaagcagaggccacagtgtcttggcaaatgaccgtggcattgtttatcccaacctgctctgagagatggggactctgctgattcacccctcgtccctgcctctttagttccttcagcaaagaactaataatatgtcattaaggcaaaggcagtatttggcacacttggcttctgtgttccaaaaaattccctttttctccaagcgtagattttaatatggtatttaagtatcaaagtgatttgacacaagtgacacaagtgagcagtagtagcatttgcaaaagctacaaatgatgaagtcttgctccaaaagcatattattattattttttaaattccagtttcaagctcaatggataggttgcgtcagtgggttttagtagagaaggggccagtacctatgaagactcccctgtactattacacatgctgcgtcccaagtagggaaactccagtgggtcatcaccccctccctctagcccaagtgggctgctgggtcagggcactgtttgggttgggttgagattcctggatccctaactagcaccttccaaagaatcggccttgcagagaacaaagttcattgccaaaggtattcccaatgtctgtctctcgctctgtgatagggcttctttactccccactttataagatgaggatatctgctataccccattccttcaacctctccacctctttcctcttttgtctgccatgtgattacttttccatcaccaaggttgatgagatccttactgtgtacttactgtctccaagcatccccaggcttccagccagcacgcagcagccaacattggcttcagaaggaaggaggtttgcatttccttctcttgggtccagtgccatggtctcagggttatctccaatgtggaaagttgctagaccaggagcagtttgactccactgtttttcagtctagcaagtttgagtttttcccaagctcttgatgtgtgttcaaatgaatgttctccctttcccaagagacctccctataagggagggtctagtttcccggggtgccctgagaagaaggggtcagcaggggggaggaatggtggaggctgaggcctcaggcaggtgccctgtgaggagtggctgtgacaagcggctgagatcccagcaaagggttgttgcccagaatctggggcctaagcgaggttggaaatcacaaatgcacttggtttctctagcagctggcacatagtaggatcagcccaggagtggcaccttcaaagagaaaggaacgcatgaggctccgagagcggtcggctggcagccagggcctggctggggagggagggcaggtggtgcgctgacctggggatctttgagagtgtgcaggagtatgtggctgaagcggcccagctggtgagccactgaagatgggggtcataggtagatggaggaattgccaggtcagaatctcggtaggagatgacttgagctgatgctgcctggcacataggggtttagaagatattaggaaggaagccccacagcgtgcccaagtgccatgcaggccctggagacggtcattggagggcgtctgtggatggcgcagtgggggatgggaagtccctaatctgctggggctttcccagcaagcagggactgagggggatagtccccaacacatgggccccagggagaagggcctgtttcattgaggtttggagagtgttgagggtaagctaacctgtcaccccacgcccccgagaatggttactgatagggagaggccttttccttgcaggagatggcgtctaccagaaggggatggacttcattttggagaagctcaaccatggggactgggtgcatatcttcccagaaggtcagcagggctgactgggtcgagcccccccagtatgagcgggatgggctcccaagcctcgcctctgtgctctctcaccagggaaagtgaacatgagttccgaattcctgcgtttcaagtggggtaagggctgctggtctctggccacagccatcctcccggcccagagatggccctgtgggcccctggctcccgccccctcgggctggcttgtatgggggtagatgggcgtgtttgtagcgccaggaaggggacaggtgctgagactaggcctgcctctcgcaggggcttgcccaagggagctgaattgaactggaggatgtcgggggtggcagtggccagaggctggcacagaagcttggctcagggcccagcttatgctaacatttctacctcccccctgggcaggaatcgggcgcctgattgctgagtgtcatctcaaccccatcatcctgcccctgtggcatgtcggtgagcctggggacggggacagagagatggcatctggggtggggggcctgggactccctctggtcccaggctgccctgctccaccccacgtctggccttctgtccactgtgctgcaggaatgaatgacgtccttcctaacagtccgccctacttcccccgctttggacaggtgggtggggactgctgaccttcggctgtctgcctgtctgctgtctgctccgtgtctcccactcagcactatggaggccagctgcaggaggagctgagcatgaggctacagcaggggacagagtggaacatagacagggacttcctggcaccgagacattaaaatgagagcagaggaagtcaggctggggcagaggtgggctgtggggtcaggacaggacaggtcatctacagcacaggacccaggaccaggaccttgttttagaggaagagtggcccctggggagtgtgtggcacagcagggccggggcttagcttctggctcccgggttgcttgggctggggctgtgggcactcctactgctcctcatcactcttggcggccaccccacagaaaatcactgtgctgatcgggaagcccttcagtgccctgcctgtactcgagcggctccgggcggagaacaagtcggctgtgagtttcctcctgggtcccccgtagctgtccccggaccccctgctgctggcttccagcagggtgcctccaccctctccatcccgtcaccctcccagggcaccctcccagggcaccttggccaagcttcccgaggggtgcaggccatccctggtcctttccctcaggtggagatgcggaaagccctgacggacttcattcaagaggaattccagcatctgaagactcaggcagagcagctccacaaccacctccagcctgggagatag

SEQ ID NO: 14413 - DNA, 891 bp, Homo sapiens
atgcctctgcacgtgaagtggccgttccccgcggtgccgccgctcacctggaccctggccagcagcgtcgtcatgggcttggtgggcacctacagctgcttctggaccagtgagtgggcccaggccgaggcaggcccgcccgggtacccatgcccggccggagagtacatgaaccacctgaccgtgcacaacagggaggtgctgtacgagctcatcgagaagcgaggcccggccacgcccctcatcaccgtgtccaatcaccagtcctgcatggacgaccctcatctctgggggatcctgaaactccgccacatctggaacctgaagttgatgcgttggacccctgcagctgcagacatctgcttcaccaaggagctacactcccacttcttcagcttgggcaagtgtgtgcctgtgtgccgaggagcagaatttttccaagcagagaatgaggggaaaggtgttctagacacaggcaggcacatgccaggtgctggaaaaagaagagagaaaggagatggcgtctaccagaaggggatggacttcattttggagaagctcaaccatggggactgggtgcatatcttcccagaaggaatcgggcgcctgattgctgagtgtcatctcaaccccatcatcctgcccctgtggcatgtcggaatgaatgacgtccttcctaacagtccgccctacttcccccgctttggacagaaaatcactgtgctgatcgggaagcccttcagtgccctgcctgtactcgagcggctccgggcggagaacaagtcggctgtggagatgcggaaagccctgacggacttcattcaagaggaattccagcatctgaagactcaggcagagcagctccacaaccacctccagcctgggagatag

SEQ ID NO: 14414 - DNA, 10139 bp, Homo sapiens
cggggtgccagcgcccgccttcccgtttcctcccgttccgcagcgcgcccacggcctgtgaccccggcgaccgctccccagtgacgagagagcggggccgggcgctgctccggcctgacctgcgaagggacctcggtccagtcccctgttgcgccgcgcccccgtccgtccgtgcgcgggccagtcaggggccagtgtctcgagcggtcgaggtcgcagacctagaggcgccccacaggccggcccggggcgctgggagcgccggccgcgggccgggtggggatgcctctgcacgtgaagtggccgttccccgcggtgccgccgctcacctggaccctggccagcagcgtcgtcatgggcttggtgggcacctacagctgcttctggaccagtgagtgggcccaggccgaggcaggcccgcccgggtacccatgcccggccggaggtgggacttagggtgggggacgccgcggccccgacctagcgggcgagcccggagcgcctgacttctccttccccgccagagtacatgaaccacctgaccgtgcacaacagggaggtgctgtacgagctcatcgagaagcgaggcccggccacgcccctcatcaccgtgtccaatcaccagtcctgcatggacgaccctcatctctggggtacccgggccagtgtgctgggcagggggaggaaaggcgaggattcgggacgggcccagcctcgtcagaacaaaccccttctcgctgccttttcatggagccctggcactccggtttccgggcgttctgccccagggctgagacttggatttgtggctcctgcagcatccctgagggagcatgatttggagagggccttgggcatggagcaggaccaaggaacggccacagggcatatcttacagctcctttaacgtcaggcctccagaaccctctgttctctaaaccatccagggccccacagtcttgggaaaaatttgggggttggacataggatatcctgtgaggaagttctgggccagggactggaagcccagtgtcctggcttcaggtttgcccctggctgggcgtgtaccgttcagccctatttgggagcctggttgccacacctagaggttcctgctctgctgacttcacaggaagttgcttggctctggtaaccagatggccgggtggaggggtgcctggggcttccactcctgaacagagagcttaactgtcctagagttcatggggagccacctagccacactggagcccttcagagctcaccctggctgctgggtggagaaaggcctatagatgtcacaggtggatcctgggaggccaggaaggaggacttggagccatccactagcctagactgggctggttgcagtgacagtacagggagaagtatagaagaatgggcattgtccaagtatgttggggaggtaggcagtccaggtgcagtgattagtaagatgtggagggtgggggagagggaggagccagggagaactgaatgatctggcctaagggtctgaaagatgccactttgggctgtagggaaatggtagtgctgctgtccctcattccctgagatggggtgaaggaagggcactccctggggatatgggaagttggggcatgaagcctttcctgtcctctagggatcctgaaactccgccacatctggaacctgaagttgatgcgttggtgaggaggaatgggcccctcgaagtgggccgggccggccccacctgcctctgcccagatttgccctcctcctgctctgcccaggaggtggcgtccagcagtccaggcagggcatggggtggggccccgcaggccctcccctgtgcctcccttctgcatgctgatgctgggggcagggtggtggagcggggtgcagggggcaggactaattgcatctgtccctgcttaggacccctgcagctgcagacatctgcttcaccaaggagctacactcccacttcttcagcttgggcaagtgtgtgcctgtgtgccgaggtgagctgctcctccagcgagtgcagggaggcacttctggggcaggaaagctggtggccagtgtctctgttttggagggacctatgggggtaggcatcccgggagccaacatgaggcccagctccatcacatgccagcagaggggacagaggctgtgggaggagggatgggtccttggaaagtcctcaactctctgcaactgcccagggatcctgtggacctggagccttggcattagaattcaaggaggcattatccataaccccttctctcagggatgtcactaagagactcattgagaacagtgcgttgtcattggtccatggtggcagtagcatgtacctgcaggccagagggttttgcttctaggagaacaaacaggcttgtggggtgagaaccccaggggataggggccattttgatccctattctccagacagggaggatcacagagattaagctgctggcccaaggtcatggggtaggaggtggcaaagccaggatttgaatccagattgctccttcctctgcaggagcagaatttttccaagcagagaatgaggggaaaggtgttctagacacaggcaggcacatgccaggtgctggaaaaagaagagagaaaggtaagccaggcatagcggttcacacttgtcatcccagcactttgtgaggtcgaggtgagaggatcactcaagcccaggagtttgagaccagcctgggcaacatagtaagaccctgtctctttaaaaataaaaatattttaaacaaaagaaaggtagaaaatatgagttgtatgtagaatatgaaggttctagaataatcctattaagaattttggattctggctgggcgcggtggctcacgcctgtaatcccagcactttgggaggctgaggccagcggatcacgaggtcaggagatcgagaccatcctggctaacacggtgaaaccccgtctctactaaaaatacaaaaaattagctgggcatggtagtgggcgcctgtagtcccagctactcgggaggctgaggcaggagaatggcgtgaacccggaaggtggagcttgcagtgagccaagatcacgccactgcactccagcctgggtgacagagtgagactccgtctcaaaaaaaaaaaaaaaagtgccggccacggtggctcatgcctgtaatcccagcactctgggaggccgaggcgggcggatcacgaggtcaggaattcgagaccagcctaaccaacatggtgaaaccccgtctctactaaaaatacaaaaattagccgggcgtggtggtgtgtgcctgtaatctcagctacttgggagactgagacgggagcattgcttgaacccgggaggtggaggttgtggtgagctgagatcctgccattgcactccagcctgggcaataagagcgaaactccgtctggaaaaaaaaaaaaaaaaaaagaattttgaattagctggctgcattggtgcatgcctacagtcccagctcctcaggaggctgaggtgggaggatcacttgagccctcgattttctttttccttgagacaatgtctgtttctgttgtccaggctggagtgccgtggcgtgatgatggctcactgcagcttctgtttcctgggttcaagggatcctgtcacctcagcctcctgagcagctgggactaaggagtgtgcccagctaattcttttttttttttggtagagttggggtcttactacattgccagggctggtcttgaactcctagactcaagcgatcctcccgcctcagcctctcaaagtgctgggatcacaggcatgagccattgtgcccaacccagcccaggaatttgaggccagcctgagcaatatagtgagaccccaggtatagatagataggtagatagataggtaggtaggtaggtagatagatagataggtaggtgggtaggtaggtgggtagataggtaggtaggtacgtaggtagatagatagatagatacatacatacatagatagataagatagatagattgattagatagattagatagccaggtggggtggctcacgcctgtaatcccagtgctttgggaggctgaggtgggtggatcacctgaggtcaggagtttgagaccagcctggctaatgtggcgaaaccctgtctactaaaaatacaaaaattagctggatgtggtggcgcacgcctgtaatctcagctactcgggaggctggggtgggagaatcgcttgaacccaggaggtggaggttgcagtgagctgagatcatgccactgcactccagcctgggccacagagggagacctggtctcaaaaaaaaaaaaaaaaaaaaaaaagatttttgtatttgactgtgctctctcatccaggtggtgacatgcttgtatctgtggttaagaggtagcatctgccaggcgcggtggctcatgcctgtaatcccagtactttgcgaggccgaggcgggtggttcacctgaggtcaggagtttgagaccagcctgaccaacatggcgaaaccccgtctctactaaaaatataaaaattagccgaggctgggcgcggtggctcacgcctgtaatcccagcactttgggaggccgaggcgggtggatcacgaggtcaggagatcgagaccatcctggctaacaggatgaaaccccgtctctactaaaaacacaaaattagctgggcatggtggcaggtgcctgtagtcccagctactcgggaggctgaggcaggagaatggcacaaacccgggaggcggagcttgaggcaggagaatggcgtgaacccgggaggcagagcttgctatgagcagagatcgcgccactgcactccagcctgggtgacagagcgagactccgtctcaaaaaaaaaaaaaagagagagataccattccagttgcaatgtggctgcagcagggctaggtggacatgaggagcccagttcagggctgtcacagtagctccagcagcagatgattgtggctgggcctcccaagtgtcacgttggagaaccggagaaggggacttctttgggatgtactctggacttgttgatagattaagtgtaggtggggtgaggaagagaactcaaagatgacaccaggtgttggagctgagccacggggagaagggtgcaaagggaaagcagtgcgggggctgggaggggagagggtcagtcctgttttgcttgtgctgcatctgaggagcccctcacctgtggaaggagagcagtcccagaggcagtggggtgtgcagttctggaacttagaagaatgatcagggggctgggtgcagtggctcacgcctgtaatcccagcactttgggaggccgaggcgggcggatcaagaggtcaggagattgagaccatcctggctaacatggtgaaaccccgtctctactaaaaatataaaaaattagcagcgcatggtggcaggcacctgtagtcccagctattcaggaggctgaggcaggagagtggcgtgaacccgggagacggagcttgcagtgagctgagattgcgccactgcactccagcctgggcgacagagcgagactccgtctcaaaaaaaaaaaaaacaaaaaattatcaggaataaagatactgggaattcaaccacaaaaaccacaaagtcacgaatgcagagtgagagtcttcagagagagggcagaggcccaggatggcacagagggagagagaagccaccaagatggcagggagccatggccagagagaaaagcaaaccaggcgcctgtggcaccatggaagcagcaggtgatgctggagaagcgtttccatgcagtgacagctgccagagccagattattatggcctgagggctggtggtgctgcagttgggggggaatggagaccgcagcgggggaatggagaccgcaggggcggcaactcctcccagaggttcagtttggaggaaaaagagacagaaggaagggtaaccaaaggatattagaggtcaaggaggggtttattatttctagctggtcaaagtagaatgtggtaaaacccaataaagtaacagcaaataacaaagaggggcttttaatggaaagctgcagtgcctgcccctcacctccctagccccactcctcagaagcagccccctggagcggtttctctttctgctgcttttggaggctacttctgtctctgtaaaggaacttctgtctctgtaaaggaacaagcagaggccacagtgtcttggcaaatgaccgtggcattgtttatcccaacctgctctgagagatggggactctgctgattcacccctcgtccctgcctctttagttccttcagcaaagaactaataatatgtcattaaggcaaaggcagtatttggcacacttggcttctgtgttccaaaaaattccctttttctccaagcgtagattttaatatggtatttaagtatcaaagtgatttgacacaagtgacacaagtgagcagtagtagcatttgcaaaagctacaaatgatgaagtcttgctccaaaagcatattattattattttttaaattccagtttcaagctcaatggataggttgcgtcagtgggttttagtagagaaggggccagtacctatgaagactcccctgtactattacacatgctgcgtcccaagtagggaaactccagtgggtcatcaccccctccctctagcccaagtgggctgctgggtcagggcactgtttgggttgggttgagattcctggatccctaactagcaccttccaaagaatcggccttgcagagaacaaagttcattgccaaaggtattcccaatgtctgtctctcgctctgtgatagggcttctttactccccactttataagatgaggatatctgctataccccattccttcaacctctccacctctttcctcttttgtctgccatgtgattacttttccatcaccaaggttgatgagatccttactgtgtacttactgtctccaagcatccccaggcttccagccagcacgcagcagccaacattggcttcagaaggaaggaggtttgcatttccttctcttgggtccagtgccatggtctcagggttatctccaatgtggaaagttgctagaccaggagcagtttgactccactgtttttcagtctagcaagtttgagtttttcccaagctcttgatgtgtgttcaaatgaatgttctccctttcccaagagacctccctataagggagggtctagtttcccggggtgccctgagaagaaggggtcagcaggggggaggaatggtggaggctgaggcctcaggcaggtgccctgtgaggagtggctgtgacaagcggctgagatcccagcaaagggttgttgcccagaatctggggcctaagcgaggttggaaatcacaaatgcacttggtttctctagcagctggcacatagtaggatcagcccaggagtggcaccttcaaagagaaaggaacgcatgaggctccgagagcggtcggctggcagccagggcctggctggggagggagggcaggtggtgcgctgacctggggatctttgagagtgtgcaggagtatgtggctgaagcggcccagctggtgagccactgaagatgggggtcataggtagatggaggaattgccaggtcagaatctcggtaggagatgacttgagctgatgctgcctggcacataggggtttagaagatattaggaaggaagccccacagcgtgcccaagtgccatgcaggccctggagacggtcattggagggcgtctgtggatggcgcagtgggggatgggaagtccctaatctgctggggctttcccagcaagcagggactgagggggatagtccccaacacatgggccccagggagaagggcctgtttcattgaggtttggagagtgttgagggtaagctaacctgtcaccccacgcccccgagaatggttactgatagggagaggccttttccttgcaggagatggcgtctaccagaaggggatggacttcattttggagaagctcaaccatggggactgggtgcatatcttcccagaaggtcagcagggctgactgggtcgagcccccccagtatgagcgggatgggctcccaagcctcgcctctgtgctctctcaccagggaaagtgaacatgagttccgaattcctgcgtttcaagtggggtaagggctgctggtctctggccacagccatcctcccggcccagagatggccctgtgggcccctggctcccgccccctcgggctggcttgtatgggggtagatgggcgtgtttgtagcgccaggaaggggacaggtgctgagactaggcctgcctctcgcaggggcttgcccaagggagctgaattgaactggaggatgtcgggggtggcagtggccagaggctggcacagaagcttggctcagggcccagcttatgctaacatttctacctcccccctgggcaggaatcgggcgcctgattgctgagtgtcatctcaaccccatcatcctgcccctgtggcatgtcggtgagcctggggacggggacagagagatggcatctggggtggggggcctgggactccctctggtcccaggctgccctgctccaccccacgtctggccttctgtccactgtgctgcaggaatgaatgacgtccttcctaacagtccgccctacttcccccgctttggacaggtgggtggggactgctgaccttcggctgtctgcctgtctgctgtctgctccgtgtctcccactcagcactatggaggccagctgcaggaggagctgagcatgaggctacagcaggggacagagtggaacatagacagggacttcctggcaccgagacattaaaatgagagcagaggaagtcaggctggggcagaggtgggctgtggggtcaggacaggacaggtcatctacagcacaggacccaggaccaggaccttgttttagaggaagagtggcccctggggagtgtgtggcacagcagggccggggcttagcttctggctcccgggttgcttgggctggggctgtgggcactcctactgctcctcatcactcttggcggccaccccacagaaaatcactgtgctgatcgggaagcccttcagtgccctgcctgtactcgagcggctccgggcggagaacaagtcggctgtgagtttcctcctgggtcccccgtagctgtccccggaccccctgctgctggcttccagcagggtgcctccaccctctccatcccgtcaccctcccagggcaccctcccagggcaccttggccaagcttcccgaggggtgcaggccatccctggtcctttccctcaggtggagatgcggaaagccctgacggacttcattcaagaggaattccagcatctgaagactcaggcagagcagctccacaaccacctccagcctgggagataggccttgcttgctgccttctggattcttggcccgcacagagctggggctgagggatggactgatgcttttagctcaaacgtggcttttagacagatttgttcatagaccctctcaagtgccctctccgagctggtaggcattccagctcctccgtgcttcctcagttacacaaaggacctcagctgcttctcccacttggccaagcagggaggaagaagcttaggcagggctctctttccttcttgccttcagatgttctctcccaggggctggcttcaggagggagcatagaaggcaggtgagcaaccagttggctaggggagcagggggcccaccagagctgtggagaggggaccctaagactcctcggcctggctcctacccaccgcccttgccgaaccaggagctgctcactacctcctcagggatggccgttggccacgtcttccttctgcctgagcttcccccccaccacaggccctttcctcaggcaaggtctggcctcaggtgggccgcaggcgggaaaagcagcccttggccagaagtcaagcccagccacgtggagcctagagtgagggcctgaggtctggctgcttgcccccatgctggcgccaacaacttctccatcctttctgcctctcaacatcacttgaatcctagggcctgggttttcatgtttttgaaacagaaccataa

SEQ ID NO: 14415 - DNA, 2158 bp, Homo sapiens
cggggtgccagcgcccgccttcccgtttcctcccgttccgcagcgcgcccacggcctgtgaccccggcgaccgctccccagtgacgagagagcggggccgggcgctgctccggcctgacctgcgaagggacctcggtccagtcccctgttgcgccgcgcccccgtccgtccgtgcgcgggccagtcaggggccagtgtctcgagcggtcgaggtcgcagacctagaggcgccccacaggccggcccggggcgctgggagcgccggccgcgggccgggtggggatgcctctgcacgtgaagtggccgttccccgcggtgccgccgctcacctggaccctggccagcagcgtcgtcatgggcttggtgggcacctacagctgcttctggaccaagtacatgaaccacctgaccgtgcacaacagggaggtgctgtacgagctcatcgagaagcgaggcccggccacgcccctcatcaccgtgtccaatcaccagtcctgcatggacgaccctcatctctgggggatcctgaaactccgccacatctggaacctgaagttgatgcgttggtgaggaggaatgggcccctcgaagtgggccgggccggccccacctgcctctgcccagatttgccctcctcctgctctgcccaggaggtggcgtccagcagtccaggacccctgcagctgcagacatctgcttcaccaaggagctacactcccacttcttcagcttgggcaagtgtgtgcctgtgtgccgaggagatggcgtctaccagaaggggatggacttcattttggagaagctcaaccatggggactgggtgcatatcttcccagaagggaaagtgaacatgagttccgaattcctgcgtttcaagtggggtaagggctgctggtctctggccacagccatcctcccggcccagagatggccctgtgggcccctggctcccgccccctcgggctggcttgtatgggggtagatgggcgtgtttgtagcgccaggaaggggacaggtgctgagactaggcctgcctctcgcaggggcttgcccaagggagctgaattgaactggaggatgtcgggggtggcagtggccagaggctggcacagaagcttggctcagggcccagcttatgctaacatttctacctcccccctgggcaggaatcgggcgcctgattgctgagtgtcatctcaaccccatcatcctgcccctgtggcatgtcggaatgaatgacgtccttcctaacagtccgccctacttcccccgctttggacagaaaatcactgtgctgatcgggaagcccttcagtgccctgcctgtactcgagcggctccgggcggagaacaagtcggctgtggagatgcggaaagccctgacggacttcattcaagaggaattccagcatctgaagactcaggcagagcagctccacaaccacctccagcctgggagataggccttgcttgctgccttctggattcttggcccgcacagagctggggctgagggatggactgatgcttttagctcaaacgtggcttttagacagatttgttcatagaccctctcaagtgccctctccgagctggtaggcattccagctcctccgtgcttcctcagttacacaaaggacctcagctgcttctcccacttggccaagcagggaggaagaagcttaggcagggctctctttccttcttgccttcagatgttctctcccaggggctggcttcaggagggagcatagaaggcaggtgagcaaccagttggctaggggagcagggggcccaccagagctgtggagaggggaccctaagactcctcggcctggctcctacccaccgcccttgccgaaccaggagctgctcactacctcctcagggatggccgttggccacgtcttccttctgcctgagcttcccccccaccacaggccctttcctcaggcaaggtctggcctcaggtgggccgcaggcgggaaaagcagcccttggccagaagtcaagcccagccacgtggagcctagagtgagggcctgaggtctggctgcttgcccccatgctggcgccaacaacttctccatcctttctgcctctcaacatcacttgaatcctagggcctgggttttcatgtttttgaaacagaaccataa

SEQ ID NO: 14416 - DNA, 8504 bp, Homo sapiens
gcccgccttcccgtttcctcccgttccgcagcgcgcccacggcctgtgaccccggcgaccgctccccagtgacgagagagcggggccgggcgctgctccggcctgacctgcgaagggacctcggtccagtcccctgttgcgccgcgcccccgtccgtccgtgcgcgggccagtcaggggccagtgtctcgagcggtcgaggtcgcagacctagaggcgccccacaggccggcccggggcgctgggagcgccggccgcgggccgggtggggatgcctctgcacgtgaagtggccgttccccgcggtgccgccgctcacctggaccctggccagcagcgtcgtcatgggcttggtgggcacctacagctgcttctggaccagtgagtgggcccaggccgaggcaggcccgcccgggtacccatgcccggccggaggtgggacttagggtgggggacgccgcggccccgacctagcgggcgagcccggagcgcctgacttctccttccccgccagagtacatgaaccacctgaccgtgcacaacagggaggtgctgtacgagctcatcgagaagcgaggcccggccacgcccctcatcaccgtgtccaatcaccagtcctgcatggacgaccctcatctctggggtacccgggccagtgtgctgggcagggggaggaaaggcgaggattcgggacgggcccagcctcgtcagaacaaaccccttctcgctgccttttcatggagccctggcactccggtttccgggcgttctgccccagggctgagacttggatttgtggctcctgcagcatccctgagggagcatgatttggagagggccttgggcatggagcaggaccaaggaacggccacagggcatatcttacagctcctttaacgtcaggcctccagaaccctctgttctctaaaccatccagggccccacagtcttgggaaaaatttgggggttggacataggatatcctgtgaggaagttctgggccagggactggaagcccagtgtcctggcttcaggtttgcccctggctgggcgtgtaccgttcagccctatttgggagcctggttgccacacctagaggttcctgctctgctgacttcacaggaagttgcttggctctggtaaccagatggccgggtggaggggtgcctggggcttccactcctgaacagagagcttaactgtcctagagttcatggggagccacctagccacactggagcccttcagagctcaccctggctgctgggtggagaaaggcctatagatgtcacaggtggatcctgggaggccaggaaggaggacttggagccatccactagcctagactgggctggttgcagtgacagtacagggagaagtatagaagaatgggcattgtccaagtatgttggggaggtaggcagtccaggtgcagtgattagtaagatgtggagggtgggggagagggaggagccagggagaactgaatgatctggcctaagggtctgaaagatgccactttgggctgtagggaaatggtagtgctgctgtccctcattccctgagatggggtgaaggaagggcactccctggggatatgggaagttggggcatgaagcctttcctgtcctctagggatcctgaaactccgccacatctggaacctgaagttgatgcgttggtgaggaggaatgggcccctcgaagtgggccgggccggccccacctgcctctgcccagatttgccctcctcctgctctgcccaggaggtggcgtccagcagtccaggcagggcatggggtggggccccgcaggccctcccctgtgcctcccttctgcatgctgatgctgggggcagggtggtggagcggggtgcagggggcaggactaattgcatctgtccctgcttaggacccctgcagctgcagacatctgcttcaccaaggagctacactcccacttcttcagcttgggcaagtgtgtgcctgtgtgccgaggtgagctgctcctccagcgagtgcagggaggcacttctggggcaggaaagctggtggccagtgtctctgttttggagggacctatgggggtaggcatcccgggagccaacatgaggcccagctccatcacatgccagcagaggggacagaggctgtgggaggagggatgggtccttggaaagtcctcaactctctgcaactgcccagggatcctgtggacctggagccttggcattagaattcaaggaggcattatccataaccccttctctcagggatgtcactaagagactcattgagaacagtgcgttgtcattggtccatggtggcagtagcatgtacctgcaggccagagggttttgcttctaggagaacaaacaggcttgtggggtgagaaccccaggggataggggccattttgatccctattctccagacagggaggatcacagagattaagctgctggcccaaggtcatggggtaggaggtggcaaagccaggatttgaatccagattgctccttcctctgcaggagcagaatttttccaagcagagaatgaggggaaaggtgttctagacacaggcaggcacatgccaggtgctggaaaaagaagagagaaaggtaagccaggcatagcggttcacacttgtcatcccagcactttgtgaggtcgaggtgagaggatcactcaagcccaggagtttgagaccagcctgggcaacatagtaagaccctgtctctttaaaaataaaaatattttaaacaaaagaaaggtagaaaatatgagttgtatgtagaatatgaaggttctagaataatcctattaagaattttggattctggctgggcgcggtggctcacgcctgtaatcccagcactttgggaggctgaggccagcggatcacgaggtcaggagatcgagaccatcctggctaacacggtgaaaccccgtctctactaaaaatacaaaaaattagctgggcatggtagtgggcgcctgtagtcccagctactcgggaggctgaggcaggagaatggcgtgaacccggaaggtggagcttgcagtgagccaagatcacgccactgcactccagcctgggtgacagagtgagactccgtctcaaaaaaaaaaaaaaaagtgccggccacggtggctcatgcctgtaatcccagcactctgggaggccgaggcgggcggatcacgaggtcaggaattcgagaccagcctaaccaacatggtgaaaccccgtctctactaaaaatacaaaaattagccgggcgtggtggtgtgtgcctgtaatctcagctacttgggagactgagacgggagcattgcttgaacccgggaggtggaggttgtggtgagctgagatcctgccattgcactccagcctgggcaataagagcgaaactccgtctggaaaaaaaaaaaaaaaaaaagaattttgaattagctggctgcattggtgcatgcctacagtcccagctcctcaggaggctgaggtgggaggatcacttgagccctcgattttctttttccttgagacaatgtctgtttctgttgtccaggctggagtgccgtggcgtgatgatggctcactgcagcttctgtttcctgggttcaagggatcctgtcacctcagcctcctgagcagctgggactaaggagtgtgcccagctaattcttttttttttttggtagagttggggtcttactacattgccagggctggtcttgaactcctagactcaagcgatcctcccgcctcagcctctcaaagtgctgggatcacaggcatgagccattgtgcccaacccagcccaggaatttgaggccagcctgagcaatatagtgagaccccaggtatagatagataggtagatagataggtaggtaggtaggtagatagatagataggtaggtgggtaggtaggtgggtagataggtaggtaggtacgtaggtagatagatagatagatacatacatacatagatagataagatagatagattgattagatagattagatagccaggtggggtggctcacgcctgtaatcccagtgctttgggaggctgaggtgggtggatcacctgaggtcaggagtttgagaccagcctggctaatgtggcgaaaccctgtctactaaaaatacaaaaattagctggatgtggtggcgcacgcctgtaatctcagctactcgggaggctggggtgggagaatcgcttgaacccaggaggtggaggttgcagtgagctgagatcatgccactgcactccagcctgggccacagagggagacctggtctcaaaaaaaaaaaaaaaaaaaaaaaagatttttgtatttgactgtgctctctcatccaggtggtgacatgcttgtatctgtggttaagaggtagcatctgccaggcgcggtggctcatgcctgtaatcccagtactttgcgaggccgaggcgggtggttcacctgaggtcaggagtttgagaccagcctgaccaacatggcgaaaccccgtctctactaaaaatataaaaattagccgaggctgggcgcggtggctcacgcctgtaatcccagcactttgggaggccgaggcgggtggatcacgaggtcaggagatcgagaccatcctggctaacaggatgaaaccccgtctctactaaaaacacaaaattagctgggcatggtggcaggtgcctgtagtcccagctactcgggaggctgaggcaggagaatggcacaaacccgggaggcggagcttgaggcaggagaatggcgtgaacccgggaggcagagcttgctatgagcagagatcgcgccactgcactccagcctgggtgacagagcgagactccgtctcaaaaaaaaaaaaaagagagagataccattccagttgcaatgtggctgcagcagggctaggtggacatgaggagcccagttcagggctgtcacagtagctccagcagcagatgattgtggctgggcctcccaagtgtcacgttggagaaccggagaaggggacttctttgggatgtactctggacttgttgatagattaagtgtaggtggggtgaggaagagaactcaaagatgacaccaggtgttggagctgagccacggggagaagggtgcaaagggaaagcagtgcgggggctgggaggggagagggtcagtcctgttttgcttgtgctgcatctgaggagcccctcacctgtggaaggagagcagtcccagaggcagtggggtgtgcagttctggaacttagaagaatgatcagggggctgggtgcagtggctcacgcctgtaatcccagcactttgggaggccgaggcgggcggatcaagaggtcaggagattgagaccatcctggctaacatggtgaaaccccgtctctactaaaaatataaaaaattagcagcgcatggtggcaggcacctgtagtcccagctattcaggaggctgaggcaggagagtggcgtgaacccgggagacggagcttgcagtgagctgagattgcgccactgcactccagcctgggcgacagagcgagactccgtctcaaaaaaaaaaaaaacaaaaaattatcaggaataaagatactgggaattcaaccacaaaaaccacaaagtcacgaatgcagagtgagagtcttcagagagagggcagaggcccaggatggcacagagggagagagaagccaccaagatggcagggagccatggccagagagaaaagcaaaccaggcgcctgtggcaccatggaagcagcaggtgatgctggagaagcgtttccatgcagtgacagctgccagagccagattattatggcctgagggctggtggtgctgcagttgggggggaatggagaccgcagcgggggaatggagaccgcaggggcggcaactcctcccagaggttcagtttggaggaaaaagagacagaaggaagggtaaccaaaggatattagaggtcaaggaggggtttattatttctagctggtcaaagtagaatgtggtaaaacccaataaagtaacagcaaataacaaagaggggcttttaatggaaagctgcagtgcctgcccctcacctccctagccccactcctcagaagcagccccctggagcggtttctctttctgctgcttttggaggctacttctgtctctgtaaaggaacttctgtctctgtaaaggaacaagcagaggccacagtgtcttggcaaatgaccgtggcattgtttatcccaacctgctctgagagatggggactctgctgattcacccctcgtccctgcctctttagttccttcagcaaagaactaataatatgtcattaaggcaaaggcagtatttggcacacttggcttctgtgttccaaaaaattccctttttctccaagcgtagattttaatatggtatttaagtatcaaagtgatttgacacaagtgacacaagtgagcagtagtagcatttgcaaaagctacaaatgatgaagtcttgctccaaaagcatattattattattttttaaattccagtttcaagctcaatggataggttgcgtcagtgggttttagtagagaaggggccagtacctatgaagactcccctgtactattacacatgctgcgtcccaagtagggaaactccagtgggtcatcaccccctccctctagcccaagtgggctgctgggtcagggcactgtttgggttgggttgagattcctggatccctaactagcaccttccaaagaatcggccttgcagagaacaaagttcattgccaaaggtattcccaatgtctgtctctcgctctgtgatagggcttctttactccccactttataagatgaggatatctgctataccccattccttcaacctctccacctctttcctcttttgtctgccatgtgattacttttccatcaccaaggttgatgagatccttactgtgtacttactgtctccaagcatccccaggcttccagccagcacgcagcagccaacattggcttcagaaggaaggaggtttgcatttccttctcttgggtccagtgccatggtctcagggttatctccaatgtggaaagttgctagaccaggagcagtttgactccactgtttttcagtctagcaagtttgagtttttcccaagctcttgatgtgtgttcaaatgaatgttctccctttcccaagagacctccctataagggagggtctagtttcccggggtgccctgagaagaaggggtcagcaggggggaggaatggtggaggctgaggcctcaggcaggtgccctgtgaggagtggctgtgacaagcggctgagatcccagcaaagggttgttgcccagaatctggggcctaagcgaggttggaaatcacaaatgcacttggtttctctagcagctggcacatagtaggatcagcccaggagtggcaccttcaaagagaaaggaacgcatgaggctccgagagcggtcggctggcagccagggcctggctggggagggagggcaggtggtgcgctgacctggggatctttgagagtgtgcaggagtatgtggctgaagcggcccagctggtgagccactgaagatgggggtcataggtagatggaggaattgccaggtcagaatctcggtaggagatgacttgagctgatgctgcctggcacataggggtttagaagatattaggaaggaagccccacagcgtgcccaagtgccatgcaggccctggagacggtcattggagggcgtctgtggatggcgcagtgggggatgggaagtccctaatctgctggggctttcccagcaagcagggactgagggggatagtccccaacacatgggccccagggagaagggcctgtttcattgaggtttggagagtgttgagggtaagctaacctgtcaccccacgcccccgagaatggttactgatagggagaggccttttccttgcaggagatggcgtctaccagaaggggatggacttcattttggagaagctcaaccatggggactgggtgcatatcttcccagaaggtcagcagggctgactgggtcgagcccccccagtatgagcgggatgggctcccaagcctcgcctctgtgctctctcaccagggaaagtgaacatgagttccgaattcctgcgtttcaagtggggtaagggctgctggtctctggccacagccatcctcccggcccagagatggccctgtgggcccctggctcccgccccctcgggctggcttgtatgggggtagatgggcgtgtttgtagcgccaggaaggggacaggtgctgagactaggcctgcctctcgcaggggcttgcccaagggagctgaattgaactggaggatgtcgggggtggcagtggccagaggctggcacagaagcttggctcagggcccagcttatgctaacatttctacctcccccctgggcaggaatcgggcgcctgattgctgagtgtcatctcaaccccatcatcct

SEQ ID NO: 14417 - DNA, 773 bp, Homo sapiens
gcccgccttcccgtttcctcccgttccgcagcgcgcccacggcctgtgaccccggcgaccgctccccagtgacgagagagcggggccgggcgctgctccggcctgacctgcgaagggacctcggtccagtcccctgttgcgccgcgcccccgtccgtccgtgcgcgggccagtcaggggccagtgtctcgagcggtcgaggtcgcagacctagaggcgccccacaggccggcccggggcgctgggagcgccggccgcgggccgggtggggatgcctctgcacgtgaagtggccgttccccgcggtgccgccgctcacctggaccctggccagcagcgtcgtcatgggcttggtgggcacctacagctgcttctggaccaagtacatgaaccacctgaccgtgcacaacagggaggtgctgtacgagctcatcgagaagcgaggcccggccacgcccctcatcaccgtgtccaatcaccagtcctgcatggacgaccctcatctctgggggatcctgaaactccgccacatctggaacctgaagttgatgcgttggtgaggaggaatgggcccctcgaagtgggccgggccggccccacctgcctctgcccagatttgccctcctcctgctctgcccaggaggacccctgcagctgcagacatctgcttcaccaaggagctacactcccacttcttcagcttgggcaagtgtgtgcctgtgtgccgaggaatcgggcgcctgattgctgagtgtcatctcaaccccatcatcct

SEQ ID NO: 14418 - DNA, 2774 bp, Homo sapiens
gccccacaggccggcccggggcgctgggagcgccggccgcgggccgggtggggatgcctctgcacgtgaagtggccgttccccgcggtgccgccgctcacctggaccctggccagcagcgtcgtcatgggcttggtgggcacctacagctgcttctggaccagtgagtgggcccaggccgaggcaggcccgcccgggtacccatgcccggccggaggtgggacttagggtgggggacgccgcggccccgacctagcgggcgagcccggagcgcctgacttctccttccccgccagagtacatgaaccacctgaccgtgcacaacagggaggtgctgtacgagctcatcgagaagcgaggcccggccacgcccctcatcaccgtgtccaatcaccagtcctgcatggacgaccctcatctctggggtacccgggccagtgtgctgggcagggggaggaaaggcgaggattcgggacgggcccagcctcgtcagaacaaaccccttctcgctgccttttcatggagccctggcactccggtttccgggcgttctgccccagggctgagacttggatttgtggctcctgcagcatccctgagggagcatgatttggagagggccttgggcatggagcaggaccaaggaacggccacagggcatatcttacagctcctttaacgtcaggcctccagaaccctctgttctctaaaccatccagggccccacagtcttgggaaaaatttgggggttggacataggatatcctgtgaggaagttctgggccagggactggaagcccagtgtcctggcttcaggtttgcccctggctgggcgtgtaccgttcagccctatttgggagcctggttgccacacctagaggttcctgctctgctgacttcacaggaagttgcttggctctggtaaccagatggccgggtggaggggtgcctggggcttccactcctgaacagagagcttaactgtcctagagttcatggggagccacctagccacactggagcccttcagagctcaccctggctgctgggtggagaaaggcctatagatgtcacaggtggatcctgggaggccaggaaggaggacttggagccatccactagcctagactgggctggttgcagtgacagtacagggagaagtatagaagaatgggcattgtccaagtatgttggggaggtaggcagtccaggtgcagtgattagtaagatgtggagggtgggggagagggaggagccagggagaactgaatgatctggcctaagggtctgaaagatgccactttgggctgtagggaaatggtagtgctgctgtccctcattccctgagatggggtgaaggaagggcactccctggggatatgggaagttggggcatgaagcctttcctgtcctctagggatcctgaaactccgccacatctggaacctgaagttgatgcgttggtgaggaggaatgggcccctcgaagtgggccgggccggccccacctgcctctgcccagatttgccctcctcctgctctgcccaggaggtggcgtccagcagtccaggcagggcatggggtggggccccgcaggccctcccctgtgcctcccttctgcatgctgatgctgggggcagggtggtggagcggggtgcagggggcaggactaattgcatctgtccctgcttaggacccctgcagctgcagacatctgcttcaccaaggagctacactcccacttcttcagcttgggcaagtgtgtgcctgtgtgccgaggtgagctgctcctccagcgagtgcagggaggcacttctggggcaggaaagctggtggccagtgtctctgttttggagggacctatgggggtaggcatcccgggagccaacatgaggcccagctccatcacatgccagcagaggggacagaggctgtgggaggagggatgggtccttggaaagtcctcaactctctgcaactgcccagggatcctgtggacctggagccttggcattagaattcaaggaggcattatccataaccccttctctcagggatgtcactaagagactcattgagaacagtgcgttgtcattggtccatggtggcagtagcatgtacctgcaggccagagggttttgcttctaggagaacaaacaggcttgtggggtgagaaccccaggggataggggccattttgatccctattctccagacagggaggatcacagagattaagctgctggcccaaggtcatggggtaggaggtggcaaagccaggatttgaatccagattgctccttcctctgcaggagcagaatttttccaagcagagaatgaggggaaaggtgttctagacacaggcaggcacatgccaggtgctggaaaaagaagagagaaaggtaagccaggcatagcggttcacacttgtcatcccagcactttgtgaggtcgaggtgagaggatcactcaagcccaggagtttgagaccagcctgggcaacatagtaagaccctgtctctttaaaaataaaaatattttaaacaaaagaaaggtagaaaatatgagttgtatgtagaatatgaaggttctagaataatcctattaagaattttggattctggctgggcgcggtggctcacgcctgtaatcccagcactttgggaggctgaggccagcggatcacgaggtcaggagatcgagaccatcctggctaacacggtgaaaccccgtctctactaaaaatacaaaaaattagctgggcatggtagtgggc

SEQ ID NO: 14419 - DNA, 1649 bp, Homo sapiens
gccccacaggccggcccggggcgctgggagcgccggccgcgggccgggtggggatgcctctgcacgtgaagtggccgttccccgcggtgccgccgctcacctggaccctggccagcagcgtcgtcatgggcttggtgggcacctacagctgcttctggaccaagtacatgaaccacctgaccgtgcacaacagggaggtgctgtacgagctcatcgagaagcgaggcccggccacgcccctcatcaccgtgtccaatcaccagtcctgcatggacgaccctcatctctgggggatcctgaaactccgccacatctggaacctgaagttgatgcgttggtgaggaggaatgggcccctcgaagtgggccgggccggccccacctgcctctgcccagatttgccctcctcctgctctgcccaggaggtggcgtccagcagtccaggcagggcatggggtggggccccgcaggccctcccctgtgcctcccttctgcatgctgatgctgggggcagggtggtggagcggggtgcagggggcaggactaattgcatctgtccctgcttaggacccctgcagctgcagacatctgcttcaccaaggagctacactcccacttcttcagcttgggcaagtgtgtgcctgtgtgccgaggtgagctgctcctccagcgagtgcagggaggcacttctggggcaggaaagctggtggccagtgtctctgttttggagggacctatgggggtaggcatcccgggagccaacatgaggcccagctccatcacatgccagcagaggggacagaggctgtgggaggagggatgggtccttggaaagtcctcaactctctgcaactgcccagggatcctgtggacctggagccttggcattagaattcaaggaggcattatccataaccccttctctcagggatgtcactaagagactcattgagaacagtgcgttgtcattggtccatggtggcagtagcatgtacctgcaggccagagggttttgcttctaggagaacaaacaggcttgtggggtgagaaccccaggggataggggccattttgatccctattctccagacagggaggatcacagagattaagctgctggcccaaggtcatggggtaggaggtggcaaagccaggatttgaatccagattgctccttcctctgcaggagcagaatttttccaagcagagaatgaggggaaaggtgttctagacacaggcaggcacatgccaggtgctggaaaaagaagagagaaaggtaagccaggcatagcggttcacacttgtcatcccagcactttgtgaggtcgaggtgagaggatcactcaagcccaggagtttgagaccagcctgggcaacatagtaagaccctgtctctttaaaaataaaaatattttaaacaaaagaaaggtagaaaatatgagttgtatgtagaatatgaaggttctagaataatcctattaagaattttggattctggctgggcgcggtggctcacgcctgtaatcccagcactttgggaggctgaggccagcggatcacgaggtcaggagatcgagaccatcctggctaacacggtgaaaccccgtctctactaaaaatacaaaaaattagctgggcatggtagtgggc

SEQ ID NO: 14420 - DNA, 1402 bp, Homo sapiens
actcagcactatggaggccagctgcaggaggagctgagcatgaggctacagcaggggacagagtggaacatagacagggacttcctggcaccgagacattaaaatgagagcagaggaagtcaggctggggcagaggtgggctgtggggtcaggacaggacaggtcatctacagcacaggacccaggaccaggaccttgttttagaggaagagtggcccctggggagtgtgtggcacagcagggccggggcttagcttctggctcccgggttgcttgggctggggctgtgggcactcctactgctcctcatcactcttggcggccaccccacagaaaatcactgtgctgatcgggaagcccttcagtgccctgcctgtactcgagcggctccgggcggagaacaagtcggctgtgagtttcctcctgggtcccccgtagctgtccccggaccccctgctgctggcttccagcagggtgcctccaccctctccatcccgtcaccctcccagggcaccctcccagggcaccttggccaagcttcccgaggggtgcaggccatccctggtcctttccctcaggtggagatgcggaaagccctgacggacttcattcaagaggaattccagcatctgaagactcaggcagagcagctccacaaccacctccagcctgggagataggccttgcttgctgccttctggattcttggcccgcacagagctggggctgagggatggactgatgcttttagctcaaacgtggcttttagacagatttgttcatagaccctctcaagtgccctctccgagctggtaggcattccagctcctccgtgcttcctcagttacacaaaggacctcagctgcttctcccacttggccaagcagggaggaagaagcttaggcagggctctctttccttcttgccttcagatgttctctcccaggggctggcttcaggagggagcatagaaggcaggtgagcaaccagttggctaggggagcagggggcccaccagagctgtggagaggggaccctaagactcctcggcctggctcctacccaccgcccttgccgaaccaggagctgctcactacctcctcagggatggccgttggccacgtcttccttctgcctgagcttcccccccaccacaggccctttcctcaggcaaggtctggcctcaggtgggccgcaggcgggaaaagcagcccttggccagaagtcaagcccagccacgtggagcctagagtgagggcctgaggtctggctgcttgcccccatgctggcgccaacaacttctccatcctttctgcctctcaacatcacttgaatcctagggcctgggttttcatgtttttgaaacagaaccataaagcatatgtgttggcttgttgtaaaa

SEQ ID NO: 14421 - DNA, 1037 bp, Homo sapiens
actcagcactatggaggccagctgcaggaggagctgagcatgaggctacagcaggggacagagtggaacatagacagggacttcctggcaccgagacattaaaatgagagcagaggaagtcaggctggggcagagaaaatcactgtgctgatcgggaagcccttcagtgccctgcctgtactcgagcggctccgggcggagaacaagtcggctgtggagatgcggaaagccctgacggacttcattcaagaggaattccagcatctgaagactcaggcagagcagctccacaaccacctccagcctgggagataggccttgcttgctgccttctggattcttggcccgcacagagctggggctgagggatggactgatgcttttagctcaaacgtggcttttagacagatttgttcatagaccctctcaagtgccctctccgagctggtaggcattccagctcctccgtgcttcctcagttacacaaaggacctcagctgcttctcccacttggccaagcagggaggaagaagcttaggcagggctctctttccttcttgccttcagatgttctctcccaggggctggcttcaggagggagcatagaaggcaggtgagcaaccagttggctaggggagcagggggcccaccagagctgtggagaggggaccctaagactcctcggcctggctcctacccaccgcccttgccgaaccaggagctgctcactacctcctcagggatggccgttggccacgtcttccttctgcctgagcttcccccccaccacaggccctttcctcaggcaaggtctggcctcaggtgggccgcaggcgggaaaagcagcccttggccagaagtcaagcccagccacgtggagcctagagtgagggcctgaggtctggctgcttgcccccatgctggcgccaacaacttctccatcctttctgcctctcaacatcacttgaatcctagggcctgggttttcatgtttttgaaacagaaccataaagcatatgtgttggcttgttgtaaaa

SEQ ID NO: 14422 - DNA, 9009 bp, Homo sapiens
gatggccgggtggaggggtgcctggggcttccactcctgaacagagagcttaactgtcctagagttcatggggagccacctagccacactggagcccttcagagctcaccctggctgctgggtggagaaaggcctatagatgtcacaggtggatcctgggaggccaggaaggaggacttggagccatccactagcctagactgggctggttgcagtgacagtacagggagaagtatagaagaatgggcattgtccaagtatgttggggaggtaggcagtccaggtgcagtgattagtaagatgtggagggtgggggagagggaggagccagggagaactgaatgatctggcctaagggtctgaaagatgccactttgggctgtagggaaatggtagtgctgctgtccctcattccctgagatggggtgaaggaagggcactccctggggatatgggaagttggggcatgaagcctttcctgtcctctagggatcctgaaactccgccacatctggaacctgaagttgatgcgttggtgaggaggaatgggcccctcgaagtgggccgggccggccccacctgcctctgcccagatttgccctcctcctgctctgcccaggaggtggcgtccagcagtccaggcagggcatggggtggggccccgcaggccctcccctgtgcctcccttctgcatgctgatgctgggggcagggtggtggagcggggtgcagggggcaggactaattgcatctgtccctgcttaggacccctgcagctgcagacatctgcttcaccaaggagctacactcccacttcttcagcttgggcaagtgtgtgcctgtgtgccgaggtgagctgctcctccagcgagtgcagggaggcacttctggggcaggaaagctggtggccagtgtctctgttttggagggacctatgggggtaggcatcccgggagccaacatgaggcccagctccatcacatgccagcagaggggacagaggctgtgggaggagggatgggtccttggaaagtcctcaactctctgcaactgcccagggatcctgtggacctggagccttggcattagaattcaaggaggcattatccataaccccttctctcagggatgtcactaagagactcattgagaacagtgcgttgtcattggtccatggtggcagtagcatgtacctgcaggccagagggttttgcttctaggagaacaaacaggcttgtggggtgagaaccccaggggataggggccattttgatccctattctccagacagggaggatcacagagattaagctgctggcccaaggtcatggggtaggaggtggcaaagccaggatttgaatccagattgctccttcctctgcaggagcagaatttttccaagcagagaatgaggggaaaggtgttctagacacaggcaggcacatgccaggtgctggaaaaagaagagagaaaggtaagccaggcatagcggttcacacttgtcatcccagcactttgtgaggtcgaggtgagaggatcactcaagcccaggagtttgagaccagcctgggcaacatagtaagaccctgtctctttaaaaataaaaatattttaaacaaaagaaaggtagaaaatatgagttgtatgtagaatatgaaggttctagaataatcctattaagaattttggattctggctgggcgcggtggctcacgcctgtaatcccagcactttgggaggctgaggccagcggatcacgaggtcaggagatcgagaccatcctggctaacacggtgaaaccccgtctctactaaaaatacaaaaaattagctgggcatggtagtgggcgcctgtagtcccagctactcgggaggctgaggcaggagaatggcgtgaacccggaaggtggagcttgcagtgagccaagatcacgccactgcactccagcctgggtgacagagtgagactccgtctcaaaaaaaaaaaaaaaagtgccggccacggtggctcatgcctgtaatcccagcactctgggaggccgaggcgggcggatcacgaggtcaggaattcgagaccagcctaaccaacatggtgaaaccccgtctctactaaaaatacaaaaattagccgggcgtggtggtgtgtgcctgtaatctcagctacttgggagactgagacgggagcattgcttgaacccgggaggtggaggttgtggtgagctgagatcctgccattgcactccagcctgggcaataagagcgaaactccgtctggaaaaaaaaaaaaaaaaaaagaattttgaattagctggctgcattggtgcatgcctacagtcccagctcctcaggaggctgaggtgggaggatcacttgagccctcgattttctttttccttgagacaatgtctgtttctgttgtccaggctggagtgccgtggcgtgatgatggctcactgcagcttctgtttcctgggttcaagggatcctgtcacctcagcctcctgagcagctgggactaaggagtgtgcccagctaattcttttttttttttggtagagttggggtcttactacattgccagggctggtcttgaactcctagactcaagcgatcctcccgcctcagcctctcaaagtgctgggatcacaggcatgagccattgtgcccaacccagcccaggaatttgaggccagcctgagcaatatagtgagaccccaggtatagatagataggtagatagataggtaggtaggtaggtagatagatagataggtaggtgggtaggtaggtgggtagataggtaggtaggtacgtaggtagatagatagatagatacatacatacatagatagataagatagatagattgattagatagattagatagccaggtggggtggctcacgcctgtaatcccagtgctttgggaggctgaggtgggtggatcacctgaggtcaggagtttgagaccagcctggctaatgtggcgaaaccctgtctactaaaaatacaaaaattagctggatgtggtggcgcacgcctgtaatctcagctactcgggaggctggggtgggagaatcgcttgaacccaggaggtggaggttgcagtgagctgagatcatgccactgcactccagcctgggccacagagggagacctggtctcaaaaaaaaaaaaaaaaaaaaaaaagatttttgtatttgactgtgctctctcatccaggtggtgacatgcttgtatctgtggttaagaggtagcatctgccaggcgcggtggctcatgcctgtaatcccagtactttgcgaggccgaggcgggtggttcacctgaggtcaggagtttgagaccagcctgaccaacatggcgaaaccccgtctctactaaaaatataaaaattagccgaggctgggcgcggtggctcacgcctgtaatcccagcactttgggaggccgaggcgggtggatcacgaggtcaggagatcgagaccatcctggctaacaggatgaaaccccgtctctactaaaaacacaaaattagctgggcatggtggcaggtgcctgtagtcccagctactcgggaggctgaggcaggagaatggcacaaacccgggaggcggagcttgaggcaggagaatggcgtgaacccgggaggcagagcttgctatgagcagagatcgcgccactgcactccagcctgggtgacagagcgagactccgtctcaaaaaaaaaaaaaagagagagataccattccagttgcaatgtggctgcagcagggctaggtggacatgaggagcccagttcagggctgtcacagtagctccagcagcagatgattgtggctgggcctcccaagtgtcacgttggagaaccggagaaggggacttctttgggatgtactctggacttgttgatagattaagtgtaggtggggtgaggaagagaactcaaagatgacaccaggtgttggagctgagccacggggagaagggtgcaaagggaaagcagtgcgggggctgggaggggagagggtcagtcctgttttgcttgtgctgcatctgaggagcccctcacctgtggaaggagagcagtcccagaggcagtggggtgtgcagttctggaacttagaagaatgatcagggggctgggtgcagtggctcacgcctgtaatcccagcactttgggaggccgaggcgggcggatcaagaggtcaggagattgagaccatcctggctaacatggtgaaaccccgtctctactaaaaatataaaaaattagcagcgcatggtggcaggcacctgtagtcccagctattcaggaggctgaggcaggagagtggcgtgaacccgggagacggagcttgcagtgagctgagattgcgccactgcactccagcctgggcgacagagcgagactccgtctcaaaaaaaaaaaaaacaaaaaattatcaggaataaagatactgggaattcaaccacaaaaaccacaaagtcacgaatgcagagtgagagtcttcagagagagggcagaggcccaggatggcacagagggagagagaagccaccaagatggcagggagccatggccagagagaaaagcaaaccaggcgcctgtggcaccatggaagcagcaggtgatgctggagaagcgtttccatgcagtgacagctgccagagccagattattatggcctgagggctggtggtgctgcagttgggggggaatggagaccgcagcgggggaatggagaccgcaggggcggcaactcctcccagaggttcagtttggaggaaaaagagacagaaggaagggtaaccaaaggatattagaggtcaaggaggggtttattatttctagctggtcaaagtagaatgtggtaaaacccaataaagtaacagcaaataacaaagaggggcttttaatggaaagctgcagtgcctgcccctcacctccctagccccactcctcagaagcagccccctggagcggtttctctttctgctgcttttggaggctacttctgtctctgtaaaggaacttctgtctctgtaaaggaacaagcagaggccacagtgtcttggcaaatgaccgtggcattgtttatcccaacctgctctgagagatggggactctgctgattcacccctcgtccctgcctctttagttccttcagcaaagaactaataatatgtcattaaggcaaaggcagtatttggcacacttggcttctgtgttccaaaaaattccctttttctccaagcgtagattttaatatggtatttaagtatcaaagtgatttgacacaagtgacacaagtgagcagtagtagcatttgcaaaagctacaaatgatgaagtcttgctccaaaagcatattattattattttttaaattccagtttcaagctcaatggataggttgcgtcagtgggttttagtagagaaggggccagtacctatgaagactcccctgtactattacacatgctgcgtcccaagtagggaaactccagtgggtcatcaccccctccctctagcccaagtgggctgctgggtcagggcactgtttgggttgggttgagattcctggatccctaactagcaccttccaaagaatcggccttgcagagaacaaagttcattgccaaaggtattcccaatgtctgtctctcgctctgtgatagggcttctttactccccactttataagatgaggatatctgctataccccattccttcaacctctccacctctttcctcttttgtctgccatgtgattacttttccatcaccaaggttgatgagatccttactgtgtacttactgtctccaagcatccccaggcttccagccagcacgcagcagccaacattggcttcagaaggaaggaggtttgcatttccttctcttgggtccagtgccatggtctcagggttatctccaatgtggaaagttgctagaccaggagcagtttgactccactgtttttcagtctagcaagtttgagtttttcccaagctcttgatgtgtgttcaaatgaatgttctccctttcccaagagacctccctataagggagggtctagtttcccggggtgccctgagaagaaggggtcagcaggggggaggaatggtggaggctgaggcctcaggcaggtgccctgtgaggagtggctgtgacaagcggctgagatcccagcaaagggttgttgcccagaatctggggcctaagcgaggttggaaatcacaaatgcacttggtttctctagcagctggcacatagtaggatcagcccaggagtggcaccttcaaagagaaaggaacgcatgaggctccgagagcggtcggctggcagccagggcctggctggggagggagggcaggtggtgcgctgacctggggatctttgagagtgtgcaggagtatgtggctgaagcggcccagctggtgagccactgaagatgggggtcataggtagatggaggaattgccaggtcagaatctcggtaggagatgacttgagctgatgctgcctggcacataggggtttagaagatattaggaaggaagccccacagcgtgcccaagtgccatgcaggccctggagacggtcattggagggcgtctgtggatggcgcagtgggggatgggaagtccctaatctgctggggctttcccagcaagcagggactgagggggatagtccccaacacatgggccccagggagaagggcctgtttcattgaggtttggagagtgttgagggtaagctaacctgtcaccccacgcccccgagaatggttactgatagggagaggccttttccttgcaggagatggcgtctaccagaaggggatggacttcattttggagaagctcaaccatggggactgggtgcatatcttcccagaaggtcagcagggctgactgggtcgagcccccccagtatgagcgggatgggctcccaagcctcgcctctgtgctctctcaccagggaaagtgaacatgagttccgaattcctgcgtttcaagtggggtaagggctgctggtctctggccacagccatcctcccggcccagagatggccctgtgggcccctggctcccgccccctcgggctggcttgtatgggggtagatgggcgtgtttgtagcgccaggaaggggacaggtgctgagactaggcctgcctctcgcaggggcttgcccaagggagctgaattgaactggaggatgtcgggggtggcagtggccagaggctggcacagaagcttggctcagggcccagcttatgctaacatttctacctcccccctgggcaggaatcgggcgcctgattgctgagtgtcatctcaaccccatcatcctgcccctgtggcatgtcggtgagcctggggacggggacagagagatggcatctggggtggggggcctgggactccctctggtcccaggctgccctgctccaccccacgtctggccttctgtccactgtgctgcaggaatgaatgacgtccttcctaacagtccgccctacttcccccgctttggacaggtgggtggggactgctgaccttcggctgtctgcctgtctgctgtctgctccgtgtctcccactcagcactatggaggccagctgcaggaggagctgagcatgaggctacagcaggggacagagtggaacatagacagggacttcctggcaccgagacattaaaatgagagcagaggaagtcaggctggggcagaggtgggctgtggggtcaggacaggacaggtcatctacagcacaggacccaggaccaggaccttgttttagaggaagagtggcccctggggagtgtgtggcacagcagggccggggcttagcttctggctcccgggttgcttgggctggggctgtgggcactcctactgctcctcatcactcttggcggccaccccacagaaaatcactgtgctgatcgggaagcccttcagtgccctgcctgtactcgagcggctccgggcggagaacaagtcggctgtgagtttcctcctgggtcccccgtagctgtccccggaccccctgctgctggcttccagcagggtgcctccaccctctccatcccgtcaccctcccagggcaccctcccagggcaccttggccaagcttcccgaggggtgcaggccatccctggtcctttccctcaggtggagatgcggaaagccctgacggacttcattcaagaggaattccagcatctgaagactcaggcagagcagctccacaaccacctccagcctgggagataggccttgcttgctgccttctggattcttggcccgcacagagctggggctgagggatggactgatgcttttagctcaaacgtggcttttagacagatttgttcatagaccctctcaagtgccctctccgagctggtaggcattccagctcctccgtgcttcctcagttacacaaaggacctcagctgcttctcccacttggccaagcagggaggaagaagcttaggcagggctctctttccttcttgccttcagatgttctctcccaggggctggcttcaggagggagcatagaaggcaggtgagcaaccagttggctaggggagcagggggcccaccagagctgtggagaggggaccctaagactcctcggcctggctcctacccaccgcccttgccgaaccaggagctgctcactacctcctcagggatggccgttggccacgtcttccttctgcctgagcttcccccccaccacaggccctttcctcaggcaaggtctggcctcaggtgggccgcaggcgggaaaagcagcccttggccagaagtcaagcccagccacgtggagcctagagtgagggcctgaggtctggctgcttgcccccatgctggcgccaacaacttctccatcctttctgcctctcaacatcacttgaatcctagggcctgggttttcatgtttttgaaacagaaccataaagcatatgtgttggcttgttgtaaaa

SEQ ID NO: 14423 - DNA, 1469 bp, Homo sapiens
gatggccgggtggaggggtgcctggggcttccactcctgaacagagagcttaactgtcctagagttcatggggagccacctagccacactggagcccttcagagctcaccctggctgctgggtggagaaaggcctatagatgtcacagggatcctgaaactccgccacatctggaacctgaagttgatgcgttggacccctgcagctgcagacatctgcttcaccaaggagctacactcccacttcttcagcttgggcaagtgtgtgcctgtgtgccgaggagcagaatttttccaagcagagaatgaggggaaaggtgttctagacacaggcaggcacatgccaggtgctggaaaaagaagagagaaaggagatggcgtctaccagaaggggatggacttcattttggagaagctcaaccatggggactgggtgcatatcttcccagaaggaatcgggcgcctgattgctgagtgtcatctcaaccccatcatcctgcccctgtggcatgtcggaatgaatgacgtccttcctaacagtccgccctacttcccccgctttggacagaaaatcactgtgctgatcgggaagcccttcagtgccctgcctgtactcgagcggctccgggcggagaacaagtcggctgtggagatgcggaaagccctgacggacttcattcaagaggaattccagcatctgaagactcaggcagagcagctccacaaccacctccagcctgggagataggccttgcttgctgccttctggattcttggcccgcacagagctggggctgagggatggactgatgcttttagctcaaacgtggcttttagacagatttgttcatagaccctctcaagtgccctctccgagctggtaggcattccagctcctccgtgcttcctcagttacacaaaggacctcagctgcttctcccacttggccaagcagggaggaagaagcttaggcagggctctctttccttcttgccttcagatgttctctcccaggggctggcttcaggagggagcatagaaggcaggtgagcaaccagttggctaggggagcagggggcccaccagagctgtggagaggggaccctaagactcctcggcctggctcctacccaccgcccttgccgaaccaggagctgctcactacctcctcagggatggccgttggccacgtcttccttctgcctgagcttcccccccaccacaggccctttcctcaggcaaggtctggcctcaggtgggccgcaggcgggaaaagcagcccttggccagaagtcaagcccagccacgtggagcctagagtgagggcctgaggtctggctgcttgcccccatgctggcgccaacaacttctccatcctttctgcctctcaacatcacttgaatcctagggcctgggttttcatgtttttgaaacagaaccataaagcatatgtgttggcttgttgtaaaa

SEQ ID NO: 14424 - DNA, 9156 bp, Homo sapiens
ctggccagcagcgtcgtcatgggcttggtgggcacctacagctgcttctggaccagtgagtgggcccaggccgaggcaggcccgcccgggtacccatgcccggccggaggtgggacttagggtgggggacgccgcggccccgacctagcgggcgagcccggagcgcctgacttctccttccccgccagagtacatgaaccacctgaccgtgcacaacagggaggtgctgtacgagctcatcgagaagcgaggcccggccacgcccctcatcaccgtgtccaatcaccagtcctgcatggacgaccctcatctctggggtacccgggccagtgtgctgggcagggggaggaaaggcgaggattcgggacgggcccagcctcgtcagaacaaaccccttctcgctgccttttcatggagccctggcactccggtttccgggcgttctgccccagggctgagacttggatttgtggctcctgcagcatccctgagggagcatgatttggagagggccttgggcatggagcaggaccaaggaacggccacagggcatatcttacagctcctttaacgtcaggcctccagaaccctctgttctctaaaccatccagggccccacagtcttgggaaaaatttgggggttggacataggatatcctgtgaggaagttctgggccagggactggaagcccagtgtcctggcttcaggtttgcccctggctgggcgtgtaccgttcagccctatttgggagcctggttgccacacctagaggttcctgctctgctgacttcacaggaagttgcttggctctggtaaccagatggccgggtggaggggtgcctggggcttccactcctgaacagagagcttaactgtcctagagttcatggggagccacctagccacactggagcccttcagagctcaccctggctgctgggtggagaaaggcctatagatgtcacaggtggatcctgggaggccaggaaggaggacttggagccatccactagcctagactgggctggttgcagtgacagtacagggagaagtatagaagaatgggcattgtccaagtatgttggggaggtaggcagtccaggtgcagtgattagtaagatgtggagggtgggggagagggaggagccagggagaactgaatgatctggcctaagggtctgaaagatgccactttgggctgtagggaaatggtagtgctgctgtccctcattccctgagatggggtgaaggaagggcactccctggggatatgggaagttggggcatgaagcctttcctgtcctctagggatcctgaaactccgccacatctggaacctgaagttgatgcgttggtgaggaggaatgggcccctcgaagtgggccgggccggccccacctgcctctgcccagatttgccctcctcctgctctgcccaggaggtggcgtccagcagtccaggcagggcatggggtggggccccgcaggccctcccctgtgcctcccttctgcatgctgatgctgggggcagggtggtggagcggggtgcagggggcaggactaattgcatctgtccctgcttaggacccctgcagctgcagacatctgcttcaccaaggagctacactcccacttcttcagcttgggcaagtgtgtgcctgtgtgccgaggtgagctgctcctccagcgagtgcagggaggcacttctggggcaggaaagctggtggccagtgtctctgttttggagggacctatgggggtaggcatcccgggagccaacatgaggcccagctccatcacatgccagcagaggggacagaggctgtgggaggagggatgggtccttggaaagtcctcaactctctgcaactgcccagggatcctgtggacctggagccttggcattagaattcaaggaggcattatccataaccccttctctcagggatgtcactaagagactcattgagaacagtgcgttgtcattggtccatggtggcagtagcatgtacctgcaggccagagggttttgcttctaggagaacaaacaggcttgtggggtgagaaccccaggggataggggccattttgatccctattctccagacagggaggatcacagagattaagctgctggcccaaggtcatggggtaggaggtggcaaagccaggatttgaatccagattgctccttcctctgcaggagcagaatttttccaagcagagaatgaggggaaaggtgttctagacacaggcaggcacatgccaggtgctggaaaaagaagagagaaaggtaagccaggcatagcggttcacacttgtcatcccagcactttgtgaggtcgaggtgagaggatcactcaagcccaggagtttgagaccagcctgggcaacatagtaagaccctgtctctttaaaaataaaaatattttaaacaaaagaaaggtagaaaatatgagttgtatgtagaatatgaaggttctagaataatcctattaagaattttggattctggctgggcgcggtggctcacgcctgtaatcccagcactttgggaggctgaggccagcggatcacgaggtcaggagatcgagaccatcctggctaacacggtgaaaccccgtctctactaaaaatacaaaaaattagctgggcatggtagtgggcgcctgtagtcccagctactcgggaggctgaggcaggagaatggcgtgaacccggaaggtggagcttgcagtgagccaagatcacgccactgcactccagcctgggtgacagagtgagactccgtctcaaaaaaaaaaaaaaaagtgccggccacggtggctcatgcctgtaatcccagcactctgggaggccgaggcgggcggatcacgaggtcaggaattcgagaccagcctaaccaacatggtgaaaccccgtctctactaaaaatacaaaaattagccgggcgtggtggtgtgtgcctgtaatctcagctacttgggagactgagacgggagcattgcttgaacccgggaggtggaggttgtggtgagctgagatcctgccattgcactccagcctgggcaataagagcgaaactccgtctggaaaaaaaaaaaaaaaaaaagaattttgaattagctggctgcattggtgcatgcctacagtcccagctcctcaggaggctgaggtgggaggatcacttgagccctcgattttctttttccttgagacaatgtctgtttctgttgtccaggctggagtgccgtggcgtgatgatggctcactgcagcttctgtttcctgggttcaagggatcctgtcacctcagcctcctgagcagctgggactaaggagtgtgcccagctaattcttttttttttttggtagagttggggtcttactacattgccagggctggtcttgaactcctagactcaagcgatcctcccgcctcagcctctcaaagtgctgggatcacaggcatgagccattgtgcccaacccagcccaggaatttgaggccagcctgagcaatatagtgagaccccaggtatagatagataggtagatagataggtaggtaggtaggtagatagatagataggtaggtgggtaggtaggtgggtagataggtaggtaggtacgtaggtagatagatagatagatacatacatacatagatagataagatagatagattgattagatagattagatagccaggtggggtggctcacgcctgtaatcccagtgctttgggaggctgaggtgggtggatcacctgaggtcaggagtttgagaccagcctggctaatgtggcgaaaccctgtctactaaaaatacaaaaattagctggatgtggtggcgcacgcctgtaatctcagctactcgggaggctggggtgggagaatcgcttgaacccaggaggtggaggttgcagtgagctgagatcatgccactgcactccagcctgggccacagagggagacctggtctcaaaaaaaaaaaaaaaaaaaaaaaagatttttgtatttgactgtgctctctcatccaggtggtgacatgcttgtatctgtggttaagaggtagcatctgccaggcgcggtggctcatgcctgtaatcccagtactttgcgaggccgaggcgggtggttcacctgaggtcaggagtttgagaccagcctgaccaacatggcgaaaccccgtctctactaaaaatataaaaattagccgaggctgggcgcggtggctcacgcctgtaatcccagcactttgggaggccgaggcgggtggatcacgaggtcaggagatcgagaccatcctggctaacaggatgaaaccccgtctctactaaaaacacaaaattagctgggcatggtggcaggtgcctgtagtcccagctactcgggaggctgaggcaggagaatggcacaaacccgggaggcggagcttgaggcaggagaatggcgtgaacccgggaggcagagcttgctatgagcagagatcgcgccactgcactccagcctgggtgacagagcgagactccgtctcaaaaaaaaaaaaaagagagagataccattccagttgcaatgtggctgcagcagggctaggtggacatgaggagcccagttcagggctgtcacagtagctccagcagcagatgattgtggctgggcctcccaagtgtcacgttggagaaccggagaaggggacttctttgggatgtactctggacttgttgatagattaagtgtaggtggggtgaggaagagaactcaaagatgacaccaggtgttggagctgagccacggggagaagggtgcaaagggaaagcagtgcgggggctgggaggggagagggtcagtcctgttttgcttgtgctgcatctgaggagcccctcacctgtggaaggagagcagtcccagaggcagtggggtgtgcagttctggaacttagaagaatgatcagggggctgggtgcagtggctcacgcctgtaatcccagcactttgggaggccgaggcgggcggatcaagaggtcaggagattgagaccatcctggctaacatggtgaaaccccgtctctactaaaaatataaaaaattagcagcgcatggtggcaggcacctgtagtcccagctattcaggaggctgaggcaggagagtggcgtgaacccgggagacggagcttgcagtgagctgagattgcgccactgcactccagcctgggcgacagagcgagactccgtctcaaaaaaaaaaaaaacaaaaaattatcaggaataaagatactgggaattcaaccacaaaaaccacaaagtcacgaatgcagagtgagagtcttcagagagagggcagaggcccaggatggcacagagggagagagaagccaccaagatggcagggagccatggccagagagaaaagcaaaccaggcgcctgtggcaccatggaagcagcaggtgatgctggagaagcgtttccatgcagtgacagctgccagagccagattattatggcctgagggctggtggtgctgcagttgggggggaatggagaccgcagcgggggaatggagaccgcaggggcggcaactcctcccagaggttcagtttggaggaaaaagagacagaaggaagggtaaccaaaggatattagaggtcaaggaggggtttattatttctagctggtcaaagtagaatgtggtaaaacccaataaagtaacagcaaataacaaagaggggcttttaatggaaagctgcagtgcctgcccctcacctccctagccccactcctcagaagcagccccctggagcggtttctctttctgctgcttttggaggctacttctgtctctgtaaaggaacttctgtctctgtaaaggaacaagcagaggccacagtgtcttggcaaatgaccgtggcattgtttatcccaacctgctctgagagatggggactctgctgattcacccctcgtccctgcctctttagttccttcagcaaagaactaataatatgtcattaaggcaaaggcagtatttggcacacttggcttctgtgttccaaaaaattccctttttctccaagcgtagattttaatatggtatttaagtatcaaagtgatttgacacaagtgacacaagtgagcagtagtagcatttgcaaaagctacaaatgatgaagtcttgctccaaaagcatattattattattttttaaattccagtttcaagctcaatggataggttgcgtcagtgggttttagtagagaaggggccagtacctatgaagactcccctgtactattacacatgctgcgtcccaagtagggaaactccagtgggtcatcaccccctccctctagcccaagtgggctgctgggtcagggcactgtttgggttgggttgagattcctggatccctaactagcaccttccaaagaatcggccttgcagagaacaaagttcattgccaaaggtattcccaatgtctgtctctcgctctgtgatagggcttctttactccccactttataagatgaggatatctgctataccccattccttcaacctctccacctctttcctcttttgtctgccatgtgattacttttccatcaccaaggttgatgagatccttactgtgtacttactgtctccaagcatccccaggcttccagccagcacgcagcagccaacattggcttcagaaggaaggaggtttgcatttccttctcttgggtccagtgccatggtctcagggttatctccaatgtggaaagttgctagaccaggagcagtttgactccactgtttttcagtctagcaagtttgagtttttcccaagctcttgatgtgtgttcaaatgaatgttctccctttcccaagagacctccctataagggagggtctagtttcccggggtgccctgagaagaaggggtcagcaggggggaggaatggtggaggctgaggcctcaggcaggtgccctgtgaggagtggctgtgacaagcggctgagatcccagcaaagggttgttgcccagaatctggggcctaagcgaggttggaaatcacaaatgcacttggtttctctagcagctggcacatagtaggatcagcccaggagtggcaccttcaaagagaaaggaacgcatgaggctccgagagcggtcggctggcagccagggcctggctggggagggagggcaggtggtgcgctgacctggggatctttgagagtgtgcaggagtatgtggctgaagcggcccagctggtgagccactgaagatgggggtcataggtagatggaggaattgccaggtcagaatctcggtaggagatgacttgagctgatgctgcctggcacataggggtttagaagatattaggaaggaagccccacagcgtgcccaagtgccatgcaggccctggagacggtcattggagggcgtctgtggatggcgcagtgggggatgggaagtccctaatctgctggggctttcccagcaagcagggactgagggggatagtccccaacacatgggccccagggagaagggcctgtttcattgaggtttggagagtgttgagggtaagctaacctgtcaccccacgcccccgagaatggttactgatagggagaggccttttccttgcaggagatggcgtctaccagaaggggatggacttcattttggagaagctcaaccatggggactgggtgcatatcttcccagaaggtcagcagggctgactgggtcgagcccccccagtatgagcgggatgggctcccaagcctcgcctctgtgctctctcaccagggaaagtgaacatgagttccgaattcctgcgtttcaagtggggtaagggctgctggtctctggccacagccatcctcccggcccagagatggccctgtgggcccctggctcccgccccctcgggctggcttgtatgggggtagatgggcgtgtttgtagcgccaggaaggggacaggtgctgagactaggcctgcctctcgcaggggcttgcccaagggagctgaattgaactggaggatgtcgggggtggcagtggccagaggctggcacagaagcttggctcagggcccagcttatgctaacatttctacctcccccctgggcaggaatcgggcgcctgattgctgagtgtcatctcaaccccatcatcctgcccctgtggcatgtcggtgagcctggggacggggacagagagatggcatctggggtggggggcctgggactccctctggtcccaggctgccctgctccaccccacgtctggccttctgtccactgtgctgcaggaatgaatgacgtccttcctaacagtccgccctacttcccccgctttggacaggtgggtggggactgctgaccttcggctgtctgcctgtctgctgtctgctccgtgtctcccactcagcactatggaggccagctgcaggaggagctgagcatgaggctacagcaggggacagagtggaacatagacagggacttcctggcaccgagacattaaaatgagagcagaggaagtcaggctggggcagaggtgggctgtggggtcaggacaggacaggtcatctacagcacaggacccaggaccaggaccttgttttagaggaagagtggcccctggggagtgtgtggcacagcagggccggggcttagcttctggctcccgggttgcttgggctggggctgtgggcactcctactgctcctcatcactcttggcggccaccccacagaaaatcactgtgctgatcgggaagcccttcagtgccctgcctgtactcgagcggctccgggcggagaacaagtcggctgtgagtttcctcctgggtcccccgtagctgtccccggaccccctgctgctggcttccagcagggtgcctccaccctctccatcccgtcaccctcccagggcaccctcccagggcaccttggccaagcttcccgaggggtgcaggccatccctggtcctttccctcaggtggagatgcggaaagccctgacggacttcattcaagaggaattccagcatctgaagactcaggcagagcagctccacaaccacctccagcctgggagataggccttgcttgctgccttctggattcttggcccgcacagagctggggctg

SEQ ID NO: 14425 - DNA, 832 bp, Homo sapiens
ctggccagcagcgtcgtcatgggcttggtgggcacctacagctgcttctggaccaggatcctgaaactccgccacatctggaacctgaagttgatgcgttggtgaggaggaatgggcccctcgaagtgggccgggccggccccacctgcctctgcccagatttgccctcctcctgctctgcccaggaggacccctgcagctgcagacatctgcttcaccaaggagctacactcccacttcttcagcttgggcaagtgtgtgcctgtgtgccgaggagcagaatttttccaagcagagaatgaggggaaaggtgttctagacacaggcaggcacatgccaggtgctggaaaaagaagagagaaaggagatggcgtctaccagaaggggatggacttcattttggagaagctcaaccatggggactgggtgcatatcttcccagaagggaaagtgaacatgagttccgaattcctgcgtttcaagtggggaatcgggcgcctgattgctgagtgtcatctcaaccccatcatcctgcccctgtggcatgtcggaatgaatgacgtccttcctaacagtccgccctacttcccccgctttggacagaaaatcactgtgctgatcgggaagcccttcagtgccctgcctgtactcgagcggctccgggcggagaacaagtcggctgtggagatgcggaaagccctgacggacttcattcaagaggaattccagcatctgaagactcaggcagagcagctccacaaccacctccagcctgggagataggccttgcttgctgccttctggattcttggcccgcacagagctggggctg

SEQ ID NO: 14426 - DNA, 9330 bp, Homo sapiens
ccgcccgggtacccatgcccggccggaggtgggacttagggtgggggacgccgcggccccgacctagcgggcgagcccggagcgcctgacttctccttccccgccagagtacatgaaccacctgaccgtgcacaacagggaggtgctgtacgagctcatcgagaagcgaggcccggccacgcccctcatcaccgtgtccaatcaccagtcctgcatggacgaccctcatctctggggtacccgggccagtgtgctgggcagggggaggaaaggcgaggattcgggacgggcccagcctcgtcagaacaaaccccttctcgctgccttttcatggagccctggcactccggtttccgggcgttctgccccagggctgagacttggatttgtggctcctgcagcatccctgagggagcatgatttggagagggccttgggcatggagcaggaccaaggaacggccacagggcatatcttacagctcctttaacgtcaggcctccagaaccctctgttctctaaaccatccagggccccacagtcttgggaaaaatttgggggttggacataggatatcctgtgaggaagttctgggccagggactggaagcccagtgtcctggcttcaggtttgcccctggctgggcgtgtaccgttcagccctatttgggagcctggttgccacacctagaggttcctgctctgctgacttcacaggaagttgcttggctctggtaaccagatggccgggtggaggggtgcctggggcttccactcctgaacagagagcttaactgtcctagagttcatggggagccacctagccacactggagcccttcagagctcaccctggctgctgggtggagaaaggcctatagatgtcacaggtggatcctgggaggccaggaaggaggacttggagccatccactagcctagactgggctggttgcagtgacagtacagggagaagtatagaagaatgggcattgtccaagtatgttggggaggtaggcagtccaggtgcagtgattagtaagatgtggagggtgggggagagggaggagccagggagaactgaatgatctggcctaagggtctgaaagatgccactttgggctgtagggaaatggtagtgctgctgtccctcattccctgagatggggtgaaggaagggcactccctggggatatgggaagttggggcatgaagcctttcctgtcctctagggatcctgaaactccgccacatctggaacctgaagttgatgcgttggtgaggaggaatgggcccctcgaagtgggccgggccggccccacctgcctctgcccagatttgccctcctcctgctctgcccaggaggtggcgtccagcagtccaggcagggcatggggtggggccccgcaggccctcccctgtgcctcccttctgcatgctgatgctgggggcagggtggtggagcggggtgcagggggcaggactaattgcatctgtccctgcttaggacccctgcagctgcagacatctgcttcaccaaggagctacactcccacttcttcagcttgggcaagtgtgtgcctgtgtgccgaggtgagctgctcctccagcgagtgcagggaggcacttctggggcaggaaagctggtggccagtgtctctgttttggagggacctatgggggtaggcatcccgggagccaacatgaggcccagctccatcacatgccagcagaggggacagaggctgtgggaggagggatgggtccttggaaagtcctcaactctctgcaactgcccagggatcctgtggacctggagccttggcattagaattcaaggaggcattatccataaccccttctctcagggatgtcactaagagactcattgagaacagtgcgttgtcattggtccatggtggcagtagcatgtacctgcaggccagagggttttgcttctaggagaacaaacaggcttgtggggtgagaaccccaggggataggggccattttgatccctattctccagacagggaggatcacagagattaagctgctggcccaaggtcatggggtaggaggtggcaaagccaggatttgaatccagattgctccttcctctgcaggagcagaatttttccaagcagagaatgaggggaaaggtgttctagacacaggcaggcacatgccaggtgctggaaaaagaagagagaaaggtaagccaggcatagcggttcacacttgtcatcccagcactttgtgaggtcgaggtgagaggatcactcaagcccaggagtttgagaccagcctgggcaacatagtaagaccctgtctctttaaaaataaaaatattttaaacaaaagaaaggtagaaaatatgagttgtatgtagaatatgaaggttctagaataatcctattaagaattttggattctggctgggcgcggtggctcacgcctgtaatcccagcactttgggaggctgaggccagcggatcacgaggtcaggagatcgagaccatcctggctaacacggtgaaaccccgtctctactaaaaatacaaaaaattagctgggcatggtagtgggcgcctgtagtcccagctactcgggaggctgaggcaggagaatggcgtgaacccggaaggtggagcttgcagtgagccaagatcacgccactgcactccagcctgggtgacagagtgagactccgtctcaaaaaaaaaaaaaaaagtgccggccacggtggctcatgcctgtaatcccagcactctgggaggccgaggcgggcggatcacgaggtcaggaattcgagaccagcctaaccaacatggtgaaaccccgtctctactaaaaatacaaaaattagccgggcgtggtggtgtgtgcctgtaatctcagctacttgggagactgagacgggagcattgcttgaacccgggaggtggaggttgtggtgagctgagatcctgccattgcactccagcctgggcaataagagcgaaactccgtctggaaaaaaaaaaaaaaaaaaagaattttgaattagctggctgcattggtgcatgcctacagtcccagctcctcaggaggctgaggtgggaggatcacttgagccctcgattttctttttccttgagacaatgtctgtttctgttgtccaggctggagtgccgtggcgtgatgatggctcactgcagcttctgtttcctgggttcaagggatcctgtcacctcagcctcctgagcagctgggactaaggagtgtgcccagctaattcttttttttttttggtagagttggggtcttactacattgccagggctggtcttgaactcctagactcaagcgatcctcccgcctcagcctctcaaagtgctgggatcacaggcatgagccattgtgcccaacccagcccaggaatttgaggccagcctgagcaatatagtgagaccccaggtatagatagataggtagatagataggtaggtaggtaggtagatagatagataggtaggtgggtaggtaggtgggtagataggtaggtaggtacgtaggtagatagatagatagatacatacatacatagatagataagatagatagattgattagatagattagatagccaggtggggtggctcacgcctgtaatcccagtgctttgggaggctgaggtgggtggatcacctgaggtcaggagtttgagaccagcctggctaatgtggcgaaaccctgtctactaaaaatacaaaaattagctggatgtggtggcgcacgcctgtaatctcagctactcgggaggctggggtgggagaatcgcttgaacccaggaggtggaggttgcagtgagctgagatcatgccactgcactccagcctgggccacagagggagacctggtctcaaaaaaaaaaaaaaaaaaaaaaaagatttttgtatttgactgtgctctctcatccaggtggtgacatgcttgtatctgtggttaagaggtagcatctgccaggcgcggtggctcatgcctgtaatcccagtactttgcgaggccgaggcgggtggttcacctgaggtcaggagtttgagaccagcctgaccaacatggcgaaaccccgtctctactaaaaatataaaaattagccgaggctgggcgcggtggctcacgcctgtaatcccagcactttgggaggccgaggcgggtggatcacgaggtcaggagatcgagaccatcctggctaacaggatgaaaccccgtctctactaaaaacacaaaattagctgggcatggtggcaggtgcctgtagtcccagctactcgggaggctgaggcaggagaatggcacaaacccgggaggcggagcttgaggcaggagaatggcgtgaacccgggaggcagagcttgctatgagcagagatcgcgccactgcactccagcctgggtgacagagcgagactccgtctcaaaaaaaaaaaaaagagagagataccattccagttgcaatgtggctgcagcagggctaggtggacatgaggagcccagttcagggctgtcacagtagctccagcagcagatgattgtggctgggcctcccaagtgtcacgttggagaaccggagaaggggacttctttgggatgtactctggacttgttgatagattaagtgtaggtggggtgaggaagagaactcaaagatgacaccaggtgttggagctgagccacggggagaagggtgcaaagggaaagcagtgcgggggctgggaggggagagggtcagtcctgttttgcttgtgctgcatctgaggagcccctcacctgtggaaggagagcagtcccagaggcagtggggtgtgcagttctggaacttagaagaatgatcagggggctgggtgcagtggctcacgcctgtaatcccagcactttgggaggccgaggcgggcggatcaagaggtcaggagattgagaccatcctggctaacatggtgaaaccccgtctctactaaaaatataaaaaattagcagcgcatggtggcaggcacctgtagtcccagctattcaggaggctgaggcaggagagtggcgtgaacccgggagacggagcttgcagtgagctgagattgcgccactgcactccagcctgggcgacagagcgagactccgtctcaaaaaaaaaaaaaacaaaaaattatcaggaataaagatactgggaattcaaccacaaaaaccacaaagtcacgaatgcagagtgagagtcttcagagagagggcagaggcccaggatggcacagagggagagagaagccaccaagatggcagggagccatggccagagagaaaagcaaaccaggcgcctgtggcaccatggaagcagcaggtgatgctggagaagcgtttccatgcagtgacagctgccagagccagattattatggcctgagggctggtggtgctgcagttgggggggaatggagaccgcagcgggggaatggagaccgcaggggcggcaactcctcccagaggttcagtttggaggaaaaagagacagaaggaagggtaaccaaaggatattagaggtcaaggaggggtttattatttctagctggtcaaagtagaatgtggtaaaacccaataaagtaacagcaaataacaaagaggggcttttaatggaaagctgcagtgcctgcccctcacctccctagccccactcctcagaagcagccccctggagcggtttctctttctgctgcttttggaggctacttctgtctctgtaaaggaacttctgtctctgtaaaggaacaagcagaggccacagtgtcttggcaaatgaccgtggcattgtttatcccaacctgctctgagagatggggactctgctgattcacccctcgtccctgcctctttagttccttcagcaaagaactaataatatgtcattaaggcaaaggcagtatttggcacacttggcttctgtgttccaaaaaattccctttttctccaagcgtagattttaatatggtatttaagtatcaaagtgatttgacacaagtgacacaagtgagcagtagtagcatttgcaaaagctacaaatgatgaagtcttgctccaaaagcatattattattattttttaaattccagtttcaagctcaatggataggttgcgtcagtgggttttagtagagaaggggccagtacctatgaagactcccctgtactattacacatgctgcgtcccaagtagggaaactccagtgggtcatcaccccctccctctagcccaagtgggctgctgggtcagggcactgtttgggttgggttgagattcctggatccctaactagcaccttccaaagaatcggccttgcagagaacaaagttcattgccaaaggtattcccaatgtctgtctctcgctctgtgatagggcttctttactccccactttataagatgaggatatctgctataccccattccttcaacctctccacctctttcctcttttgtctgccatgtgattacttttccatcaccaaggttgatgagatccttactgtgtacttactgtctccaagcatccccaggcttccagccagcacgcagcagccaacattggcttcagaaggaaggaggtttgcatttccttctcttgggtccagtgccatggtctcagggttatctccaatgtggaaagttgctagaccaggagcagtttgactccactgtttttcagtctagcaagtttgagtttttcccaagctcttgatgtgtgttcaaatgaatgttctccctttcccaagagacctccctataagggagggtctagtttcccggggtgccctgagaagaaggggtcagcaggggggaggaatggtggaggctgaggcctcaggcaggtgccctgtgaggagtggctgtgacaagcggctgagatcccagcaaagggttgttgcccagaatctggggcctaagcgaggttggaaatcacaaatgcacttggtttctctagcagctggcacatagtaggatcagcccaggagtggcaccttcaaagagaaaggaacgcatgaggctccgagagcggtcggctggcagccagggcctggctggggagggagggcaggtggtgcgctgacctggggatctttgagagtgtgcaggagtatgtggctgaagcggcccagctggtgagccactgaagatgggggtcataggtagatggaggaattgccaggtcagaatctcggtaggagatgacttgagctgatgctgcctggcacataggggtttagaagatattaggaaggaagccccacagcgtgcccaagtgccatgcaggccctggagacggtcattggagggcgtctgtggatggcgcagtgggggatgggaagtccctaatctgctggggctttcccagcaagcagggactgagggggatagtccccaacacatgggccccagggagaagggcctgtttcattgaggtttggagagtgttgagggtaagctaacctgtcaccccacgcccccgagaatggttactgatagggagaggccttttccttgcaggagatggcgtctaccagaaggggatggacttcattttggagaagctcaaccatggggactgggtgcatatcttcccagaaggtcagcagggctgactgggtcgagcccccccagtatgagcgggatgggctcccaagcctcgcctctgtgctctctcaccagggaaagtgaacatgagttccgaattcctgcgtttcaagtggggtaagggctgctggtctctggccacagccatcctcccggcccagagatggccctgtgggcccctggctcccgccccctcgggctggcttgtatgggggtagatgggcgtgtttgtagcgccaggaaggggacaggtgctgagactaggcctgcctctcgcaggggcttgcccaagggagctgaattgaactggaggatgtcgggggtggcagtggccagaggctggcacagaagcttggctcagggcccagcttatgctaacatttctacctcccccctgggcaggaatcgggcgcctgattgctgagtgtcatctcaaccccatcatcctgcccctgtggcatgtcggtgagcctggggacggggacagagagatggcatctggggtggggggcctgggactccctctggtcccaggctgccctgctccaccccacgtctggccttctgtccactgtgctgcaggaatgaatgacgtccttcctaacagtccgccctacttcccccgctttggacaggtgggtggggactgctgaccttcggctgtctgcctgtctgctgtctgctccgtgtctcccactcagcactatggaggccagctgcaggaggagctgagcatgaggctacagcaggggacagagtggaacatagacagggacttcctggcaccgagacattaaaatgagagcagaggaagtcaggctggggcagaggtgggctgtggggtcaggacaggacaggtcatctacagcacaggacccaggaccaggaccttgttttagaggaagagtggcccctggggagtgtgtggcacagcagggccggggcttagcttctggctcccgggttgcttgggctggggctgtgggcactcctactgctcctcatcactcttggcggccaccccacagaaaatcactgtgctgatcgggaagcccttcagtgccctgcctgtactcgagcggctccgggcggagaacaagtcggctgtgagtttcctcctgggtcccccgtagctgtccccggaccccctgctgctggcttccagcagggtgcctccaccctctccatcccgtcaccctcccagggcaccctcccagggcaccttggccaagcttcccgaggggtgcaggccatccctggtcctttccctcaggtggagatgcggaaagccctgacggacttcattcaagaggaattccagcatctgaagactcaggcagagcagctccacaaccacctccagcctgggagataggccttgcttgctgccttctggattcttggcccgcacagagctggggctgagggatggactgatgcttttagctcaaacgtggcttttagacagatttgttcatagaccctctcaagtgccctctccgagctggtaggcattccagctcctccgtgcttcctcagttacacaaaggacctcagctgcttctcccacttggccaagcagggaggaagaagcttaggcagggctctctttccttcttgccttcagatgttctctcccaggggctggcttcaggagggagcatagaaggcaggtgagc

SEQ ID NO: 14427 - DNA, 1102 bp, Homo sapiens
ccgcccgggtacccatgcccggccggagagtacatgaaccacctgaccgtgcacaacagggaggtgctgtacgagctcatcgagaagcgaggcccggccacgcccctcatcaccgtgtccaatcaccagtcctgcatggacgaccctcatctctgggggatcctgaaactccgccacatctggaacctgaagttgatgcgttggacccctgcagctgcagacatctgcttcaccaaggagctacactcccacttcttcagcttgggcaagtgtgtgcctgtgtgccgaggagcagaatttttccaagcagagaatgaggggaaaggtgttctagacacaggcaggcacatgccaggtgctggaaaaagaagagagaaaggagatggcgtctaccagaaggggatggacttcattttggagaagctcaaccatggggactgggtgcatatcttcccagaagggaaagtgaacatgagttccgaattcctgcgtttcaagtggggaatcgggcgcctgattgctgagtgtcatctcaaccccatcatcctgcccctgtggcatgtcggaatgaatgacgtccttcctaacagtccgccctacttcccccgctttggacagaaaatcactgtgctgatcgggaagcccttcagtgccctgcctgtactcgagcggctccgggcggagaacaagtcggctgtggagatgcggaaagccctgacggacttcattcaagaggaattccagcatctgaagactcaggcagagcagctccacaaccacctccagcctgggagataggccttgcttgctgccttctggattcttggcccgcacagagctggggctgagggatggactgatgcttttagctcaaacgtggcttttagacagatttgttcatagaccctctcaagtgccctctccgagctggtaggcattccagctcctccgtgcttcctcagttacacaaaggacctcagctgcttctcccacttggccaagcagggaggaagaagcttaggcagggctctctttccttcttgccttcagatgttctctcccaggggctggcttcaggagggagcatagaaggcaggtgagc

SEQ ID NO: 14428 - DNA, 10024 bp, Homo sapiens
gcgaagggacctcggtccagtcccctgttgcgccgcgcccccgtccgtccgtgcgcgggccagtcaggggccagtgtctcgagcggtcgaggtcgcagacctagaggcgccccacaggccggcccggggcgctgggagcgccggccgcgggccgggtggggatgcctctgcacgtgaagtggccgttccccgcggtgccgccgctcacctggaccctggccagcagcgtcgtcatgggcttggtgggcacctacagctgcttctggaccagtgagtgggcccaggccgaggcaggcccgcccgggtacccatgcccggccggaggtgggacttagggtgggggacgccgcggccccgacctagcgggcgagcccggagcgcctgacttctccttccccgccagagtacatgaaccacctgaccgtgcacaacagggaggtgctgtacgagctcatcgagaagcgaggcccggccacgcccctcatcaccgtgtccaatcaccagtcctgcatggacgaccctcatctctggggtacccgggccagtgtgctgggcagggggaggaaaggcgaggattcgggacgggcccagcctcgtcagaacaaaccccttctcgctgccttttcatggagccctggcactccggtttccgggcgttctgccccagggctgagacttggatttgtggctcctgcagcatccctgagggagcatgatttggagagggccttgggcatggagcaggaccaaggaacggccacagggcatatcttacagctcctttaacgtcaggcctccagaaccctctgttctctaaaccatccagggccccacagtcttgggaaaaatttgggggttggacataggatatcctgtgaggaagttctgggccagggactggaagcccagtgtcctggcttcaggtttgcccctggctgggcgtgtaccgttcagccctatttgggagcctggttgccacacctagaggttcctgctctgctgacttcacaggaagttgcttggctctggtaaccagatggccgggtggaggggtgcctggggcttccactcctgaacagagagcttaactgtcctagagttcatggggagccacctagccacactggagcccttcagagctcaccctggctgctgggtggagaaaggcctatagatgtcacaggtggatcctgggaggccaggaaggaggacttggagccatccactagcctagactgggctggttgcagtgacagtacagggagaagtatagaagaatgggcattgtccaagtatgttggggaggtaggcagtccaggtgcagtgattagtaagatgtggagggtgggggagagggaggagccagggagaactgaatgatctggcctaagggtctgaaagatgccactttgggctgtagggaaatggtagtgctgctgtccctcattccctgagatggggtgaaggaagggcactccctggggatatgggaagttggggcatgaagcctttcctgtcctctagggatcctgaaactccgccacatctggaacctgaagttgatgcgttggtgaggaggaatgggcccctcgaagtgggccgggccggccccacctgcctctgcccagatttgccctcctcctgctctgcccaggaggtggcgtccagcagtccaggcagggcatggggtggggccccgcaggccctcccctgtgcctcccttctgcatgctgatgctgggggcagggtggtggagcggggtgcagggggcaggactaattgcatctgtccctgcttaggacccctgcagctgcagacatctgcttcaccaaggagctacactcccacttcttcagcttgggcaagtgtgtgcctgtgtgccgaggtgagctgctcctccagcgagtgcagggaggcacttctggggcaggaaagctggtggccagtgtctctgttttggagggacctatgggggtaggcatcccgggagccaacatgaggcccagctccatcacatgccagcagaggggacagaggctgtgggaggagggatgggtccttggaaagtcctcaactctctgcaactgcccagggatcctgtggacctggagccttggcattagaattcaaggaggcattatccataaccccttctctcagggatgtcactaagagactcattgagaacagtgcgttgtcattggtccatggtggcagtagcatgtacctgcaggccagagggttttgcttctaggagaacaaacaggcttgtggggtgagaaccccaggggataggggccattttgatccctattctccagacagggaggatcacagagattaagctgctggcccaaggtcatggggtaggaggtggcaaagccaggatttgaatccagattgctccttcctctgcaggagcagaatttttccaagcagagaatgaggggaaaggtgttctagacacaggcaggcacatgccaggtgctggaaaaagaagagagaaaggtaagccaggcatagcggttcacacttgtcatcccagcactttgtgaggtcgaggtgagaggatcactcaagcccaggagtttgagaccagcctgggcaacatagtaagaccctgtctctttaaaaataaaaatattttaaacaaaagaaaggtagaaaatatgagttgtatgtagaatatgaaggttctagaataatcctattaagaattttggattctggctgggcgcggtggctcacgcctgtaatcccagcactttgggaggctgaggccagcggatcacgaggtcaggagatcgagaccatcctggctaacacggtgaaaccccgtctctactaaaaatacaaaaaattagctgggcatggtagtgggcgcctgtagtcccagctactcgggaggctgaggcaggagaatggcgtgaacccggaaggtggagcttgcagtgagccaagatcacgccactgcactccagcctgggtgacagagtgagactccgtctcaaaaaaaaaaaaaaaagtgccggccacggtggctcatgcctgtaatcccagcactctgggaggccgaggcgggcggatcacgaggtcaggaattcgagaccagcctaaccaacatggtgaaaccccgtctctactaaaaatacaaaaattagccgggcgtggtggtgtgtgcctgtaatctcagctacttgggagactgagacgggagcattgcttgaacccgggaggtggaggttgtggtgagctgagatcctgccattgcactccagcctgggcaataagagcgaaactccgtctggaaaaaaaaaaaaaaaaaaagaattttgaattagctggctgcattggtgcatgcctacagtcccagctcctcaggaggctgaggtgggaggatcacttgagccctcgattttctttttccttgagacaatgtctgtttctgttgtccaggctggagtgccgtggcgtgatgatggctcactgcagcttctgtttcctgggttcaagggatcctgtcacctcagcctcctgagcagctgggactaaggagtgtgcccagctaattcttttttttttttggtagagttggggtcttactacattgccagggctggtcttgaactcctagactcaagcgatcctcccgcctcagcctctcaaagtgctgggatcacaggcatgagccattgtgcccaacccagcccaggaatttgaggccagcctgagcaatatagtgagaccccaggtatagatagataggtagatagataggtaggtaggtaggtagatagatagataggtaggtgggtaggtaggtgggtagataggtaggtaggtacgtaggtagatagatagatagatacatacatacatagatagataagatagatagattgattagatagattagatagccaggtggggtggctcacgcctgtaatcccagtgctttgggaggctgaggtgggtggatcacctgaggtcaggagtttgagaccagcctggctaatgtggcgaaaccctgtctactaaaaatacaaaaattagctggatgtggtggcgcacgcctgtaatctcagctactcgggaggctggggtgggagaatcgcttgaacccaggaggtggaggttgcagtgagctgagatcatgccactgcactccagcctgggccacagagggagacctggtctcaaaaaaaaaaaaaaaaaaaaaaaagatttttgtatttgactgtgctctctcatccaggtggtgacatgcttgtatctgtggttaagaggtagcatctgccaggcgcggtggctcatgcctgtaatcccagtactttgcgaggccgaggcgggtggttcacctgaggtcaggagtttgagaccagcctgaccaacatggcgaaaccccgtctctactaaaaatataaaaattagccgaggctgggcgcggtggctcacgcctgtaatcccagcactttgggaggccgaggcgggtggatcacgaggtcaggagatcgagaccatcctggctaacaggatgaaaccccgtctctactaaaaacacaaaattagctgggcatggtggcaggtgcctgtagtcccagctactcgggaggctgaggcaggagaatggcacaaacccgggaggcggagcttgaggcaggagaatggcgtgaacccgggaggcagagcttgctatgagcagagatcgcgccactgcactccagcctgggtgacagagcgagactccgtctcaaaaaaaaaaaaaagagagagataccattccagttgcaatgtggctgcagcagggctaggtggacatgaggagcccagttcagggctgtcacagtagctccagcagcagatgattgtggctgggcctcccaagtgtcacgttggagaaccggagaaggggacttctttgggatgtactctggacttgttgatagattaagtgtaggtggggtgaggaagagaactcaaagatgacaccaggtgttggagctgagccacggggagaagggtgcaaagggaaagcagtgcgggggctgggaggggagagggtcagtcctgttttgcttgtgctgcatctgaggagcccctcacctgtggaaggagagcagtcccagaggcagtggggtgtgcagttctggaacttagaagaatgatcagggggctgggtgcagtggctcacgcctgtaatcccagcactttgggaggccgaggcgggcggatcaagaggtcaggagattgagaccatcctggctaacatggtgaaaccccgtctctactaaaaatataaaaaattagcagcgcatggtggcaggcacctgtagtcccagctattcaggaggctgaggcaggagagtggcgtgaacccgggagacggagcttgcagtgagctgagattgcgccactgcactccagcctgggcgacagagcgagactccgtctcaaaaaaaaaaaaaacaaaaaattatcaggaataaagatactgggaattcaaccacaaaaaccacaaagtcacgaatgcagagtgagagtcttcagagagagggcagaggcccaggatggcacagagggagagagaagccaccaagatggcagggagccatggccagagagaaaagcaaaccaggcgcctgtggcaccatggaagcagcaggtgatgctggagaagcgtttccatgcagtgacagctgccagagccagattattatggcctgagggctggtggtgctgcagttgggggggaatggagaccgcagcgggggaatggagaccgcaggggcggcaactcctcccagaggttcagtttggaggaaaaagagacagaaggaagggtaaccaaaggatattagaggtcaaggaggggtttattatttctagctggtcaaagtagaatgtggtaaaacccaataaagtaacagcaaataacaaagaggggcttttaatggaaagctgcagtgcctgcccctcacctccctagccccactcctcagaagcagccccctggagcggtttctctttctgctgcttttggaggctacttctgtctctgtaaaggaacttctgtctctgtaaaggaacaagcagaggccacagtgtcttggcaaatgaccgtggcattgtttatcccaacctgctctgagagatggggactctgctgattcacccctcgtccctgcctctttagttccttcagcaaagaactaataatatgtcattaaggcaaaggcagtatttggcacacttggcttctgtgttccaaaaaattccctttttctccaagcgtagattttaatatggtatttaagtatcaaagtgatttgacacaagtgacacaagtgagcagtagtagcatttgcaaaagctacaaatgatgaagtcttgctccaaaagcatattattattattttttaaattccagtttcaagctcaatggataggttgcgtcagtgggttttagtagagaaggggccagtacctatgaagactcccctgtactattacacatgctgcgtcccaagtagggaaactccagtgggtcatcaccccctccctctagcccaagtgggctgctgggtcagggcactgtttgggttgggttgagattcctggatccctaactagcaccttccaaagaatcggccttgcagagaacaaagttcattgccaaaggtattcccaatgtctgtctctcgctctgtgatagggcttctttactccccactttataagatgaggatatctgctataccccattccttcaacctctccacctctttcctcttttgtctgccatgtgattacttttccatcaccaaggttgatgagatccttactgtgtacttactgtctccaagcatccccaggcttccagccagcacgcagcagccaacattggcttcagaaggaaggaggtttgcatttccttctcttgggtccagtgccatggtctcagggttatctccaatgtggaaagttgctagaccaggagcagtttgactccactgtttttcagtctagcaagtttgagtttttcccaagctcttgatgtgtgttcaaatgaatgttctccctttcccaagagacctccctataagggagggtctagtttcccggggtgccctgagaagaaggggtcagcaggggggaggaatggtggaggctgaggcctcaggcaggtgccctgtgaggagtggctgtgacaagcggctgagatcccagcaaagggttgttgcccagaatctggggcctaagcgaggttggaaatcacaaatgcacttggtttctctagcagctggcacatagtaggatcagcccaggagtggcaccttcaaagagaaaggaacgcatgaggctccgagagcggtcggctggcagccagggcctggctggggagggagggcaggtggtgcgctgacctggggatctttgagagtgtgcaggagtatgtggctgaagcggcccagctggtgagccactgaagatgggggtcataggtagatggaggaattgccaggtcagaatctcggtaggagatgacttgagctgatgctgcctggcacataggggtttagaagatattaggaaggaagccccacagcgtgcccaagtgccatgcaggccctggagacggtcattggagggcgtctgtggatggcgcagtgggggatgggaagtccctaatctgctggggctttcccagcaagcagggactgagggggatagtccccaacacatgggccccagggagaagggcctgtttcattgaggtttggagagtgttgagggtaagctaacctgtcaccccacgcccccgagaatggttactgatagggagaggccttttccttgcaggagatggcgtctaccagaaggggatggacttcattttggagaagctcaaccatggggactgggtgcatatcttcccagaaggtcagcagggctgactgggtcgagcccccccagtatgagcgggatgggctcccaagcctcgcctctgtgctctctcaccagggaaagtgaacatgagttccgaattcctgcgtttcaagtggggtaagggctgctggtctctggccacagccatcctcccggcccagagatggccctgtgggcccctggctcccgccccctcgggctggcttgtatgggggtagatgggcgtgtttgtagcgccaggaaggggacaggtgctgagactaggcctgcctctcgcaggggcttgcccaagggagctgaattgaactggaggatgtcgggggtggcagtggccagaggctggcacagaagcttggctcagggcccagcttatgctaacatttctacctcccccctgggcaggaatcgggcgcctgattgctgagtgtcatctcaaccccatcatcctgcccctgtggcatgtcggtgagcctggggacggggacagagagatggcatctggggtggggggcctgggactccctctggtcccaggctgccctgctccaccccacgtctggccttctgtccactgtgctgcaggaatgaatgacgtccttcctaacagtccgccctacttcccccgctttggacaggtgggtggggactgctgaccttcggctgtctgcctgtctgctgtctgctccgtgtctcccactcagcactatggaggccagctgcaggaggagctgagcatgaggctacagcaggggacagagtggaacatagacagggacttcctggcaccgagacattaaaatgagagcagaggaagtcaggctggggcagaggtgggctgtggggtcaggacaggacaggtcatctacagcacaggacccaggaccaggaccttgttttagaggaagagtggcccctggggagtgtgtggcacagcagggccggggcttagcttctggctcccgggttgcttgggctggggctgtgggcactcctactgctcctcatcactcttggcggccaccccacagaaaatcactgtgctgatcgggaagcccttcagtgccctgcctgtactcgagcggctccgggcggagaacaagtcggctgtgagtttcctcctgggtcccccgtagctgtccccggaccccctgctgctggcttccagcagggtgcctccaccctctccatcccgtcaccctcccagggcaccctcccagggcaccttggccaagcttcccgaggggtgcaggccatccctggtcctttccctcaggtggagatgcggaaagccctgacggacttcattcaagaggaattccagcatctgaagactcaggcagagcagctccacaaccacctccagcctgggagataggccttgcttgctgccttctggattcttggcccgcacagagctggggctgagggatggactgatgcttttagctcaaacgtggcttttagacagatttgttcatagaccctctcaagtgccctctccgagctggtaggcattccagctcctccgtgcttcctcagttacacaaaggacctcagctgcttctcccacttggccaagcagggaggaagaagcttaggcagggctctctttccttcttgccttcagatgttctctcccaggggctggcttcaggagggagcatagaaggcaggtgagcaaccagttggctaggggagcagggggcccaccagagctgtggagaggggaccctaagactcctcggcctggctcctacccaccgcccttgccgaaccaggagctgctcactacctcctcagggatggccgttggccacgtcttccttctgcctgagcttcccccccaccacaggccctttcctcaggcaaggtctggcctcaggtgggccgcaggcgggaaaagcagcccttggccagaagtcaagcccagccacgtggagcctagagtgagggcctgaggtctggctgcttgcccccatgctggcgccaacaacttctccatcctttctgcctctcaacatcacttgaatcctagggcctgggttttcatgtttttgaaacagaaccataaagcata

SEQ ID NO: 14429 - DNA, 2247 bp, Homo sapiens
gcgaagggacctcggtccagtcccctgttgcgccgcgcccccgtccgtccgtgcgcgggccagtcaggggccagtgtctcgagcggtcgaggtcgcagacctagaggcgccccacaggccggcccggggcgctgggagcgccggccgcgggccgggtggggatgcctctgcacgtgaagtggccgttccccgcggtgccgccgctcacctggaccctggccagcagcgtcgtcatgggcttggtgggcacctacagctgcttctggaccaagtacatgaaccacctgaccgtgcacaacagggaggtgctgtacgagctcatcgagaagcgaggcccggccacgcccctcatcaccgtgtccaatcaccagtcctgcatggacgaccctcatctctgggggatcctgaaactccgccacatctggaacctgaagttgatgcgttggtgaggaggaatgggcccctcgaagtgggccgggccggccccacctgcctctgcccagatttgccctcctcctgctctgcccaggaggtggcgtccagcagtccaggcagggcatggggtggggccccgcaggccctcccctgtgcctcccttctgcatgctgatgctgggggcagggtggtggagcggggtgcagggggcaggactaattgcatctgtccctgcttaggacccctgcagctgcagacatctgcttcaccaaggagctacactcccacttcttcagcttgggcaagtgtgtgcctgtgtgccgaggagatggcgtctaccagaaggggatggacttcattttggagaagctcaaccatggggactgggtgcatatcttcccagaaggtcagcagggctgactgggtcgagcccccccagtatgagcgggatgggctcccaagcctcgcctctgtgctctctcaccagggaaagtgaacatgagttccgaattcctgcgtttcaagtggggtaagggctgctggtctctggccacagccatcctcccggcccagagatggccctgtgggcccctggctcccgccccctcgggctggcttgtatgggggtagatgggcgtgtttgtagcgccaggaaggggacaggtgctgagactaggcctgcctctcgcaggggcttgcccaagggagctgaattgaactggaggatgtcgggggtggcagtggccagaggctggcacagaagcttggctcagggcccagcttatgctaacatttctacctcccccctgggcaggaatcgggcgcctgattgctgagtgtcatctcaaccccatcatcctgcccctgtggcatgtcggaatgaatgacgtccttcctaacagtccgccctacttcccccgctttggacagaaaatcactgtgctgatcgggaagcccttcagtgccctgcctgtactcgagcggctccgggcggagaacaagtcggctgtggagatgcggaaagccctgacggacttcattcaagaggaattccagcatctgaagactcaggcagagcagctccacaaccacctccagcctgggagataggccttgcttgctgccttctggattcttggcccgcacagagctggggctgagggatggactgatgcttttagctcaaacgtggcttttagacagatttgttcatagaccctctcaagtgccctctccgagctggtaggcattccagctcctccgtgcttcctcagttacacaaaggacctcagctgcttctcccacttggccaagcagggaggaagaagcttaggcagggctctctttccttcttgccttcagatgttctctcccaggggctggcttcaggagggagcatagaaggcaggtgagcaaccagttggctaggggagcagggggcccaccagagctgtggagaggggaccctaagactcctcggcctggctcctacccaccgcccttgccgaaccaggagctgctcactacctcctcagggatggccgttggccacgtcttccttctgcctgagcttcccccccaccacaggccctttcctcaggcaaggtctggcctcaggtgggccgcaggcgggaaaagcagcccttggccagaagtcaagcccagccacgtggagcctagagtgagggcctgaggtctggctgcttgcccccatgctggcgccaacaacttctccatcctttctgcctctcaacatcacttgaatcctagggcctgggttttcatgtttttgaaacagaaccataaagcata

SEQ ID NO: 14430 - DNA, 7941 bp, Homo sapiens
gtgcctgtgtgccgaggtgagctgctcctccagcgagtgcagggaggcacttctggggcaggaaagctggtggccagtgtctctgttttggagggacctatgggggtaggcatcccgggagccaacatgaggcccagctccatcacatgccagcagaggggacagaggctgtgggaggagggatgggtccttggaaagtcctcaactctctgcaactgcccagggatcctgtggacctggagccttggcattagaattcaaggaggcattatccataaccccttctctcagggatgtcactaagagactcattgagaacagtgcgttgtcattggtccatggtggcagtagcatgtacctgcaggccagagggttttgcttctaggagaacaaacaggcttgtggggtgagaaccccaggggataggggccattttgatccctattctccagacagggaggatcacagagattaagctgctggcccaaggtcatggggtaggaggtggcaaagccaggatttgaatccagattgctccttcctctgcaggagcagaatttttccaagcagagaatgaggggaaaggtgttctagacacaggcaggcacatgccaggtgctggaaaaagaagagagaaaggtaagccaggcatagcggttcacacttgtcatcccagcactttgtgaggtcgaggtgagaggatcactcaagcccaggagtttgagaccagcctgggcaacatagtaagaccctgtctctttaaaaataaaaatattttaaacaaaagaaaggtagaaaatatgagttgtatgtagaatatgaaggttctagaataatcctattaagaattttggattctggctgggcgcggtggctcacgcctgtaatcccagcactttgggaggctgaggccagcggatcacgaggtcaggagatcgagaccatcctggctaacacggtgaaaccccgtctctactaaaaatacaaaaaattagctgggcatggtagtgggcgcctgtagtcccagctactcgggaggctgaggcaggagaatggcgtgaacccggaaggtggagcttgcagtgagccaagatcacgccactgcactccagcctgggtgacagagtgagactccgtctcaaaaaaaaaaaaaaaagtgccggccacggtggctcatgcctgtaatcccagcactctgggaggccgaggcgggcggatcacgaggtcaggaattcgagaccagcctaaccaacatggtgaaaccccgtctctactaaaaatacaaaaattagccgggcgtggtggtgtgtgcctgtaatctcagctacttgggagactgagacgggagcattgcttgaacccgggaggtggaggttgtggtgagctgagatcctgccattgcactccagcctgggcaataagagcgaaactccgtctggaaaaaaaaaaaaaaaaaaagaattttgaattagctggctgcattggtgcatgcctacagtcccagctcctcaggaggctgaggtgggaggatcacttgagccctcgattttctttttccttgagacaatgtctgtttctgttgtccaggctggagtgccgtggcgtgatgatggctcactgcagcttctgtttcctgggttcaagggatcctgtcacctcagcctcctgagcagctgggactaaggagtgtgcccagctaattcttttttttttttggtagagttggggtcttactacattgccagggctggtcttgaactcctagactcaagcgatcctcccgcctcagcctctcaaagtgctgggatcacaggcatgagccattgtgcccaacccagcccaggaatttgaggccagcctgagcaatatagtgagaccccaggtatagatagataggtagatagataggtaggtaggtaggtagatagatagataggtaggtgggtaggtaggtgggtagataggtaggtaggtacgtaggtagatagatagatagatacatacatacatagatagataagatagatagattgattagatagattagatagccaggtggggtggctcacgcctgtaatcccagtgctttgggaggctgaggtgggtggatcacctgaggtcaggagtttgagaccagcctggctaatgtggcgaaaccctgtctactaaaaatacaaaaattagctggatgtggtggcgcacgcctgtaatctcagctactcgggaggctggggtgggagaatcgcttgaacccaggaggtggaggttgcagtgagctgagatcatgccactgcactccagcctgggccacagagggagacctggtctcaaaaaaaaaaaaaaaaaaaaaaaagatttttgtatttgactgtgctctctcatccaggtggtgacatgcttgtatctgtggttaagaggtagcatctgccaggcgcggtggctcatgcctgtaatcccagtactttgcgaggccgaggcgggtggttcacctgaggtcaggagtttgagaccagcctgaccaacatggcgaaaccccgtctctactaaaaatataaaaattagccgaggctgggcgcggtggctcacgcctgtaatcccagcactttgggaggccgaggcgggtggatcacgaggtcaggagatcgagaccatcctggctaacaggatgaaaccccgtctctactaaaaacacaaaattagctgggcatggtggcaggtgcctgtagtcccagctactcgggaggctgaggcaggagaatggcacaaacccgggaggcggagcttgaggcaggagaatggcgtgaacccgggaggcagagcttgctatgagcagagatcgcgccactgcactccagcctgggtgacagagcgagactccgtctcaaaaaaaaaaaaaagagagagataccattccagttgcaatgtggctgcagcagggctaggtggacatgaggagcccagttcagggctgtcacagtagctccagcagcagatgattgtggctgggcctcccaagtgtcacgttggagaaccggagaaggggacttctttgggatgtactctggacttgttgatagattaagtgtaggtggggtgaggaagagaactcaaagatgacaccaggtgttggagctgagccacggggagaagggtgcaaagggaaagcagtgcgggggctgggaggggagagggtcagtcctgttttgcttgtgctgcatctgaggagcccctcacctgtggaaggagagcagtcccagaggcagtggggtgtgcagttctggaacttagaagaatgatcagggggctgggtgcagtggctcacgcctgtaatcccagcactttgggaggccgaggcgggcggatcaagaggtcaggagattgagaccatcctggctaacatggtgaaaccccgtctctactaaaaatataaaaaattagcagcgcatggtggcaggcacctgtagtcccagctattcaggaggctgaggcaggagagtggcgtgaacccgggagacggagcttgcagtgagctgagattgcgccactgcactccagcctgggcgacagagcgagactccgtctcaaaaaaaaaaaaaacaaaaaattatcaggaataaagatactgggaattcaaccacaaaaaccacaaagtcacgaatgcagagtgagagtcttcagagagagggcagaggcccaggatggcacagagggagagagaagccaccaagatggcagggagccatggccagagagaaaagcaaaccaggcgcctgtggcaccatggaagcagcaggtgatgctggagaagcgtttccatgcagtgacagctgccagagccagattattatggcctgagggctggtggtgctgcagttgggggggaatggagaccgcagcgggggaatggagaccgcaggggcggcaactcctcccagaggttcagtttggaggaaaaagagacagaaggaagggtaaccaaaggatattagaggtcaaggaggggtttattatttctagctggtcaaagtagaatgtggtaaaacccaataaagtaacagcaaataacaaagaggggcttttaatggaaagctgcagtgcctgcccctcacctccctagccccactcctcagaagcagccccctggagcggtttctctttctgctgcttttggaggctacttctgtctctgtaaaggaacttctgtctctgtaaaggaacaagcagaggccacagtgtcttggcaaatgaccgtggcattgtttatcccaacctgctctgagagatggggactctgctgattcacccctcgtccctgcctctttagttccttcagcaaagaactaataatatgtcattaaggcaaaggcagtatttggcacacttggcttctgtgttccaaaaaattccctttttctccaagcgtagattttaatatggtatttaagtatcaaagtgatttgacacaagtgacacaagtgagcagtagtagcatttgcaaaagctacaaatgatgaagtcttgctccaaaagcatattattattattttttaaattccagtttcaagctcaatggataggttgcgtcagtgggttttagtagagaaggggccagtacctatgaagactcccctgtactattacacatgctgcgtcccaagtagggaaactccagtgggtcatcaccccctccctctagcccaagtgggctgctgggtcagggcactgtttgggttgggttgagattcctggatccctaactagcaccttccaaagaatcggccttgcagagaacaaagttcattgccaaaggtattcccaatgtctgtctctcgctctgtgatagggcttctttactccccactttataagatgaggatatctgctataccccattccttcaacctctccacctctttcctcttttgtctgccatgtgattacttttccatcaccaaggttgatgagatccttactgtgtacttactgtctccaagcatccccaggcttccagccagcacgcagcagccaacattggcttcagaaggaaggaggtttgcatttccttctcttgggtccagtgccatggtctcagggttatctccaatgtggaaagttgctagaccaggagcagtttgactccactgtttttcagtctagcaagtttgagtttttcccaagctcttgatgtgtgttcaaatgaatgttctccctttcccaagagacctccctataagggagggtctagtttcccggggtgccctgagaagaaggggtcagcaggggggaggaatggtggaggctgaggcctcaggcaggtgccctgtgaggagtggctgtgacaagcggctgagatcccagcaaagggttgttgcccagaatctggggcctaagcgaggttggaaatcacaaatgcacttggtttctctagcagctggcacatagtaggatcagcccaggagtggcaccttcaaagagaaaggaacgcatgaggctccgagagcggtcggctggcagccagggcctggctggggagggagggcaggtggtgcgctgacctggggatctttgagagtgtgcaggagtatgtggctgaagcggcccagctggtgagccactgaagatgggggtcataggtagatggaggaattgccaggtcagaatctcggtaggagatgacttgagctgatgctgcctggcacataggggtttagaagatattaggaaggaagccccacagcgtgcccaagtgccatgcaggccctggagacggtcattggagggcgtctgtggatggcgcagtgggggatgggaagtccctaatctgctggggctttcccagcaagcagggactgagggggatagtccccaacacatgggccccagggagaagggcctgtttcattgaggtttggagagtgttgagggtaagctaacctgtcaccccacgcccccgagaatggttactgatagggagaggccttttccttgcaggagatggcgtctaccagaaggggatggacttcattttggagaagctcaaccatggggactgggtgcatatcttcccagaaggtcagcagggctgactgggtcgagcccccccagtatgagcgggatgggctcccaagcctcgcctctgtgctctctcaccagggaaagtgaacatgagttccgaattcctgcgtttcaagtggggtaagggctgctggtctctggccacagccatcctcccggcccagagatggccctgtgggcccctggctcccgccccctcgggctggcttgtatgggggtagatgggcgtgtttgtagcgccaggaaggggacaggtgctgagactaggcctgcctctcgcaggggcttgcccaagggagctgaattgaactggaggatgtcgggggtggcagtggccagaggctggcacagaagcttggctcagggcccagcttatgctaacatttctacctcccccctgggcaggaatcgggcgcctgattgctgagtgtcatctcaaccccatcatcctgcccctgtggcatgtcggtgagcctggggacggggacagagagatggcatctggggtggggggcctgggactccctctggtcccaggctgccctgctccaccccacgtctggccttctgtccactgtgctgcaggaatgaatgacgtccttcctaacagtccgccctacttcccccgctttggacaggtgggtggggactgctgaccttcggctgtctgcctgtctgctgtctgctccgtgtctcccactcagcactatggaggccagctgcaggaggagctgagcatgaggctacagcaggggacagagtggaacatagacagggacttcctggcaccgagacattaaaatgagagcagaggaagtcaggctggggcagaggtgggctgtggggtcaggacaggacaggtcatctacagcacaggacccaggaccaggaccttgttttagaggaagagtggcccctggggagtgtgtggcacagcagggccggggcttagcttctggctcccgggttgcttgggctggggctgtgggcactcctactgctcctcatcactcttggcggccaccccacagaaaatcactgtgctgatcgggaagcccttcagtgccctgcctgtactcgagcggctccgggcggagaacaagtcggctgtgagtttcctcctgggtcccccgtagctgtccccggaccccctgctgctggcttccagcagggtgcctccaccctctccatcccgtcaccctcccagggcaccctcccagggcaccttggccaagcttcccgaggggtgcaggccatccctggtcctttccctcaggtggagatgcggaaagccctgacggacttcattcaagaggaattccagcatctgaagactcaggcagagcagctccacaaccacctccagcctgggagataggccttgcttgctgccttctggattcttggcccgcacagagctggggctgagggatggactgatgcttttagctcaaacgtggcttttagacagatttgttcatagaccctctcaagtgccctctccgagctggtaggcattccagctcctccgtgcttcctcagttacacaaaggacctcagctgcttctcccacttggccaagcagggaggaagaagcttaggcagggctctctttccttcttgccttcagatgttctctcccaggggctggcttcaggagggagcatagaaggcaggtgagcaaccagttggctaggggagcagggggcccaccagagctgtggagaggggaccctaagactcctcggcctggctcctacccaccgcccttgccgaaccaggagctgctcactacctcctcagggatggccgttggccacgtcttccttctgcctgagcttcccccccaccacaggccctttcctc

SEQ ID NO: 14431 - DNA, 980 bp, Homo sapiens
gtgcctgtgtgccgagcatccccaggcttccagccagcacgcagcagccaacattggcttcagaaggaaggaggagatggcgtctaccagaaggggatggacttcattttggagaagctcaaccatggggactgggtgcatatcttcccagaagggaaagtgaacatgagttccgaattcctgcgtttcaagtggggaatcgggcgcctgattgctgagtgtcatctcaaccccatcatcctgcccctgtggcatgtcggaatgaatgacgtccttcctaacagtccgccctacttcccccgctttggacagaaaatcactgtgctgatcgggaagcccttcagtgccctgcctgtactcgagcggctccgggcggagaacaagtcggctgtggagatgcggaaagccctgacggacttcattcaagaggaattccagcatctgaagactcaggcagagcagctccacaaccacctccagcctgggagataggccttgcttgctgccttctggattcttggcccgcacagagctggggctgagggatggactgatgcttttagctcaaacgtggcttttagacagatttgttcatagaccctctcaagtgccctctccgagctggtaggcattccagctcctccgtgcttcctcagttacacaaaggacctcagctgcttctcccacttggccaagcagggaggaagaagcttaggcagggctctctttccttcttgccttcagatgttctctcccaggggctggcttcaggagggagcatagaaggcaggtgagcaaccagttggctaggggagcagggggcccaccagagctgtggagaggggaccctaagactcctcggcctggctcctacccaccgcccttgccgaaccaggagctgctcactacctcctcagggatggccgttggccacgtcttccttctgcctgagcttcccccccaccacaggccctttcctc

SEQ ID NO: 14432 - DNA, 10157 bp, Homo sapiens
gttgcaccgggccggggtgccagcgcccgccttcccgtttcctcccgttccgcagcgcgcccacggcctgtgaccccggcgaccgctccccagtgacgagagagcggggccgggcgctgctccggcctgacctgcgaagggacctcggtccagtcccctgttgcgccgcgcccccgtccgtccgtgcgcgggccagtcaggggccagtgtctcgagcggtcgaggtcgcagacctagaggcgccccacaggccggcccggggcgctgggagcgccggccgcgggccgggtggggatgcctctgcacgtgaagtggccgttccccgcggtgccgccgctcacctggaccctggccagcagcgtcgtcatgggcttggtgggcacctacagctgcttctggaccagtgagtgggcccaggccgaggcaggcccgcccgggtacccatgcccggccggaggtgggacttagggtgggggacgccgcggccccgacctagcgggcgagcccggagcgcctgacttctccttccccgccagagtacatgaaccacctgaccgtgcacaacagggaggtgctgtacgagctcatcgagaagcgaggcccggccacgcccctcatcaccgtgtccaatcaccagtcctgcatggacgaccctcatctctggggtacccgggccagtgtgctgggcagggggaggaaaggcgaggattcgggacgggcccagcctcgtcagaacaaaccccttctcgctgccttttcatggagccctggcactccggtttccgggcgttctgccccagggctgagacttggatttgtggctcctgcagcatccctgagggagcatgatttggagagggccttgggcatggagcaggaccaaggaacggccacagggcatatcttacagctcctttaacgtcaggcctccagaaccctctgttctctaaaccatccagggccccacagtcttgggaaaaatttgggggttggacataggatatcctgtgaggaagttctgggccagggactggaagcccagtgtcctggcttcaggtttgcccctggctgggcgtgtaccgttcagccctatttgggagcctggttgccacacctagaggttcctgctctgctgacttcacaggaagttgcttggctctggtaaccagatggccgggtggaggggtgcctggggcttccactcctgaacagagagcttaactgtcctagagttcatggggagccacctagccacactggagcccttcagagctcaccctggctgctgggtggagaaaggcctatagatgtcacaggtggatcctgggaggccaggaaggaggacttggagccatccactagcctagactgggctggttgcagtgacagtacagggagaagtatagaagaatgggcattgtccaagtatgttggggaggtaggcagtccaggtgcagtgattagtaagatgtggagggtgggggagagggaggagccagggagaactgaatgatctggcctaagggtctgaaagatgccactttgggctgtagggaaatggtagtgctgctgtccctcattccctgagatggggtgaaggaagggcactccctggggatatgggaagttggggcatgaagcctttcctgtcctctagggatcctgaaactccgccacatctggaacctgaagttgatgcgttggtgaggaggaatgggcccctcgaagtgggccgggccggccccacctgcctctgcccagatttgccctcctcctgctctgcccaggaggtggcgtccagcagtccaggcagggcatggggtggggccccgcaggccctcccctgtgcctcccttctgcatgctgatgctgggggcagggtggtggagcggggtgcagggggcaggactaattgcatctgtccctgcttaggacccctgcagctgcagacatctgcttcaccaaggagctacactcccacttcttcagcttgggcaagtgtgtgcctgtgtgccgaggtgagctgctcctccagcgagtgcagggaggcacttctggggcaggaaagctggtggccagtgtctctgttttggagggacctatgggggtaggcatcccgggagccaacatgaggcccagctccatcacatgccagcagaggggacagaggctgtgggaggagggatgggtccttggaaagtcctcaactctctgcaactgcccagggatcctgtggacctggagccttggcattagaattcaaggaggcattatccataaccccttctctcagggatgtcactaagagactcattgagaacagtgcgttgtcattggtccatggtggcagtagcatgtacctgcaggccagagggttttgcttctaggagaacaaacaggcttgtggggtgagaaccccaggggataggggccattttgatccctattctccagacagggaggatcacagagattaagctgctggcccaaggtcatggggtaggaggtggcaaagccaggatttgaatccagattgctccttcctctgcaggagcagaatttttccaagcagagaatgaggggaaaggtgttctagacacaggcaggcacatgccaggtgctggaaaaagaagagagaaaggtaagccaggcatagcggttcacacttgtcatcccagcactttgtgaggtcgaggtgagaggatcactcaagcccaggagtttgagaccagcctgggcaacatagtaagaccctgtctctttaaaaataaaaatattttaaacaaaagaaaggtagaaaatatgagttgtatgtagaatatgaaggttctagaataatcctattaagaattttggattctggctgggcgcggtggctcacgcctgtaatcccagcactttgggaggctgaggccagcggatcacgaggtcaggagatcgagaccatcctggctaacacggtgaaaccccgtctctactaaaaatacaaaaaattagctgggcatggtagtgggcgcctgtagtcccagctactcgggaggctgaggcaggagaatggcgtgaacccggaaggtggagcttgcagtgagccaagatcacgccactgcactccagcctgggtgacagagtgagactccgtctcaaaaaaaaaaaaaaaagtgccggccacggtggctcatgcctgtaatcccagcactctgggaggccgaggcgggcggatcacgaggtcaggaattcgagaccagcctaaccaacatggtgaaaccccgtctctactaaaaatacaaaaattagccgggcgtggtggtgtgtgcctgtaatctcagctacttgggagactgagacgggagcattgcttgaacccgggaggtggaggttgtggtgagctgagatcctgccattgcactccagcctgggcaataagagcgaaactccgtctggaaaaaaaaaaaaaaaaaaagaattttgaattagctggctgcattggtgcatgcctacagtcccagctcctcaggaggctgaggtgggaggatcacttgagccctcgattttctttttccttgagacaatgtctgtttctgttgtccaggctggagtgccgtggcgtgatgatggctcactgcagcttctgtttcctgggttcaagggatcctgtcacctcagcctcctgagcagctgggactaaggagtgtgcccagctaattcttttttttttttggtagagttggggtcttactacattgccagggctggtcttgaactcctagactcaagcgatcctcccgcctcagcctctcaaagtgctgggatcacaggcatgagccattgtgcccaacccagcccaggaatttgaggccagcctgagcaatatagtgagaccccaggtatagatagataggtagatagataggtaggtaggtaggtagatagatagataggtaggtgggtaggtaggtgggtagataggtaggtaggtacgtaggtagatagatagatagatacatacatacatagatagataagatagatagattgattagatagattagatagccaggtggggtggctcacgcctgtaatcccagtgctttgggaggctgaggtgggtggatcacctgaggtcaggagtttgagaccagcctggctaatgtggcgaaaccctgtctactaaaaatacaaaaattagctggatgtggtggcgcacgcctgtaatctcagctactcgggaggctggggtgggagaatcgcttgaacccaggaggtggaggttgcagtgagctgagatcatgccactgcactccagcctgggccacagagggagacctggtctcaaaaaaaaaaaaaaaaaaaaaaaagatttttgtatttgactgtgctctctcatccaggtggtgacatgcttgtatctgtggttaagaggtagcatctgccaggcgcggtggctcatgcctgtaatcccagtactttgcgaggccgaggcgggtggttcacctgaggtcaggagtttgagaccagcctgaccaacatggcgaaaccccgtctctactaaaaatataaaaattagccgaggctgggcgcggtggctcacgcctgtaatcccagcactttgggaggccgaggcgggtggatcacgaggtcaggagatcgagaccatcctggctaacaggatgaaaccccgtctctactaaaaacacaaaattagctgggcatggtggcaggtgcctgtagtcccagctactcgggaggctgaggcaggagaatggcacaaacccgggaggcggagcttgaggcaggagaatggcgtgaacccgggaggcagagcttgctatgagcagagatcgcgccactgcactccagcctgggtgacagagcgagactccgtctcaaaaaaaaaaaaaagagagagataccattccagttgcaatgtggctgcagcagggctaggtggacatgaggagcccagttcagggctgtcacagtagctccagcagcagatgattgtggctgggcctcccaagtgtcacgttggagaaccggagaaggggacttctttgggatgtactctggacttgttgatagattaagtgtaggtggggtgaggaagagaactcaaagatgacaccaggtgttggagctgagccacggggagaagggtgcaaagggaaagcagtgcgggggctgggaggggagagggtcagtcctgttttgcttgtgctgcatctgaggagcccctcacctgtggaaggagagcagtcccagaggcagtggggtgtgcagttctggaacttagaagaatgatcagggggctgggtgcagtggctcacgcctgtaatcccagcactttgggaggccgaggcgggcggatcaagaggtcaggagattgagaccatcctggctaacatggtgaaaccccgtctctactaaaaatataaaaaattagcagcgcatggtggcaggcacctgtagtcccagctattcaggaggctgaggcaggagagtggcgtgaacccgggagacggagcttgcagtgagctgagattgcgccactgcactccagcctgggcgacagagcgagactccgtctcaaaaaaaaaaaaaacaaaaaattatcaggaataaagatactgggaattcaaccacaaaaaccacaaagtcacgaatgcagagtgagagtcttcagagagagggcagaggcccaggatggcacagagggagagagaagccaccaagatggcagggagccatggccagagagaaaagcaaaccaggcgcctgtggcaccatggaagcagcaggtgatgctggagaagcgtttccatgcagtgacagctgccagagccagattattatggcctgagggctggtggtgctgcagttgggggggaatggagaccgcagcgggggaatggagaccgcaggggcggcaactcctcccagaggttcagtttggaggaaaaagagacagaaggaagggtaaccaaaggatattagaggtcaaggaggggtttattatttctagctggtcaaagtagaatgtggtaaaacccaataaagtaacagcaaataacaaagaggggcttttaatggaaagctgcagtgcctgcccctcacctccctagccccactcctcagaagcagccccctggagcggtttctctttctgctgcttttggaggctacttctgtctctgtaaaggaacttctgtctctgtaaaggaacaagcagaggccacagtgtcttggcaaatgaccgtggcattgtttatcccaacctgctctgagagatggggactctgctgattcacccctcgtccctgcctctttagttccttcagcaaagaactaataatatgtcattaaggcaaaggcagtatttggcacacttggcttctgtgttccaaaaaattccctttttctccaagcgtagattttaatatggtatttaagtatcaaagtgatttgacacaagtgacacaagtgagcagtagtagcatttgcaaaagctacaaatgatgaagtcttgctccaaaagcatattattattattttttaaattccagtttcaagctcaatggataggttgcgtcagtgggttttagtagagaaggggccagtacctatgaagactcccctgtactattacacatgctgcgtcccaagtagggaaactccagtgggtcatcaccccctccctctagcccaagtgggctgctgggtcagggcactgtttgggttgggttgagattcctggatccctaactagcaccttccaaagaatcggccttgcagagaacaaagttcattgccaaaggtattcccaatgtctgtctctcgctctgtgatagggcttctttactccccactttataagatgaggatatctgctataccccattccttcaacctctccacctctttcctcttttgtctgccatgtgattacttttccatcaccaaggttgatgagatccttactgtgtacttactgtctccaagcatccccaggcttccagccagcacgcagcagccaacattggcttcagaaggaaggaggtttgcatttccttctcttgggtccagtgccatggtctcagggttatctccaatgtggaaagttgctagaccaggagcagtttgactccactgtttttcagtctagcaagtttgagtttttcccaagctcttgatgtgtgttcaaatgaatgttctccctttcccaagagacctccctataagggagggtctagtttcccggggtgccctgagaagaaggggtcagcaggggggaggaatggtggaggctgaggcctcaggcaggtgccctgtgaggagtggctgtgacaagcggctgagatcccagcaaagggttgttgcccagaatctggggcctaagcgaggttggaaatcacaaatgcacttggtttctctagcagctggcacatagtaggatcagcccaggagtggcaccttcaaagagaaaggaacgcatgaggctccgagagcggtcggctggcagccagggcctggctggggagggagggcaggtggtgcgctgacctggggatctttgagagtgtgcaggagtatgtggctgaagcggcccagctggtgagccactgaagatgggggtcataggtagatggaggaattgccaggtcagaatctcggtaggagatgacttgagctgatgctgcctggcacataggggtttagaagatattaggaaggaagccccacagcgtgcccaagtgccatgcaggccctggagacggtcattggagggcgtctgtggatggcgcagtgggggatgggaagtccctaatctgctggggctttcccagcaagcagggactgagggggatagtccccaacacatgggccccagggagaagggcctgtttcattgaggtttggagagtgttgagggtaagctaacctgtcaccccacgcccccgagaatggttactgatagggagaggccttttccttgcaggagatggcgtctaccagaaggggatggacttcattttggagaagctcaaccatggggactgggtgcatatcttcccagaaggtcagcagggctgactgggtcgagcccccccagtatgagcgggatgggctcccaagcctcgcctctgtgctctctcaccagggaaagtgaacatgagttccgaattcctgcgtttcaagtggggtaagggctgctggtctctggccacagccatcctcccggcccagagatggccctgtgggcccctggctcccgccccctcgggctggcttgtatgggggtagatgggcgtgtttgtagcgccaggaaggggacaggtgctgagactaggcctgcctctcgcaggggcttgcccaagggagctgaattgaactggaggatgtcgggggtggcagtggccagaggctggcacagaagcttggctcagggcccagcttatgctaacatttctacctcccccctgggcaggaatcgggcgcctgattgctgagtgtcatctcaaccccatcatcctgcccctgtggcatgtcggtgagcctggggacggggacagagagatggcatctggggtggggggcctgggactccctctggtcccaggctgccctgctccaccccacgtctggccttctgtccactgtgctgcaggaatgaatgacgtccttcctaacagtccgccctacttcccccgctttggacaggtgggtggggactgctgaccttcggctgtctgcctgtctgctgtctgctccgtgtctcccactcagcactatggaggccagctgcaggaggagctgagcatgaggctacagcaggggacagagtggaacatagacagggacttcctggcaccgagacattaaaatgagagcagaggaagtcaggctggggcagaggtgggctgtggggtcaggacaggacaggtcatctacagcacaggacccaggaccaggaccttgttttagaggaagagtggcccctggggagtgtgtggcacagcagggccggggcttagcttctggctcccgggttgcttgggctggggctgtgggcactcctactgctcctcatcactcttggcggccaccccacagaaaatcactgtgctgatcgggaagcccttcagtgccctgcctgtactcgagcggctccgggcggagaacaagtcggctgtgagtttcctcctgggtcccccgtagctgtccccggaccccctgctgctggcttccagcagggtgcctccaccctctccatcccgtcaccctcccagggcaccctcccagggcaccttggccaagcttcccgaggggtgcaggccatccctggtcctttccctcaggtggagatgcggaaagccctgacggacttcattcaagaggaattccagcatctgaagactcaggcagagcagctccacaaccacctccagcctgggagataggccttgcttgctgccttctggattcttggcccgcacagagctggggctgagggatggactgatgcttttagctcaaacgtggcttttagacagatttgttcatagaccctctcaagtgccctctccgagctggtaggcattccagctcctccgtgcttcctcagttacacaaaggacctcagctgcttctcccacttggccaagcagggaggaagaagcttaggcagggctctctttccttcttgccttcagatgttctctcccaggggctggcttcaggagggagcatagaaggcaggtgagcaaccagttggctaggggagcagggggcccaccagagctgtggagaggggaccctaagactcctcggcctggctcctacccaccgcccttgccgaaccaggagctgctcactacctcctcagggatggccgttggccacgtcttccttctgcctgagcttcccccccaccacaggccctttcctcaggcaaggtctggcctcaggtgggccgcaggcgggaaaagcagcccttggccagaagtcaagcccagccacgtggagcctagagtgagggcctgaggtctggctgcttgcccccatgctggcgccaacaacttctccatcctttctgcctctcaacatcacttgaatcctagggcctgggttttcatgtttttgaaacagaaccataaagcata

SEQ ID NO: 14433 - DNA, 1812 bp, Homo sapiens
gttgcaccgggccggggtgccagcgcccgccttcccgtttcctcccgttccgcagcgcgcccacggcctgtgaccccggcgaccgctccccagtgacgagagagcggggccgggcgctgctccggcctgacctgcgaagggacctcggtccagtcccctgttgcgccgcgcccccgtccgtccgtgcgcgggccagtcaggggccagtgtctcgagcggtcgaggtcgcagacctagaggcgccccacaggccggcccggggcgctgggagcgccggccgcgggccgggtggggatgcctctgcacgtgaagtggccgttccccgcggtgccgccgctcacctggaccctggccagcagcgtcgtcatgggcttggtgggcacctacagctgcttctggaccaagtacatgaaccacctgaccgtgcacaacagggaggtgctgtacgagctcatcgagaagcgaggcccggccacgcccctcatcaccgtgtccaatcaccagtcctgcatggacgaccctcatctctgggggatcctgaaactccgccacatctggaacctgaagttgatgcgttggacccctgcagctgcagacatctgcttcaccaaggagctacactcccacttcttcagcttgggcaagtgtgtgcctgtgtgccgaggagcagaatttttccaagcagagaatgaggggaaaggtgttctagacacaggcaggcacatgccaggtgctggaaaaagaagagagaaagcatccccaggcttccagccagcacgcagcagccaacattggcttcagaaggaaggaggagatggcgtctaccagaaggggatggacttcattttggagaagctcaaccatggggactgggtgcatatcttcccagaagggaaagtgaacatgagttccgaattcctgcgtttcaagtggggaatcgggcgcctgattgctgagtgtcatctcaaccccatcatcctgcccctgtggcatgtcggaatgaatgacgtccttcctaacagtccgccctacttcccccgctttggacagaaaatcactgtgctgatcgggaagcccttcagtgccctgcctgtactcgagcggctccgggcggagaacaagtcggctgtggagatgcggaaagccctgacggacttcattcaagaggaattccagcatctgaagactcaggcagagcagctccacaaccacctccagcctgggagataggccttgcttgctgccttctggattcttggcccgcacagagctggggctgagggatggactgatgcttttagctcaaacgtggcttttagacagatttgttcatagaccctctcaagtgccctctccgagctgatgttctctcccaggggctggcttcaggagggagcatagaaggcaggtgagcaaccagttggctaggggagcagggggcccaccagagctgtggagaggggaccctaagactcctcggcctggctcctacccaccgcccttgccgaaccaggagctgctcactacctcctcagggatggccgttggccacgtcttccttctgcctgagcttcccccccaccacaggccctttcctcaggcaaggtctggcctcaggtgggccgcaggcgggaaaagcagcccttggccagaagtcaagcccagccacgtggagcctagagtgagggcctgaggtctggctgcttgcccccatgctggcgccaacaacttctccatcctttctgcctctcaacatcacttgaatcctagggcctgggttttcatgtttttgaaacagaaccataaagcata

SEQ ID NO: 14434 - DNA, 9909 bp, Homo sapiens
ccccacaggccggcccggggcgctgggagcgccggccgcgggccgggtggggatgcctctgcacgtgaagtggccgttccccgcggtgccgccgctcacctggaccctggccagcagcgtcgtcatgggcttggtgggcacctacagctgcttctggaccagtgagtgggcccaggccgaggcaggcccgcccgggtacccatgcccggccggaggtgggacttagggtgggggacgccgcggccccgacctagcgggcgagcccggagcgcctgacttctccttccccgccagagtacatgaaccacctgaccgtgcacaacagggaggtgctgtacgagctcatcgagaagcgaggcccggccacgcccctcatcaccgtgtccaatcaccagtcctgcatggacgaccctcatctctggggtacccgggccagtgtgctgggcagggggaggaaaggcgaggattcgggacgggcccagcctcgtcagaacaaaccccttctcgctgccttttcatggagccctggcactccggtttccgggcgttctgccccagggctgagacttggatttgtggctcctgcagcatccctgagggagcatgatttggagagggccttgggcatggagcaggaccaaggaacggccacagggcatatcttacagctcctttaacgtcaggcctccagaaccctctgttctctaaaccatccagggccccacagtcttgggaaaaatttgggggttggacataggatatcctgtgaggaagttctgggccagggactggaagcccagtgtcctggcttcaggtttgcccctggctgggcgtgtaccgttcagccctatttgggagcctggttgccacacctagaggttcctgctctgctgacttcacaggaagttgcttggctctggtaaccagatggccgggtggaggggtgcctggggcttccactcctgaacagagagcttaactgtcctagagttcatggggagccacctagccacactggagcccttcagagctcaccctggctgctgggtggagaaaggcctatagatgtcacaggtggatcctgggaggccaggaaggaggacttggagccatccactagcctagactgggctggttgcagtgacagtacagggagaagtatagaagaatgggcattgtccaagtatgttggggaggtaggcagtccaggtgcagtgattagtaagatgtggagggtgggggagagggaggagccagggagaactgaatgatctggcctaagggtctgaaagatgccactttgggctgtagggaaatggtagtgctgctgtccctcattccctgagatggggtgaaggaagggcactccctggggatatgggaagttggggcatgaagcctttcctgtcctctagggatcctgaaactccgccacatctggaacctgaagttgatgcgttggtgaggaggaatgggcccctcgaagtgggccgggccggccccacctgcctctgcccagatttgccctcctcctgctctgcccaggaggtggcgtccagcagtccaggcagggcatggggtggggccccgcaggccctcccctgtgcctcccttctgcatgctgatgctgggggcagggtggtggagcggggtgcagggggcaggactaattgcatctgtccctgcttaggacccctgcagctgcagacatctgcttcaccaaggagctacactcccacttcttcagcttgggcaagtgtgtgcctgtgtgccgaggtgagctgctcctccagcgagtgcagggaggcacttctggggcaggaaagctggtggccagtgtctctgttttggagggacctatgggggtaggcatcccgggagccaacatgaggcccagctccatcacatgccagcagaggggacagaggctgtgggaggagggatgggtccttggaaagtcctcaactctctgcaactgcccagggatcctgtggacctggagccttggcattagaattcaaggaggcattatccataaccccttctctcagggatgtcactaagagactcattgagaacagtgcgttgtcattggtccatggtggcagtagcatgtacctgcaggccagagggttttgcttctaggagaacaaacaggcttgtggggtgagaaccccaggggataggggccattttgatccctattctccagacagggaggatcacagagattaagctgctggcccaaggtcatggggtaggaggtggcaaagccaggatttgaatccagattgctccttcctctgcaggagcagaatttttccaagcagagaatgaggggaaaggtgttctagacacaggcaggcacatgccaggtgctggaaaaagaagagagaaaggtaagccaggcatagcggttcacacttgtcatcccagcactttgtgaggtcgaggtgagaggatcactcaagcccaggagtttgagaccagcctgggcaacatagtaagaccctgtctctttaaaaataaaaatattttaaacaaaagaaaggtagaaaatatgagttgtatgtagaatatgaaggttctagaataatcctattaagaattttggattctggctgggcgcggtggctcacgcctgtaatcccagcactttgggaggctgaggccagcggatcacgaggtcaggagatcgagaccatcctggctaacacggtgaaaccccgtctctactaaaaatacaaaaaattagctgggcatggtagtgggcgcctgtagtcccagctactcgggaggctgaggcaggagaatggcgtgaacccggaaggtggagcttgcagtgagccaagatcacgccactgcactccagcctgggtgacagagtgagactccgtctcaaaaaaaaaaaaaaaagtgccggccacggtggctcatgcctgtaatcccagcactctgggaggccgaggcgggcggatcacgaggtcaggaattcgagaccagcctaaccaacatggtgaaaccccgtctctactaaaaatacaaaaattagccgggcgtggtggtgtgtgcctgtaatctcagctacttgggagactgagacgggagcattgcttgaacccgggaggtggaggttgtggtgagctgagatcctgccattgcactccagcctgggcaataagagcgaaactccgtctggaaaaaaaaaaaaaaaaaaagaattttgaattagctggctgcattggtgcatgcctacagtcccagctcctcaggaggctgaggtgggaggatcacttgagccctcgattttctttttccttgagacaatgtctgtttctgttgtccaggctggagtgccgtggcgtgatgatggctcactgcagcttctgtttcctgggttcaagggatcctgtcacctcagcctcctgagcagctgggactaaggagtgtgcccagctaattcttttttttttttggtagagttggggtcttactacattgccagggctggtcttgaactcctagactcaagcgatcctcccgcctcagcctctcaaagtgctgggatcacaggcatgagccattgtgcccaacccagcccaggaatttgaggccagcctgagcaatatagtgagaccccaggtatagatagataggtagatagataggtaggtaggtaggtagatagatagataggtaggtgggtaggtaggtgggtagataggtaggtaggtacgtaggtagatagatagatagatacatacatacatagatagataagatagatagattgattagatagattagatagccaggtggggtggctcacgcctgtaatcccagtgctttgggaggctgaggtgggtggatcacctgaggtcaggagtttgagaccagcctggctaatgtggcgaaaccctgtctactaaaaatacaaaaattagctggatgtggtggcgcacgcctgtaatctcagctactcgggaggctggggtgggagaatcgcttgaacccaggaggtggaggttgcagtgagctgagatcatgccactgcactccagcctgggccacagagggagacctggtctcaaaaaaaaaaaaaaaaaaaaaaaagatttttgtatttgactgtgctctctcatccaggtggtgacatgcttgtatctgtggttaagaggtagcatctgccaggcgcggtggctcatgcctgtaatcccagtactttgcgaggccgaggcgggtggttcacctgaggtcaggagtttgagaccagcctgaccaacatggcgaaaccccgtctctactaaaaatataaaaattagccgaggctgggcgcggtggctcacgcctgtaatcccagcactttgggaggccgaggcgggtggatcacgaggtcaggagatcgagaccatcctggctaacaggatgaaaccccgtctctactaaaaacacaaaattagctgggcatggtggcaggtgcctgtagtcccagctactcgggaggctgaggcaggagaatggcacaaacccgggaggcggagcttgaggcaggagaatggcgtgaacccgggaggcagagcttgctatgagcagagatcgcgccactgcactccagcctgggtgacagagcgagactccgtctcaaaaaaaaaaaaaagagagagataccattccagttgcaatgtggctgcagcagggctaggtggacatgaggagcccagttcagggctgtcacagtagctccagcagcagatgattgtggctgggcctcccaagtgtcacgttggagaaccggagaaggggacttctttgggatgtactctggacttgttgatagattaagtgtaggtggggtgaggaagagaactcaaagatgacaccaggtgttggagctgagccacggggagaagggtgcaaagggaaagcagtgcgggggctgggaggggagagggtcagtcctgttttgcttgtgctgcatctgaggagcccctcacctgtggaaggagagcagtcccagaggcagtggggtgtgcagttctggaacttagaagaatgatcagggggctgggtgcagtggctcacgcctgtaatcccagcactttgggaggccgaggcgggcggatcaagaggtcaggagattgagaccatcctggctaacatggtgaaaccccgtctctactaaaaatataaaaaattagcagcgcatggtggcaggcacctgtagtcccagctattcaggaggctgaggcaggagagtggcgtgaacccgggagacggagcttgcagtgagctgagattgcgccactgcactccagcctgggcgacagagcgagactccgtctcaaaaaaaaaaaaaacaaaaaattatcaggaataaagatactgggaattcaaccacaaaaaccacaaagtcacgaatgcagagtgagagtcttcagagagagggcagaggcccaggatggcacagagggagagagaagccaccaagatggcagggagccatggccagagagaaaagcaaaccaggcgcctgtggcaccatggaagcagcaggtgatgctggagaagcgtttccatgcagtgacagctgccagagccagattattatggcctgagggctggtggtgctgcagttgggggggaatggagaccgcagcgggggaatggagaccgcaggggcggcaactcctcccagaggttcagtttggaggaaaaagagacagaaggaagggtaaccaaaggatattagaggtcaaggaggggtttattatttctagctggtcaaagtagaatgtggtaaaacccaataaagtaacagcaaataacaaagaggggcttttaatggaaagctgcagtgcctgcccctcacctccctagccccactcctcagaagcagccccctggagcggtttctctttctgctgcttttggaggctacttctgtctctgtaaaggaacttctgtctctgtaaaggaacaagcagaggccacagtgtcttggcaaatgaccgtggcattgtttatcccaacctgctctgagagatggggactctgctgattcacccctcgtccctgcctctttagttccttcagcaaagaactaataatatgtcattaaggcaaaggcagtatttggcacacttggcttctgtgttccaaaaaattccctttttctccaagcgtagattttaatatggtatttaagtatcaaagtgatttgacacaagtgacacaagtgagcagtagtagcatttgcaaaagctacaaatgatgaagtcttgctccaaaagcatattattattattttttaaattccagtttcaagctcaatggataggttgcgtcagtgggttttagtagagaaggggccagtacctatgaagactcccctgtactattacacatgctgcgtcccaagtagggaaactccagtgggtcatcaccccctccctctagcccaagtgggctgctgggtcagggcactgtttgggttgggttgagattcctggatccctaactagcaccttccaaagaatcggccttgcagagaacaaagttcattgccaaaggtattcccaatgtctgtctctcgctctgtgatagggcttctttactccccactttataagatgaggatatctgctataccccattccttcaacctctccacctctttcctcttttgtctgccatgtgattacttttccatcaccaaggttgatgagatccttactgtgtacttactgtctccaagcatccccaggcttccagccagcacgcagcagccaacattggcttcagaaggaaggaggtttgcatttccttctcttgggtccagtgccatggtctcagggttatctccaatgtggaaagttgctagaccaggagcagtttgactccactgtttttcagtctagcaagtttgagtttttcccaagctcttgatgtgtgttcaaatgaatgttctccctttcccaagagacctccctataagggagggtctagtttcccggggtgccctgagaagaaggggtcagcaggggggaggaatggtggaggctgaggcctcaggcaggtgccctgtgaggagtggctgtgacaagcggctgagatcccagcaaagggttgttgcccagaatctggggcctaagcgaggttggaaatcacaaatgcacttggtttctctagcagctggcacatagtaggatcagcccaggagtggcaccttcaaagagaaaggaacgcatgaggctccgagagcggtcggctggcagccagggcctggctggggagggagggcaggtggtgcgctgacctggggatctttgagagtgtgcaggagtatgtggctgaagcggcccagctggtgagccactgaagatgggggtcataggtagatggaggaattgccaggtcagaatctcggtaggagatgacttgagctgatgctgcctggcacataggggtttagaagatattaggaaggaagccccacagcgtgcccaagtgccatgcaggccctggagacggtcattggagggcgtctgtggatggcgcagtgggggatgggaagtccctaatctgctggggctttcccagcaagcagggactgagggggatagtccccaacacatgggccccagggagaagggcctgtttcattgaggtttggagagtgttgagggtaagctaacctgtcaccccacgcccccgagaatggttactgatagggagaggccttttccttgcaggagatggcgtctaccagaaggggatggacttcattttggagaagctcaaccatggggactgggtgcatatcttcccagaaggtcagcagggctgactgggtcgagcccccccagtatgagcgggatgggctcccaagcctcgcctctgtgctctctcaccagggaaagtgaacatgagttccgaattcctgcgtttcaagtggggtaagggctgctggtctctggccacagccatcctcccggcccagagatggccctgtgggcccctggctcccgccccctcgggctggcttgtatgggggtagatgggcgtgtttgtagcgccaggaaggggacaggtgctgagactaggcctgcctctcgcaggggcttgcccaagggagctgaattgaactggaggatgtcgggggtggcagtggccagaggctggcacagaagcttggctcagggcccagcttatgctaacatttctacctcccccctgggcaggaatcgggcgcctgattgctgagtgtcatctcaaccccatcatcctgcccctgtggcatgtcggtgagcctggggacggggacagagagatggcatctggggtggggggcctgggactccctctggtcccaggctgccctgctccaccccacgtctggccttctgtccactgtgctgcaggaatgaatgacgtccttcctaacagtccgccctacttcccccgctttggacaggtgggtggggactgctgaccttcggctgtctgcctgtctgctgtctgctccgtgtctcccactcagcactatggaggccagctgcaggaggagctgagcatgaggctacagcaggggacagagtggaacatagacagggacttcctggcaccgagacattaaaatgagagcagaggaagtcaggctggggcagaggtgggctgtggggtcaggacaggacaggtcatctacagcacaggacccaggaccaggaccttgttttagaggaagagtggcccctggggagtgtgtggcacagcagggccggggcttagcttctggctcccgggttgcttgggctggggctgtgggcactcctactgctcctcatcactcttggcggccaccccacagaaaatcactgtgctgatcgggaagcccttcagtgccctgcctgtactcgagcggctccgggcggagaacaagtcggctgtgagtttcctcctgggtcccccgtagctgtccccggaccccctgctgctggcttccagcagggtgcctccaccctctccatcccgtcaccctcccagggcaccctcccagggcaccttggccaagcttcccgaggggtgcaggccatccctggtcctttccctcaggtggagatgcggaaagccctgacggacttcattcaagaggaattccagcatctgaagactcaggcagagcagctccacaaccacctccagcctgggagataggccttgcttgctgccttctggattcttggcccgcacagagctggggctgagggatggactgatgcttttagctcaaacgtggcttttagacagatttgttcatagaccctctcaagtgccctctccgagctggtaggcattccagctcctccgtgcttcctcagttacacaaaggacctcagctgcttctcccacttggccaagcagggaggaagaagcttaggcagggctctctttccttcttgccttcagatgttctctcccaggggctggcttcaggagggagcatagaaggcaggtgagcaaccagttggctaggggagcagggggcccaccagagctgtggagaggggaccctaagactcctcggcctggctcctacccaccgcccttgccgaaccaggagctgctcactacctcctcagggatggccgttggccacgtcttccttctgcctgagcttcccccccaccacaggccctttcctcaggcaaggtctggcctcaggtgggccgcaggcgggaaaagcagcccttggccagaagtcaagcccagccacgtggagcctagagtgagggcctgaggtctggctgcttgcccccatgctggcgccaacaacttctccatcctttctgcctctcaacatcacttgaatcctagggcctgggttttcatgtttttgaaacagaaccataa

SEQ ID NO: 14435 - DNA, 1928 bp, Homo sapiens
ccccacaggccggcccggggcgctgggagcgccggccgcgggccgggtggggatgcctctgcacgtgaagtggccgttccccgcggtgccgccgctcacctggaccctggccagcagcgtcgtcatgggcttggtgggcacctacagctgcttctggaccaagtacatgaaccacctgaccgtgcacaacagggaggtgctgtacgagctcatcgagaagcgaggcccggccacgcccctcatcaccgtgtccaatcaccagtcctgcatggacgaccctcatctctgggggatcctgaaactccgccacatctggaacctgaagttgatgcgttggtgaggaggaatgggcccctcgaagtgggccgggccggccccacctgcctctgcccagatttgccctcctcctgctctgcccaggaggtggcgtccagcagtccaggacccctgcagctgcagacatctgcttcaccaaggagctacactcccacttcttcagcttgggcaagtgtgtgcctgtgtgccgaggagatggcgtctaccagaaggggatggacttcattttggagaagctcaaccatggggactgggtgcatatcttcccagaagggaaagtgaacatgagttccgaattcctgcgtttcaagtggggtaagggctgctggtctctggccacagccatcctcccggcccagagatggccctgtgggcccctggctcccgccccctcgggctggcttgtatgggggtagatgggcgtgtttgtagcgccaggaaggggacaggtgctgagactaggcctgcctctcgcaggggcttgcccaagggagctgaattgaactggaggatgtcgggggtggcagtggccagaggctggcacagaagcttggctcagggcccagcttatgctaacatttctacctcccccctgggcaggaatcgggcgcctgattgctgagtgtcatctcaaccccatcatcctgcccctgtggcatgtcggaatgaatgacgtccttcctaacagtccgccctacttcccccgctttggacagaaaatcactgtgctgatcgggaagcccttcagtgccctgcctgtactcgagcggctccgggcggagaacaagtcggctgtggagatgcggaaagccctgacggacttcattcaagaggaattccagcatctgaagactcaggcagagcagctccacaaccacctccagcctgggagataggccttgcttgctgccttctggattcttggcccgcacagagctggggctgagggatggactgatgcttttagctcaaacgtggcttttagacagatttgttcatagaccctctcaagtgccctctccgagctggtaggcattccagctcctccgtgcttcctcagttacacaaaggacctcagctgcttctcccacttggccaagcagggaggaagaagcttaggcagggctctctttccttcttgccttcagatgttctctcccaggggctggcttcaggagggagcatagaaggcaggtgagcaaccagttggctaggggagcagggggcccaccagagctgtggagaggggaccctaagactcctcggcctggctcctacccaccgcccttgccgaaccaggagctgctcactacctcctcagggatggccgttggccacgtcttccttctgcctgagcttcccccccaccacaggccctttcctcaggcaaggtctggcctcaggtgggccgcaggcgggaaaagcagcccttggccagaagtcaagcccagccacgtggagcctagagtgagggcctgaggtctggctgcttgcccccatgctggcgccaacaacttctccatcctttctgcctctcaacatcacttgaatcctagggcctgggttttcatgtttttgaaacagaaccataa

SEQ ID NO: 14436 - DNA, 11043 bp, Homo sapiens
actagctgaggtggcagtggttccaccaacatggagctctcgcagatgtcggagctcatggggctgtcggtgttgcttgggctgctggccctgatggcgacggcggcggtagcgcgggggtggctgcgcgcgggggaggagaggagcggccggcccgcctgtaagtggggccgggtcgggtgggggcggcccgcggtgtcccggctcccggcctcctcgtggtccgacctgcggtttgggcccgcggctggtggggcccggcgactccatgggcctcagtttctcctctggtaacgtgagcttcgcttccagagacggggacccgccttgccgggttaggcgcacctcctggggcgggactggctccaacctgggccccttactgcggctttctctgtggccgaggccaggccgtccccggggtggccaggagagcaccgtaaactcttcagcctgctccgtggccgcgatctcggaaaaagcaccaattctgtgatgtgcagcagcatttactgggcatctatgaccctgtgataggctttggggtctttttctgtaaggagtccagtaaaggagaagtacatctgtattatgaacacctaaatatgtaagtgaaaaacacggtgaaataagtttcactgaggccaggcgaagtggctcacgcctgtattcccagcactttgggaggccgaggcagggagatcgcttgagcccaggagtttgggaccagcctgagcaacatagcaagaccccatctctacgcaaaattagctgggtgtggttgtgcacgcccctgtagtcccagctccatgggaggccgaggcaggagggtgtcgtgagtccaggaattcaaggctgcagtgagttgtgatagatcgcgccactgtacttcagcctgggtgacggcaagagcctgtctctgaaaagtttcatagaagaggttagtactagaaatgggaaacaccagagagtcagtgggcagccctgctctttttatttatttttcagacagagtttcgctcttcttgcccaggctggagtgcagtggcacaatcttggctcgttgcaacttccgcctgccaggttcaagcgattcttctgcctctgcctcccgagtagctgggactacaggcacacaccaccacgcctggctaatttttgtatatttagtagacggggtttcgccacgttggtcaggctggtctcgaacgcctgatctcaggtgatccactcgtcctggcctccaaaagtgctgagattacaggcgtgaaccactgtgcccggccagccctgcattttttttttttttttttttgcagggggacggagttttgctctgtcgcccaatctggagtctagtggcgggatctcggctcactgcaagctccgcctctgggttcacgccattctcctgcctcagcctcctgagtagctgggactacaggcgtccgacaccacacccggctaattttttgtattttttgagtagagacggggtttcactgtgttagccaggatggtctcaatctcctaacctcttgtgatccacctgcctcggcctcccaaagtgctgggattacaggcgtgagccaccctgcctggccgagtcctgttcttttatgggggaggtggttgttagggaaatcattactgagaatagggggcacatgaggtagtgtggggtctcaaaggatggttctagaagaagagtttgccagaaggccaaggaaaaaagacattcctgccaatggcaatacccgagaaggcaaggagtccccaaacagcatttggtatgacttaagtgtgaggaggggggcttgttagacatgcctggagagaaggaagcagaggacagattgtggctgtgtttgtttgcagggcccaggagcttttttcctgttggaattggggagcatctgcagtcatttaccacatgccagctttgtgactcaattaagtatcttttacaaaagtgactggctccactcccccgcacaggactcaacagatgttgacttctcatccccgagttctttcaggtactggagtgcagtggtgcgatcttggcttactgcaacctctacctcctgggttcaagtgattctcctgcctcagcctcctgagtagctgggattacaggcgcctgccaccacgcccggctaatttttgtatttttagtagagacggggtttcaccatgttggccagactggtggaactcctgggcatcaagatgatccagctgccgggccgggcatggtgactcacgcctgtaatcccagcactttgggaggccgaagcgggcaggtcacaaggtcaggagatcgagactgaggcaacagagcgagactctgtatcaaacaaaaaaaaaaaatgatccagcagctgcctcagcctcccaaagcgctgggattacaggcatgagccaccgcacccggcctccatagagcctttaatgcttgtgttcggtacttttgcttgtcactttgtagatatctcatccaattcaatctcccttatttttatttatttatttatttatttattttgagacagaatctcactctgtcgcctaggctggaatacagtggcacgatcactgcatttgaactcctgggctcaagcaattttccctcctcagcctccgaatagctgggaccacaggcgcacaccaccatgcccagctaattaaagttttctgtagagatggggtgtcactatgttacccaggctggtctcgaactcctgagctcaagcaatcctcccatctcagcctaccaaaatgctgggatcacaggcatgagccaccgcccccagttctcaacctctctttaagaaaaccaaggctgggccggacacagtggctcacgcctataatcccagcactttgggaggccaaggcaggcagatcacttgaggtgaggagttggagacaagcctggcccacatggtgaaaccccatctctactaaaaaaacaaaaaaattggggccaggtgccatggctcacgcctgtaatcctagcactttgggaggccgaggcgggtggatcacaaggtcaggagattgagaccattctggctaatgtggtgaaaccccacatctactaaaaatacaaaaaaaaattagccgggcatggtggcgggcgcctgtagtcccagctacttgggaggctgaggcaggagaatggcgtgaacccgggaggcagagcttgcagtgagctgagatcacgccactgcactccagcctgggtgacagagcgagactccatctgaaaaaaaaaaaaaaaattagctggatatggtggtgcacgcccatgatcccagctacttggaaggctgaggcacaagaattgcttgaacctgggaggcagaggctacagtgagcggagatcacgccactgcactccagcctgggcgacagagcaagactctgtctccaaaaaaaagaaagaaagaaaagaaaaaaaaaaccaaggtccagagcaattcactaacttacccaaagcagggccgctagagatggttgtgcacattactccctacatagggatgtctggccaaggatccacactccactggccgtgctgtgtacccgcccagcagcatcacccaacccagagagtgcgccttttccactctacatgaaggtgctctgtggacttactgtaaacagcctcctcagtagtcagtcagtagtagagacagaatccaaacccaggtctgattccaaagcctctgttttgtttctgttttctgtttgtttttttttgagacagggtcttgctctgtcactcaggatggaatgcagtagtgttgtgatcatagcttactgcagcctcgaactcctgggctcaaatgatccaaagcattgggattacaggcatgagccaccatacccagccagccaaagcctctgtttttgcccatatcacactcattctcctccagaagacaagggccatatctggttaatctcctgctgttccactcaatgcctggctcatcataggtgggcagtaaatgcttatcagtgagtaactggagaacaacatggcccttccttataggccaaaaagcaaatggatttccacctgacaaatcttcgggatccaagaagcagaaacaatatcagcggattcggaaggagaagcctcaacaacacaacttcacccaccgcctcctggctgcagctctgaaggtacgtggggtacctggcacagcgtgcaccctgagactcagccccacaggcttttcctctggagtattccatgcatgttacaggctctcctgcctctgatcagaatcagcgggggtgcttaattctgtcccctctcatcgcagcccaatctcagcttgctgttaatccaggccacagggccccatctccccggctccaggtttggcttccccatctcccccaggagctcctattgacacttcctgccacccttcccctagagccacagcgggaacatatcttgcatggactttagcagcaatggcaaatacctggctacctgtgcagatgatcgcaccatccgcatctggagcaccaaggacttcctgcagcgagagcaccgcagcatgagagccaacgtggagctggaccacgccaccctggtgcgcttcagccctgactgcaggtgggacaagacggagcctcaggtttgcctgcagaggcctagtcccaggctttggccttcccatatctgctttgaggtagtgaggagggacctggacccagggcctcccttggggtgccagaaagagcatccacatagtttgcgcgctgcctggggctccctggagatctgggctgctatacagcaaggaaacagggggaggtctcttcctacctggaaataccttggcctggcttccagatgagccttagtttctaaaccctagagagaaactaaaggagccaaagctatcagaatcttaccttttgaggagttttatgagatttggaaccaggggcttaagttttaaggctagactgtggggcatgaggagagatcttgacttccccgagaacccagcacaggacctggaacacagagcctctttgtccagtgagagcgtgacttgtctgctgcctgtctctagagccttcatcgtctggctggccaacggggacaccctccgtgtcttcaagatgaccaagcgggaggatgggggctacaccttcacagccaccccagaggacttccctaaaaagcacaaggcgcctgtcatcgacattggcattgctaacacaggtaagaggcattcagagggtggcgcctgcccaaagcatgaaggaaagatccagttctatttcctcaatgagttaatgctgcctgaaagttctgctcaacctgagaggaacaaggggtccctggctctgaacagcctggctctgtgctcccctggagtccctgggccacaccaggtccctagggaaggtggggaagggccacagtcttcagcagagtccttatctgtagtgacccttggcctgggaggagacatgtatacttcgggcagcagaggccttgtaagtgtctttggagagtgacagttggtcaggtcactgcccgtgacccacatcactcccttcccgctcagggaagtttatcatgactgcctccagtgacaccactgtcctcatctggagcctgaagggtcaagtgctgtctaccatcaacaccaaccagatgaacaacacacacgctgctgtatctccctgtggcaggtgggcaaggaggggtattggcgtctgggaccacgagaggctggggctggggagcaggcacagaacagagagccagcttcatcgcgtgggaagagcatacggggtggggtcaggaacccgagcttcaagtctcagctctccccacttgcagtagtgggatttcatgcaggtcgccccatgtccttagtcgctatttcttcatcttcagtgtttttgttttttagaaaattagtctcactctgtcacccaggctggagcacagtggtgcgatcatagctcactgcagcctcaaactcctgggttgtagctattctcccagctcagcctcctgagtagtcaggactataggcatgtgccactgtactcagctaatttttgttttttgtttgtttgtttgttgagacggtttcaccctcgcccaggcaggagtgcagtggcgcaatcacagctcactgtagccttgacttcccaggctcagaccatcctcccaccttagcctcccgagtagctgggactacaggcgtgcactaccacacctggctaatttttgtattttttgttgagatggggtcttactatgttgcccaggctggtcctgaactcctggcctcaagtgatcctcttgcctcgacctcccaaagtggtagaattacaggcgtgagccactgtgccaagccacctttgggcggggatgttacatatcttagaacaaggctagaagataaactgaggtcacatacataaaagaacttttttgttgtggttgtttgtttgttttttgagatggagtttcgctcttgttgcttaggttggagtgcaatggcaggatcttggctcaccacaacctccgtctcccgggttcaagcgattctcctgcctcagcctcccccaagtagctgggattacaggcatgcaccaccatgcccagctaattttttatttttagtagaggtgaggtttctccatgttggtcaggctggtctcaaactgtcggaccttaggtgagctgcccgcctgggcctcccaaagtgctgggattacaggtatgagccaccacacccggcctttttttttttttttttctgagacagtctcactctgttgcccaggctggagtgcagtggtgcaatctcaatctcagctcactgcaacctccacctaccaggttcaagtgattctcccacctcagccttcccagtaggtgggactacaggcatgcgccaccacgcctggctaattttgtatttttagtagagatgaggtttcaccatgttggccaggctggtctcgaactcctgacctcaggtgatccacccacctcggcctcccaaagtgctgggatgacaggcgtgagccaccgcgcccggccaaaataactctttaaaggtttatattatccagatatgaggattatcaactttctcaggaaagagattgaggggttttacaggaacaacatgctccgaaaatgaagttttaaaggcttctgggttgtatggcagatttgtagcctcgtgtggcttcaccccagatgtgaaggtttgggaagtctgctttggaaagaagggggagttccaggaggtggtgcgagccttcgaactaaagggccactccgcggctgtgcactcgtttgctttctccaacgactcacggaggtgagtgaatccgctctgatgtctgaccagtggctcttggcccctcttgacaaccagggtccttctgtctgtttgtgccatggctctgaagagggtggggtgcctggccctcggcaggaagctgacttagcttcctagctggagctgctcaagttgggccagtgcttaccctgccagggtgtgttggggcttgagctgtgattttctgtgttgcaggatggcttctgtctccaaggatggtacatggaaactgtgggacacagatgtggaatacaagaagaagcaggacccctacttgctgaagacaggccgctttgaagaggcggcgggtgccgcgccgtgccgcctggccctctcccccaacgcccaggtcttggccttggccagtggcagtagtattcatctctacaatacccggcggggcgagaaggaggagtgctttgagcgggtccatggcgagtgtatcgccaacttgtcctttgacatcactggccgctttctggcctcctgtggggaccgggcggtgcggctgtttcacaacactcctggccaccgagccatggtggaggagatgcagggccacctgaagcgggcctccaacgagagcacccgccagaggctgcagcagcagctgacccaggcccaagagaccctgaagagcctgggtgccctgaagaagtgactctgggagggcccggcgcagaggattgaggaggagggatctggcctcctcatggcactgctgccatctttcctcccaggtggaagcctttcagaaggagtctcctggttttcttactggtggccctgcttcttcccattgaaactactcttgtctacttaggtctctctcttcttgctggctgtgactcctccctgactagtggccaaggtgcttttcttcctcccaggcccagtgggtggaatctgtccccacctggcactgaggagaatggtagagaggagaggagagagagagagaatgtgatttttggccttgtggcagcacatcctcacacccaaagaagtttgtaaatgttccagaacaacctagagaacacctgagtactaagcagcagttttgcaaggatgggagactgggatagcttcccatcacagaactgtgttccatcaaaaagacactaagggatttccttctgggcctcagttctatttgtaagatggagaataatcctctctgtgaactccttgcaaagatgatatgaggctaagagaatatcaagtccccaggtctggaagaaaagtagaaaagagtagtactattgtccaatgtcatgaaagtggtaaaagtgggaaccagtgtgctttgaaaccaaattagaaacacattccttgggaaggcaaagttttctgggacttgatcatacattttatatggttgggacttctctcttcgggagatgatatcttgtttaaggagacctcttttcagttcatcaagttcatcagatatttgagtgcccactctgtgcccaaataaatatgagctggggattaaatacgaataagacatggtttctgccatcaaagatggctggtgggagagagagatacacccttattaagtgctttgtgttagtttattcatagctattgttatatatgtcaaggcaagagaggaccagagcaggacagaggcaatgggtattgaagttgaaggggtacatttgataagagagtcggtattgagaagtttaaatttgtgaatttgaaggctgcgtgggtgtggcaggtaagggaaatgaggtatctgggaaggcttgagtgtaggcaaatttattcatcccaagtcaaactcttgatctctctcacgaaaactatgaccccccctggttgcccctgacctctcaatgttggaacaagccacaaccgtggagttatccttgatgactccccattcattatcccttctgtcccaccaccacagctgtcatctgttcaccagaacgttcttttggttacactccatgtgacatcctgaggctgttgcttctctccagcttttctgttaccatcctggtcctggctactgtcacctagtgggccactataatatggcttcctaatggatcttcctgcttcctctgttgcctcattacttttctatatagcagaatgatcttttgaaaatgtgaaccagatcacattattccctagttaaaaccccccaaggcttcccatcacacttggaataaaatccaaaagaatttttctaaaccaaaaatagtaaaaacaattttttttttctgacaatctcttgtcacccaggctggagtacaatggcgcaatctcggctcactgcaaccgccgcctcctaggttcaagcgattctcctgcctcagcctccagagtagctgggattacaggcatgtgccaccacgcctggctaatttttgtatttttagtagagacagggtttcacgatgttggccaggctgctctcgaactcctgacctcaaatgatccaccaccccccttggcctccccaagtgctgggattacaggtgtgagccatcgtgcctagctaaaaacacttaatccaaaattcttaccatggcctgcaaggtcctgtgtaacctggcttcgtcccccctctaaatgctatgaatgtcagatgggcaccgtaaatgtgtgaagggtcagttacctgggtgtaaggcagtagaaggtggggacagaagtgagctggagggcgggcttgtgtcctgcctgcaggatggggggtggctgctacttattcaggaatccagcagaaattgcttcacagaagctagaagtgagcaacttaaataactaaacactatctggaccaaacaaaacactaaggtcggcccgatgcagtccactactctcttattggcagcttctggctcactgttgaacccactggaatgagagcaccaccgggcagactcctggaccatcccactgtcagctctgtggtccaggcacagtacctgggacagtgtaagcactcaatgtgaaactcaagccaggggcaagccacagacctcccagtatcttctccgcgcatcttcccactcccagtctccattgtggttttgtatgttcctaaccacagacttttggcaatgctgtgcacacaaggcctgaggagtatttccttggcaattgtcagaagaatgagactaaaacacttcctttgcgcacctgttcttagaagcagctctggcattactcccgttgtgtatccaggacaggaagtggcagtagaatgttgagttactgaagtcagatgtcttcagttccagttccagctggagagcagatagtaggtccgttgacctctctgagcttgtttcctcagctgcaaaataagaatgaatcctgtgctacccaccttgccatgttgtgtttcagtgagacgagaaaacactaccaaaaagtcattccacagacttctgaggacagaaagtgccctcactcaagcttctcttgtaaccacagagaaggtgtctggatattaacatagagcagaggccaccaaggtttttcttttttttaatcaaaaatcctgcatgtgaaggcagtaattgtatcttaatattataatttcaacatctgtgggtgtgaaatttttcaaaaaaaaaatttggggaaatattttaaa

SEQ ID NO: 14437 - DNA, 4344 bp, Homo sapiens
actagctgaggtggcagtggttccaccaacatggagctctcgcagatgtcggagctcatggggctgtcggtgttgcttgggctgctggccctgatggcgacggcggcggtagcgcgggggtggctgcgcgcgggggaggagaggagcggccggcccgcctgccaaaaagcaaatggatttccacctgacaaatcttcgggatccaagaagcagaaacaatatcagcggattcggaaggagaagcctcaacaacacaacttcacccaccgcctcctggctgcagctctgaagagccacagcgggaacatatcttgcatggactttagcagcaatggcaaatacctggctacctgtgcagatgatcgcaccatccgcatctggagcaccaaggacttcctgcagcgagagcaccgcagcatgagagccaacgtggagctggaccacgccaccctggtgcgcttcagccctgactgcagagccttcatcgtctggctggccaacggggacaccctccgtgtcttcaagatgaccaagcgggaggatgggggctacaccttcacagccaccccagaggacttccctaaaaagcacaaggcgcctgtcatcgacattggcattgctaacacagggaagtttatcatgactgcctccagtgacaccactgtcctcatctggagcctgaagggtcaagtgctgtctaccatcaacaccaaccagatgaacaacacacacgctgctgtatctccctgtggcagatttgtagcctcgtgtggcttcaccccagatgtgaaggtttgggaagtctgctttggaaagaagggggagttccaggaggtggtgcgagccttcgaactaaagggccactccgcggctgtgcactcgtttgctttctccaacgactcacggaggatggcttctgtctccaaggatggtacatggaaactgtgggacacagatgtggaatacaagaagaagcaggacccctacttgctgaagacaggccgctttgaagaggcggcgggtgccgcgccgtgccgcctggccctctcccccaacgcccaggtcttggccttggccagtggcagtagtattcatctctacaatacccggcggggcgagaaggaggagtgctttgagcgggtccatggcgagtgtatcgccaacttgtcctttgacatcactggccgctttctggcctcctgtggggaccgggcggtgcggctgtttcacaacactcctggccaccgagccatggtggaggagatgcagggccacctgaagcgggcctccaacgagagcacccgccagaggctgcagcagcagctgacccaggcccaagagaccctgaagagcctgggtgccctgaagaagtgactctgggagggcccggcgcagaggattgaggaggagggatctggcctcctcatggcactgctgccatctttcctcccaggtggaagcctttcagaaggagtctcctggttttcttactggtggccctgcttcttcccattgaaactactcttgtctacttaggtctctctcttcttgctggctgtgactcctccctgactagtggccaaggtgcttttcttcctcccaggcccagtgggtggaatctgtccccacctggcactgaggagaatggtagagaggagaggagagagagagagaatgtgatttttggccttgtggcagcacatcctcacacccaaagaagtttgtaaatgttccagaacaacctagagaacacctgagtactaagcagcagttttgcaaggatgggagactgggatagcttcccatcacagaactgtgttccatcaaaaagacactaagggatttccttctgggcctcagttctatttgtaagatggagaataatcctctctgtgaactccttgcaaagatgatatgaggctaagagaatatcaagtccccaggtctggaagaaaagtagaaaagagtagtactattgtccaatgtcatgaaagtggtaaaagtgggaaccagtgtgctttgaaaccaaattagaaacacattccttgggaaggcaaagttttctgggacttgatcatacattttatatggttgggacttctctcttcgggagatgatatcttgtttaaggagacctcttttcagttcatcaagttcatcagatatttgagtgcccactctgtgcccaaataaatatgagctggggattaaatacgaataagacatggtttctgccatcaaagatggctggtgggagagagagatacacccttattaagtgctttgtgttagtttattcatagctattgttatatatgtcaaggcaagagaggaccagagcaggacagaggcaatgggtattgaagttgaaggggtacatttgataagagagtcggtattgagaagtttaaatttgtgaatttgaaggctgcgtgggtgtggcaggtaagggaaatgaggtatctgggaaggcttgagtgtaggcaaatttattcatcccaagtcaaactcttgatctctctcacgaaaactatgaccccccctggttgcccctgacctctcaatgttggaacaagccacaaccgtggagttatccttgatgactccccattcattatcccttctgtcccaccaccacagctgtcatctgttcaccagaacgttcttttggttacactccatgtgacatcctgaggctgttgcttctctccagcttttctgttaccatcctggtcctggctactgtcacctagtgggccactataatatggcttcctaatggatcttcctgcttcctctgttgcctcattacttttctatatagcagaatgatcttttgaaaatgtgaaccagatcacattattccctagttaaaaccccccaaggcttcccatcacacttggaataaaatccaaaagaatttttctaaaccaaaaatagtaaaaacaattttttttttctgacaatctcttgtcacccaggctggagtacaatggcgcaatctcggctcactgcaaccgccgcctcctaggttcaagcgattctcctgcctcagcctccagagtagctgggattacaggcatgtgccaccacgcctggctaatttttgtatttttagtagagacagggtttcacgatgttggccaggctgctctcgaactcctgacctcaaatgatccaccaccccccttggcctccccaagtgctgggattacaggtgtgagccatcgtgcctagctaaaaacacttaatccaaaattcttaccatggcctgcaaggtcctgtgtaacctggcttcgtcccccctctaaatgctatgaatgtcagatgggcaccgtaaatgtgtgaagggtcagttacctgggtgtaaggcagtagaaggtggggacagaagtgagctggagggcgggcttgtgtcctgcctgcaggatggggggtggctgctacttattcaggaatccagcagaaattgcttcacagaagctagaagtgagcaacttaaataactaaacactatctggaccaaacaaaacactaaggtcggcccgatgcagtccactactctcttattggcagcttctggctcactgttgaacccactggaatgagagcaccaccgggcagactcctggaccatcccactgtcagctctgtggtccaggcacagtacctgggacagtgtaagcactcaatgtgaaactcaagccaggggcaagccacagacctcccagtatcttctccgcgcatcttcccactcccagtctccattgtggttttgtatgttcctaaccacagacttttggcaatgctgtgcacacaaggcctgaggagtatttccttggcaattgtcagaagaatgagactaaaacacttcctttgcgcacctgttcttagaagcagctctggcattactcccgttgtgtatccaggacaggaagtggcagtagaatgttgagttactgaagtcagatgtcttcagttccagttccagctggagagcagatagtaggtccgttgacctctctgagcttgtttcctcagctgcaaaataagaatgaatcctgtgctacccaccttgccatgttgtgtttcagtgagacgagaaaacactaccaaaaagtcattccacagacttctgaggacagaaagtgccctcactcaagcttctcttgtaaccacagagaaggtgtctggatattaacatagagcagaggccaccaaggtttttcttttttttaatcaaaaatcctgcatgtgaaggcagtaattgtatcttaatattataatttcaacatctgtgggtgtgaaatttttcaaaaaaaaaatttggggaaatattttaaa

SEQ ID NO: 14438 - DNA, 8547 bp, Homo sapiens
ccaacatggagctctcgcagatgtcggagctcatggggctgtcggtgttgcttgggctgctggccctgatggcgacggcggcggtagcgcgggggtggctgcgcgcgggggaggagaggagcggccggcccgcctgtaagtggggccgggtcgggtgggggcggcccgcggtgtcccggctcccggcctcctcgtggtccgacctgcggtttgggcccgcggctggtggggcccggcgactccatgggcctcagtttctcctctggtaacgtgagcttcgcttccagagacggggacccgccttgccgggttaggcgcacctcctggggcgggactggctccaacctgggccccttactgcggctttctctgtggccgaggccaggccgtccccggggtggccaggagagcaccgtaaactcttcagcctgctccgtggccgcgatctcggaaaaagcaccaattctgtgatgtgcagcagcatttactgggcatctatgaccctgtgataggctttggggtctttttctgtaaggagtccagtaaaggagaagtacatctgtattatgaacacctaaatatgtaagtgaaaaacacggtgaaataagtttcactgaggccaggcgaagtggctcacgcctgtattcccagcactttgggaggccgaggcagggagatcgcttgagcccaggagtttgggaccagcctgagcaacatagcaagaccccatctctacgcaaaattagctgggtgtggttgtgcacgcccctgtagtcccagctccatgggaggccgaggcaggagggtgtcgtgagtccaggaattcaaggctgcagtgagttgtgatagatcgcgccactgtacttcagcctgggtgacggcaagagcctgtctctgaaaagtttcatagaagaggttagtactagaaatgggaaacaccagagagtcagtgggcagccctgctctttttatttatttttcagacagagtttcgctcttcttgcccaggctggagtgcagtggcacaatcttggctcgttgcaacttccgcctgccaggttcaagcgattcttctgcctctgcctcccgagtagctgggactacaggcacacaccaccacgcctggctaatttttgtatatttagtagacggggtttcgccacgttggtcaggctggtctcgaacgcctgatctcaggtgatccactcgtcctggcctccaaaagtgctgagattacaggcgtgaaccactgtgcccggccagccctgcattttttttttttttttttttgcagggggacggagttttgctctgtcgcccaatctggagtctagtggcgggatctcggctcactgcaagctccgcctctgggttcacgccattctcctgcctcagcctcctgagtagctgggactacaggcgtccgacaccacacccggctaattttttgtattttttgagtagagacggggtttcactgtgttagccaggatggtctcaatctcctaacctcttgtgatccacctgcctcggcctcccaaagtgctgggattacaggcgtgagccaccctgcctggccgagtcctgttcttttatgggggaggtggttgttagggaaatcattactgagaatagggggcacatgaggtagtgtggggtctcaaaggatggttctagaagaagagtttgccagaaggccaaggaaaaaagacattcctgccaatggcaatacccgagaaggcaaggagtccccaaacagcatttggtatgacttaagtgtgaggaggggggcttgttagacatgcctggagagaaggaagcagaggacagattgtggctgtgtttgtttgcagggcccaggagcttttttcctgttggaattggggagcatctgcagtcatttaccacatgccagctttgtgactcaattaagtatcttttacaaaagtgactggctccactcccccgcacaggactcaacagatgttgacttctcatccccgagttctttcaggtactggagtgcagtggtgcgatcttggcttactgcaacctctacctcctgggttcaagtgattctcctgcctcagcctcctgagtagctgggattacaggcgcctgccaccacgcccggctaatttttgtatttttagtagagacggggtttcaccatgttggccagactggtggaactcctgggcatcaagatgatccagctgccgggccgggcatggtgactcacgcctgtaatcccagcactttgggaggccgaagcgggcaggtcacaaggtcaggagatcgagactgaggcaacagagcgagactctgtatcaaacaaaaaaaaaaaatgatccagcagctgcctcagcctcccaaagcgctgggattacaggcatgagccaccgcacccggcctccatagagcctttaatgcttgtgttcggtacttttgcttgtcactttgtagatatctcatccaattcaatctcccttatttttatttatttatttatttatttattttgagacagaatctcactctgtcgcctaggctggaatacagtggcacgatcactgcatttgaactcctgggctcaagcaattttccctcctcagcctccgaatagctgggaccacaggcgcacaccaccatgcccagctaattaaagttttctgtagagatggggtgtcactatgttacccaggctggtctcgaactcctgagctcaagcaatcctcccatctcagcctaccaaaatgctgggatcacaggcatgagccaccgcccccagttctcaacctctctttaagaaaaccaaggctgggccggacacagtggctcacgcctataatcccagcactttgggaggccaaggcaggcagatcacttgaggtgaggagttggagacaagcctggcccacatggtgaaaccccatctctactaaaaaaacaaaaaaattggggccaggtgccatggctcacgcctgtaatcctagcactttgggaggccgaggcgggtggatcacaaggtcaggagattgagaccattctggctaatgtggtgaaaccccacatctactaaaaatacaaaaaaaaattagccgggcatggtggcgggcgcctgtagtcccagctacttgggaggctgaggcaggagaatggcgtgaacccgggaggcagagcttgcagtgagctgagatcacgccactgcactccagcctgggtgacagagcgagactccatctgaaaaaaaaaaaaaaaattagctggatatggtggtgcacgcccatgatcccagctacttggaaggctgaggcacaagaattgcttgaacctgggaggcagaggctacagtgagcggagatcacgccactgcactccagcctgggcgacagagcaagactctgtctccaaaaaaaagaaagaaagaaaagaaaaaaaaaaccaaggtccagagcaattcactaacttacccaaagcagggccgctagagatggttgtgcacattactccctacatagggatgtctggccaaggatccacactccactggccgtgctgtgtacccgcccagcagcatcacccaacccagagagtgcgccttttccactctacatgaaggtgctctgtggacttactgtaaacagcctcctcagtagtcagtcagtagtagagacagaatccaaacccaggtctgattccaaagcctctgttttgtttctgttttctgtttgtttttttttgagacagggtcttgctctgtcactcaggatggaatgcagtagtgttgtgatcatagcttactgcagcctcgaactcctgggctcaaatgatccaaagcattgggattacaggcatgagccaccatacccagccagccaaagcctctgtttttgcccatatcacactcattctcctccagaagacaagggccatatctggttaatctcctgctgttccactcaatgcctggctcatcataggtgggcagtaaatgcttatcagtgagtaactggagaacaacatggcccttccttataggccaaaaagcaaatggatttccacctgacaaatcttcgggatccaagaagcagaaacaatatcagcggattcggaaggagaagcctcaacaacacaacttcacccaccgcctcctggctgcagctctgaaggtacgtggggtacctggcacagcgtgcaccctgagactcagccccacaggcttttcctctggagtattccatgcatgttacaggctctcctgcctctgatcagaatcagcgggggtgcttaattctgtcccctctcatcgcagcccaatctcagcttgctgttaatccaggccacagggccccatctccccggctccaggtttggcttccccatctcccccaggagctcctattgacacttcctgccacccttcccctagagccacagcgggaacatatcttgcatggactttagcagcaatggcaaatacctggctacctgtgcagatgatcgcaccatccgcatctggagcaccaaggacttcctgcagcgagagcaccgcagcatgagagccaacgtggagctggaccacgccaccctggtgcgcttcagccctgactgcaggtgggacaagacggagcctcaggtttgcctgcagaggcctagtcccaggctttggccttcccatatctgctttgaggtagtgaggagggacctggacccagggcctcccttggggtgccagaaagagcatccacatagtttgcgcgctgcctggggctccctggagatctgggctgctatacagcaaggaaacagggggaggtctcttcctacctggaaataccttggcctggcttccagatgagccttagtttctaaaccctagagagaaactaaaggagccaaagctatcagaatcttaccttttgaggagttttatgagatttggaaccaggggcttaagttttaaggctagactgtggggcatgaggagagatcttgacttccccgagaacccagcacaggacctggaacacagagcctctttgtccagtgagagcgtgacttgtctgctgcctgtctctagagccttcatcgtctggctggccaacggggacaccctccgtgtcttcaagatgaccaagcgggaggatgggggctacaccttcacagccaccccagaggacttccctaaaaagcacaaggcgcctgtcatcgacattggcattgctaacacaggtaagaggcattcagagggtggcgcctgcccaaagcatgaaggaaagatccagttctatttcctcaatgagttaatgctgcctgaaagttctgctcaacctgagaggaacaaggggtccctggctctgaacagcctggctctgtgctcccctggagtccctgggccacaccaggtccctagggaaggtggggaagggccacagtcttcagcagagtccttatctgtagtgacccttggcctgggaggagacatgtatacttcgggcagcagaggccttgtaagtgtctttggagagtgacagttggtcaggtcactgcccgtgacccacatcactcccttcccgctcagggaagtttatcatgactgcctccagtgacaccactgtcctcatctggagcctgaagggtcaagtgctgtctaccatcaacaccaaccagatgaacaacacacacgctgctgtatctccctgtggcaggtgggcaaggaggggtattggcgtctgggaccacgagaggctggggctggggagcaggcacagaacagagagccagcttcatcgcgtgggaagagcatacggggtggggtcaggaacccgagcttcaagtctcagctctccccacttgcagtagtgggatttcatgcaggtcgccccatgtccttagtcgctatttcttcatcttcagtgtttttgttttttagaaaattagtctcactctgtcacccaggctggagcacagtggtgcgatcatagctcactgcagcctcaaactcctgggttgtagctattctcccagctcagcctcctgagtagtcaggactataggcatgtgccactgtactcagctaatttttgttttttgtttgtttgtttgttgagacggtttcaccctcgcccaggcaggagtgcagtggcgcaatcacagctcactgtagccttgacttcccaggctcagaccatcctcccaccttagcctcccgagtagctgggactacaggcgtgcactaccacacctggctaatttttgtattttttgttgagatggggtcttactatgttgcccaggctggtcctgaactcctggcctcaagtgatcctcttgcctcgacctcccaaagtggtagaattacaggcgtgagccactgtgccaagccacctttgggcggggatgttacatatcttagaacaaggctagaagataaactgaggtcacatacataaaagaacttttttgttgtggttgtttgtttgttttttgagatggagtttcgctcttgttgcttaggttggagtgcaatggcaggatcttggctcaccacaacctccgtctcccgggttcaagcgattctcctgcctcagcctcccccaagtagctgggattacaggcatgcaccaccatgcccagctaattttttatttttagtagaggtgaggtttctccatgttggtcaggctggtctcaaactgtcggaccttaggtgagctgcccgcctgggcctcccaaagtgctgggattacaggtatgagccaccacacccggcctttttttttttttttttctgagacagtctcactctgttgcccaggctggagtgcagtggtgcaatctcaatctcagctcactgcaacctccacctaccaggttcaagtgattctcccacctcagccttcccagtaggtgggactacaggcatgcgccaccacgcctggctaattttgtatttttagtagagatgaggtttcaccatgttggccaggctggtctcgaactcctgacctcaggtgatccacccacctcggcctcccaaagtgctgggatgacaggcgtgagccaccgcgcccggccaaaataactctttaaaggtttatattatccagatatgaggattatcaactttctcaggaaagagattgaggggttttacaggaacaacatgctccgaaaatgaagttttaaaggcttctgggttgtatggcagatttgtagcctcgtgtggcttcaccccagatgtgaaggtttgggaagtctgctttggaaagaagggggagttccaggaggtggtgcgagccttcgaactaaagggccactccgcggctgtgcactcgtttgctttctccaacgactcacggaggtgagtgaatccgctctgatgtctgaccagtggctcttggcccctcttgacaaccagggtccttctgtctgtttgtgccatggctctgaagagggtggggtgcctggccctcggcaggaagctgacttagcttcctagctggagctgctcaagttgggccagtgcttaccctgccagggtgtgttggggcttgagctgtgattttctgtgttgcaggatggcttctgtctccaaggatggtacatggaaactgtgggacacagatgtggaatacaagaagaagcaggacccctacttgctgaagacaggccgctttgaagaggcggcgggtgccgcgccgtgccgcctggccctctcccccaacgcccaggtcttggccttggccagtggcagtagtattcatctctacaatacccggcggggcgagaaggaggagtgctttgagcgggtccatggcgagtgtatcgccaacttgtcctttgacatcactggccgctttctggcctcctgtggggaccgggcggtgcggctgtttcacaacactcctggccaccgagccatggtggaggagatgcagggccacctgaagcgggcctccaacgagagcacccgccagaggctgcagcagcagctgacccaggcccaagagaccctgaagagcctgggtgccctgaagaagtgactctgggagggcccggcgcagaggattgaggaggagggatctggcctcctcatggcactgctgccatctttcctcccaggtggaagcctttcagaaggagtctcctggttttcttactggtggccctgcttcttcccattgaaactactcttgtctacttaggtctctctcttcttgctggctgtgactcctccctgactagtggccaaggtgcttttcttcctcccaggcccagtgggtggaatctgtccccacctggcactgaggagaatggtagagaggagaggagagagagagagaatgtgatttttggccttgtggcagcacatcctcacacccaaagaagtttgtaaatgttccagaacaacctagagaacacctgagtactaagcagcagttttgcaaggatgggagactgggatagcttcccatcacagaactgtgttccatcaaaaagacactaagggatttccttctgggcctcagttctatttgtaag

SEQ ID NO: 14439 - DNA, 1717 bp, Homo sapiens
ccaacatggagctctcgcagatgtcggagctcatggggctgtcggtgttgcttgggctgctggccctgatggcgacggcggcggtagcgcgggggtggctgcgcgcgggggaggagaggagcggccggcccgcctagccacagcgggaacatatcttgcatggactttagcagcaatggcaaatacctggctacctgtgcagatgatcgcaccatccgcatctggagcaccaaggacttcctgcagcgagagcaccgcagcatgagagccaacgtggagctggaccacgccaccctggtgcgcttcagccctgactgcagagccttcatcgtctggctggccaacggggacaccctccgtgtcttcaagatgaccaagcgggaggatgggggctacaccttcacagccaccccagaggacttccctaaaaagcacaaggcgcctgtcatcgacattggcattgctaacacagggaagtttatcatgactgcctccagtgacaccactgtcctcatctggagcctgaagggtcaagtgctgtctaccatcaacaccaaccagatgaacaacacacacgctgctgtatctccctgtggcagatttgtagcctcgtgtggcttcaccccagatgtgaaggtttgggaagtctgctttggaaagaagggggagttccaggaggtggtgcgagccttcgaactaaagggccactccgcggctgtgcactcgtttgctttctccaacgactcacggaggatggcttctgtctccaaggatggtacatggaaactgtgggacacagatgtggaatacaagaagaagcaggacccctacttgctgaagacaggccgctttgaagaggcggcgggtgccgcgccgtgccgcctggccctctcccccaacgcccaggtcttggccttggccagtggcagtagtattcatctctacaatacccggcggggcgagaaggaggagtgctttgagcgggtccatggcgagtgtatcgccaacttgtcctttgacatcactggccgctttctggcctcctgtggggaccgggcggtgcggctgtttcacaacactcctggccaccgagccatggtggaggagatgcagggccacctgaagcgggcctccaacgagagcacccgccagaggctgcagcagcagctgacccaggcccaagagaccctgaagagcctgggtgccctgaagaagtgactctgggagggcccggcgcagaggattgaggaggagggatctggcctcctcatggcactgctgccatctttcctcccaggtggaagcctttcagaaggagtctcctggttttcttactggtggccctgcttcttcccattgaaactactcttgtctacttaggtctctctcttcttgctggctgtgactcctccctgactagtggccaaggtgcttttcttcctcccaggcccagtgggtggaatctgtccccacctggcactgaggagaatggtagagaggagaggagagagagagagaatgtgatttttggccttgtggcagcacatcctcacacccaaagaagtttgtaaatgttccagaacaacctagagaacacctgagtactaagcagcagttttgcaaggatgggagactgggatagcttcccatcacagaactgtgttccatcaaaaagacactaagggatttccttctgggcctcagttctatttgtaag

SEQ ID NO: 14440 - DNA, 8917 bp, Homo sapiens
agctgaggtggcagtggttccaccaacatggagctctcgcagatgtcggagctcatggggctgtcggtgttgcttgggctgctggccctgatggcgacggcggcggtagcgcgggggtggctgcgcgcgggggaggagaggagcggccggcccgcctgtaagtggggccgggtcgggtgggggcggcccgcggtgtcccggctcccggcctcctcgtggtccgacctgcggtttgggcccgcggctggtggggcccggcgactccatgggcctcagtttctcctctggtaacgtgagcttcgcttccagagacggggacccgccttgccgggttaggcgcacctcctggggcgggactggctccaacctgggccccttactgcggctttctctgtggccgaggccaggccgtccccggggtggccaggagagcaccgtaaactcttcagcctgctccgtggccgcgatctcggaaaaagcaccaattctgtgatgtgcagcagcatttactgggcatctatgaccctgtgataggctttggggtctttttctgtaaggagtccagtaaaggagaagtacatctgtattatgaacacctaaatatgtaagtgaaaaacacggtgaaataagtttcactgaggccaggcgaagtggctcacgcctgtattcccagcactttgggaggccgaggcagggagatcgcttgagcccaggagtttgggaccagcctgagcaacatagcaagaccccatctctacgcaaaattagctgggtgtggttgtgcacgcccctgtagtcccagctccatgggaggccgaggcaggagggtgtcgtgagtccaggaattcaaggctgcagtgagttgtgatagatcgcgccactgtacttcagcctgggtgacggcaagagcctgtctctgaaaagtttcatagaagaggttagtactagaaatgggaaacaccagagagtcagtgggcagccctgctctttttatttatttttcagacagagtttcgctcttcttgcccaggctggagtgcagtggcacaatcttggctcgttgcaacttccgcctgccaggttcaagcgattcttctgcctctgcctcccgagtagctgggactacaggcacacaccaccacgcctggctaatttttgtatatttagtagacggggtttcgccacgttggtcaggctggtctcgaacgcctgatctcaggtgatccactcgtcctggcctccaaaagtgctgagattacaggcgtgaaccactgtgcccggccagccctgcattttttttttttttttttttgcagggggacggagttttgctctgtcgcccaatctggagtctagtggcgggatctcggctcactgcaagctccgcctctgggttcacgccattctcctgcctcagcctcctgagtagctgggactacaggcgtccgacaccacacccggctaattttttgtattttttgagtagagacggggtttcactgtgttagccaggatggtctcaatctcctaacctcttgtgatccacctgcctcggcctcccaaagtgctgggattacaggcgtgagccaccctgcctggccgagtcctgttcttttatgggggaggtggttgttagggaaatcattactgagaatagggggcacatgaggtagtgtggggtctcaaaggatggttctagaagaagagtttgccagaaggccaaggaaaaaagacattcctgccaatggcaatacccgagaaggcaaggagtccccaaacagcatttggtatgacttaagtgtgaggaggggggcttgttagacatgcctggagagaaggaagcagaggacagattgtggctgtgtttgtttgcagggcccaggagcttttttcctgttggaattggggagcatctgcagtcatttaccacatgccagctttgtgactcaattaagtatcttttacaaaagtgactggctccactcccccgcacaggactcaacagatgttgacttctcatccccgagttctttcaggtactggagtgcagtggtgcgatcttggcttactgcaacctctacctcctgggttcaagtgattctcctgcctcagcctcctgagtagctgggattacaggcgcctgccaccacgcccggctaatttttgtatttttagtagagacggggtttcaccatgttggccagactggtggaactcctgggcatcaagatgatccagctgccgggccgggcatggtgactcacgcctgtaatcccagcactttgggaggccgaagcgggcaggtcacaaggtcaggagatcgagactgaggcaacagagcgagactctgtatcaaacaaaaaaaaaaaatgatccagcagctgcctcagcctcccaaagcgctgggattacaggcatgagccaccgcacccggcctccatagagcctttaatgcttgtgttcggtacttttgcttgtcactttgtagatatctcatccaattcaatctcccttatttttatttatttatttatttatttattttgagacagaatctcactctgtcgcctaggctggaatacagtggcacgatcactgcatttgaactcctgggctcaagcaattttccctcctcagcctccgaatagctgggaccacaggcgcacaccaccatgcccagctaattaaagttttctgtagagatggggtgtcactatgttacccaggctggtctcgaactcctgagctcaagcaatcctcccatctcagcctaccaaaatgctgggatcacaggcatgagccaccgcccccagttctcaacctctctttaagaaaaccaaggctgggccggacacagtggctcacgcctataatcccagcactttgggaggccaaggcaggcagatcacttgaggtgaggagttggagacaagcctggcccacatggtgaaaccccatctctactaaaaaaacaaaaaaattggggccaggtgccatggctcacgcctgtaatcctagcactttgggaggccgaggcgggtggatcacaaggtcaggagattgagaccattctggctaatgtggtgaaaccccacatctactaaaaatacaaaaaaaaattagccgggcatggtggcgggcgcctgtagtcccagctacttgggaggctgaggcaggagaatggcgtgaacccgggaggcagagcttgcagtgagctgagatcacgccactgcactccagcctgggtgacagagcgagactccatctgaaaaaaaaaaaaaaaattagctggatatggtggtgcacgcccatgatcccagctacttggaaggctgaggcacaagaattgcttgaacctgggaggcagaggctacagtgagcggagatcacgccactgcactccagcctgggcgacagagcaagactctgtctccaaaaaaaagaaagaaagaaaagaaaaaaaaaaccaaggtccagagcaattcactaacttacccaaagcagggccgctagagatggttgtgcacattactccctacatagggatgtctggccaaggatccacactccactggccgtgctgtgtacccgcccagcagcatcacccaacccagagagtgcgccttttccactctacatgaaggtgctctgtggacttactgtaaacagcctcctcagtagtcagtcagtagtagagacagaatccaaacccaggtctgattccaaagcctctgttttgtttctgttttctgtttgtttttttttgagacagggtcttgctctgtcactcaggatggaatgcagtagtgttgtgatcatagcttactgcagcctcgaactcctgggctcaaatgatccaaagcattgggattacaggcatgagccaccatacccagccagccaaagcctctgtttttgcccatatcacactcattctcctccagaagacaagggccatatctggttaatctcctgctgttccactcaatgcctggctcatcataggtgggcagtaaatgcttatcagtgagtaactggagaacaacatggcccttccttataggccaaaaagcaaatggatttccacctgacaaatcttcgggatccaagaagcagaaacaatatcagcggattcggaaggagaagcctcaacaacacaacttcacccaccgcctcctggctgcagctctgaaggtacgtggggtacctggcacagcgtgcaccctgagactcagccccacaggcttttcctctggagtattccatgcatgttacaggctctcctgcctctgatcagaatcagcgggggtgcttaattctgtcccctctcatcgcagcccaatctcagcttgctgttaatccaggccacagggccccatctccccggctccaggtttggcttccccatctcccccaggagctcctattgacacttcctgccacccttcccctagagccacagcgggaacatatcttgcatggactttagcagcaatggcaaatacctggctacctgtgcagatgatcgcaccatccgcatctggagcaccaaggacttcctgcagcgagagcaccgcagcatgagagccaacgtggagctggaccacgccaccctggtgcgcttcagccctgactgcaggtgggacaagacggagcctcaggtttgcctgcagaggcctagtcccaggctttggccttcccatatctgctttgaggtagtgaggagggacctggacccagggcctcccttggggtgccagaaagagcatccacatagtttgcgcgctgcctggggctccctggagatctgggctgctatacagcaaggaaacagggggaggtctcttcctacctggaaataccttggcctggcttccagatgagccttagtttctaaaccctagagagaaactaaaggagccaaagctatcagaatcttaccttttgaggagttttatgagatttggaaccaggggcttaagttttaaggctagactgtggggcatgaggagagatcttgacttccccgagaacccagcacaggacctggaacacagagcctctttgtccagtgagagcgtgacttgtctgctgcctgtctctagagccttcatcgtctggctggccaacggggacaccctccgtgtcttcaagatgaccaagcgggaggatgggggctacaccttcacagccaccccagaggacttccctaaaaagcacaaggcgcctgtcatcgacattggcattgctaacacaggtaagaggcattcagagggtggcgcctgcccaaagcatgaaggaaagatccagttctatttcctcaatgagttaatgctgcctgaaagttctgctcaacctgagaggaacaaggggtccctggctctgaacagcctggctctgtgctcccctggagtccctgggccacaccaggtccctagggaaggtggggaagggccacagtcttcagcagagtccttatctgtagtgacccttggcctgggaggagacatgtatacttcgggcagcagaggccttgtaagtgtctttggagagtgacagttggtcaggtcactgcccgtgacccacatcactcccttcccgctcagggaagtttatcatgactgcctccagtgacaccactgtcctcatctggagcctgaagggtcaagtgctgtctaccatcaacaccaaccagatgaacaacacacacgctgctgtatctccctgtggcaggtgggcaaggaggggtattggcgtctgggaccacgagaggctggggctggggagcaggcacagaacagagagccagcttcatcgcgtgggaagagcatacggggtggggtcaggaacccgagcttcaagtctcagctctccccacttgcagtagtgggatttcatgcaggtcgccccatgtccttagtcgctatttcttcatcttcagtgtttttgttttttagaaaattagtctcactctgtcacccaggctggagcacagtggtgcgatcatagctcactgcagcctcaaactcctgggttgtagctattctcccagctcagcctcctgagtagtcaggactataggcatgtgccactgtactcagctaatttttgttttttgtttgtttgtttgttgagacggtttcaccctcgcccaggcaggagtgcagtggcgcaatcacagctcactgtagccttgacttcccaggctcagaccatcctcccaccttagcctcccgagtagctgggactacaggcgtgcactaccacacctggctaatttttgtattttttgttgagatggggtcttactatgttgcccaggctggtcctgaactcctggcctcaagtgatcctcttgcctcgacctcccaaagtggtagaattacaggcgtgagccactgtgccaagccacctttgggcggggatgttacatatcttagaacaaggctagaagataaactgaggtcacatacataaaagaacttttttgttgtggttgtttgtttgttttttgagatggagtttcgctcttgttgcttaggttggagtgcaatggcaggatcttggctcaccacaacctccgtctcccgggttcaagcgattctcctgcctcagcctcccccaagtagctgggattacaggcatgcaccaccatgcccagctaattttttatttttagtagaggtgaggtttctccatgttggtcaggctggtctcaaactgtcggaccttaggtgagctgcccgcctgggcctcccaaagtgctgggattacaggtatgagccaccacacccggcctttttttttttttttttctgagacagtctcactctgttgcccaggctggagtgcagtggtgcaatctcaatctcagctcactgcaacctccacctaccaggttcaagtgattctcccacctcagccttcccagtaggtgggactacaggcatgcgccaccacgcctggctaattttgtatttttagtagagatgaggtttcaccatgttggccaggctggtctcgaactcctgacctcaggtgatccacccacctcggcctcccaaagtgctgggatgacaggcgtgagccaccgcgcccggccaaaataactctttaaaggtttatattatccagatatgaggattatcaactttctcaggaaagagattgaggggttttacaggaacaacatgctccgaaaatgaagttttaaaggcttctgggttgtatggcagatttgtagcctcgtgtggcttcaccccagatgtgaaggtttgggaagtctgctttggaaagaagggggagttccaggaggtggtgcgagccttcgaactaaagggccactccgcggctgtgcactcgtttgctttctccaacgactcacggaggtgagtgaatccgctctgatgtctgaccagtggctcttggcccctcttgacaaccagggtccttctgtctgtttgtgccatggctctgaagagggtggggtgcctggccctcggcaggaagctgacttagcttcctagctggagctgctcaagttgggccagtgcttaccctgccagggtgtgttggggcttgagctgtgattttctgtgttgcaggatggcttctgtctccaaggatggtacatggaaactgtgggacacagatgtggaatacaagaagaagcaggacccctacttgctgaagacaggccgctttgaagaggcggcgggtgccgcgccgtgccgcctggccctctcccccaacgcccaggtcttggccttggccagtggcagtagtattcatctctacaatacccggcggggcgagaaggaggagtgctttgagcgggtccatggcgagtgtatcgccaacttgtcctttgacatcactggccgctttctggcctcctgtggggaccgggcggtgcggctgtttcacaacactcctggccaccgagccatggtggaggagatgcagggccacctgaagcgggcctccaacgagagcacccgccagaggctgcagcagcagctgacccaggcccaagagaccctgaagagcctgggtgccctgaagaagtgactctgggagggcccggcgcagaggattgaggaggagggatctggcctcctcatggcactgctgccatctttcctcccaggtggaagcctttcagaaggagtctcctggttttcttactggtggccctgcttcttcccattgaaactactcttgtctacttaggtctctctcttcttgctggctgtgactcctccctgactagtggccaaggtgcttttcttcctcccaggcccagtgggtggaatctgtccccacctggcactgaggagaatggtagagaggagaggagagagagagagaatgtgatttttggccttgtggcagcacatcctcacacccaaagaagtttgtaaatgttccagaacaacctagagaacacctgagtactaagcagcagttttgcaaggatgggagactgggatagcttcccatcacagaactgtgttccatcaaaaagacactaagggatttccttctgggcctcagttctatttgtaagatggagaataatcctctctgtgaactccttgcaaagatgatatgaggctaagagaatatcaagtccccaggtctggaagaaaagtagaaaagagtagtactattgtccaatgtcatgaaagtggtaaaagtgggaaccagtgtgctttgaaaccaaattagaaacacattccttgggaaggcaaagttttctgggacttgatcatacattttatatggttgggacttctctcttcgggagatgatatcttgtttaaggagacctcttttcagttcatcaagttcatcagatatttgagtgcccactctgtgcccaaataaatatgagctggggattaaatacgaataa

SEQ ID NO: 14441 - DNA, 2276 bp, Homo sapiens
agctgaggtggcagtggttccaccaacatggagctctcgcagatgtcggagctcatggggctgtcggtgttgcttgggctgctggccctgatggcgacggcggcggtagcgcgggggtggctgcgcgcgggggaggagaggagcggccggcccgcctgtgggcagtaaatgcttatcagtgagtaactggagaacaacatggcccttccttataggccaaaaagcaaatggatttccacctgacaaatcttcgggatccaagaagcagaaacaatatcagcggattcggaaggagaagcctcaacaacacaacttcacccaccgcctcctggctgcagctctgaagagccacagcgggaacatatcttgcatggactttagcagcaatggcaaatacctggctacctgtgcagatgatcgcaccatccgcatctggagcaccaaggacttcctgcagcgagagcaccgcagcatgagagccaacgtggagctggaccacgccaccctggtgcgcttcagccctgactgcagagccttcatcgtctggctggccaacggggacaccctccgtgtcttcaagatgaccaagcgggaggatgggggctacaccttcacagccaccccagaggacttccctaaaaagcacaaggcgcctgtcatcgacattggcattgctaacacagggaagtttatcatgactgcctccagtgacaccactgtcctcatctggagcctgaagggtcaagtgctgtctaccatcaacaccaaccagatgaacaacacacacgctgctgtatctccctgtggcagatttgtagcctcgtgtggcttcaccccagatgtgaaggtttgggaagtctgctttggaaagaagggggagttccaggaggtggtgcgagccttcgaactaaagggccactccgcggctgtgcactcgtttgctttctccaacgactcacggaggatggcttctgtctccaaggatggtacatggaaactgtgggacacagatgtggaatacaagaagaagcaggacccctacttgctgaagacaggccgctttgaagaggcggcgggtgccgcgccgtgccgcctggccctctcccccaacgcccaggtcttggccttggccagtggcagtagtattcatctctacaatacccggcggggcgagaaggaggagtgctttgagcgggtccatggcgagtgtatcgccaacttgtcctttgacatcactggccgctttctggcctcctgtggggaccgggcggtgcggctgtttcacaacactcctggccaccgagccatggtggaggagatgcagggccacctgaagcgggcctccaacgagagcacccgccagaggctgcagcagcagctgacccaggcccaagagaccctgaagagcctgggtgccctgaagaagtgactctgggagggcccggcgcagaggattgaggaggagggatctggcctcctcatggcactgctgccatctttcctcccaggtggaagcctttcagaaggagtctcctggttttcttactggtggccctgcttcttcccattgaaactactcttgtctacttaggtctctctcttcttgctggctgtgactcctccctgactagtggccaaggtgcttttcttcctcccaggcccagtgggtggaatctgtccccacctggcactgaggagaatggtagagaggagaggagagagagagagaatgtgatttttggccttgtggcagcacatcctcacacccaaagaagtttgtaaatgttccagaacaacctagagaacacctgagtactaagcagcagttttgcaaggatgggagactgggatagcttcccatcacagaactgtgttccatcaaaaagacactaagggatttccttctgggcctcagttctatttgtaagatggagaataatcctctctgtgaactccttgcaaagatgatatgaggctaagagaatatcaagtccccaggtctggaagaaaagtagaaaagagtagtactattgtccaatgtcatgaaagtggtaaaagtgggaaccagtgtgctttgaaaccaaattagaaacacattccttgggaaggcaaagttttctgggacttgatcatacattttatatggttgggacttctctcttcgggagatgatatcttgtttaaggagacctcttttcagttcatcaagttcatcagatatttgagtgcccactctgtgcccaaataaatatgagctggggattaaatacgaataa

SEQ ID NO: 14442 - DNA, 7734 bp, Homo sapiens
gtgcgcggcccggcagagccgtgcgggcgcccgcgtactcactagctgaggtggcagtggttccaccaacatggagctctcgcagatgtcggagctcatggggctgtcggtgttgcttgggctgctggccctgatggcgacggcggcggtagcgcgggggtggctgcgcgcgggggaggagaggagcggccggcccgcctgtaagtggggccgggtcgggtgggggcggcccgcggtgtcccggctcccggcctcctcgtggtccgacctgcggtttgggcccgcggctggtggggcccggcgactccatgggcctcagtttctcctctggtaacgtgagcttcgcttccagagacggggacccgccttgccgggttaggcgcacctcctggggcgggactggctccaacctgggccccttactgcggctttctctgtggccgaggccaggccgtccccggggtggccaggagagcaccgtaaactcttcagcctgctccgtggccgcgatctcggaaaaagcaccaattctgtgatgtgcagcagcatttactgggcatctatgaccctgtgataggctttggggtctttttctgtaaggagtccagtaaaggagaagtacatctgtattatgaacacctaaatatgtaagtgaaaaacacggtgaaataagtttcactgaggccaggcgaagtggctcacgcctgtattcccagcactttgggaggccgaggcagggagatcgcttgagcccaggagtttgggaccagcctgagcaacatagcaagaccccatctctacgcaaaattagctgggtgtggttgtgcacgcccctgtagtcccagctccatgggaggccgaggcaggagggtgtcgtgagtccaggaattcaaggctgcagtgagttgtgatagatcgcgccactgtacttcagcctgggtgacggcaagagcctgtctctgaaaagtttcatagaagaggttagtactagaaatgggaaacaccagagagtcagtgggcagccctgctctttttatttatttttcagacagagtttcgctcttcttgcccaggctggagtgcagtggcacaatcttggctcgttgcaacttccgcctgccaggttcaagcgattcttctgcctctgcctcccgagtagctgggactacaggcacacaccaccacgcctggctaatttttgtatatttagtagacggggtttcgccacgttggtcaggctggtctcgaacgcctgatctcaggtgatccactcgtcctggcctccaaaagtgctgagattacaggcgtgaaccactgtgcccggccagccctgcattttttttttttttttttttgcagggggacggagttttgctctgtcgcccaatctggagtctagtggcgggatctcggctcactgcaagctccgcctctgggttcacgccattctcctgcctcagcctcctgagtagctgggactacaggcgtccgacaccacacccggctaattttttgtattttttgagtagagacggggtttcactgtgttagccaggatggtctcaatctcctaacctcttgtgatccacctgcctcggcctcccaaagtgctgggattacaggcgtgagccaccctgcctggccgagtcctgttcttttatgggggaggtggttgttagggaaatcattactgagaatagggggcacatgaggtagtgtggggtctcaaaggatggttctagaagaagagtttgccagaaggccaaggaaaaaagacattcctgccaatggcaatacccgagaaggcaaggagtccccaaacagcatttggtatgacttaagtgtgaggaggggggcttgttagacatgcctggagagaaggaagcagaggacagattgtggctgtgtttgtttgcagggcccaggagcttttttcctgttggaattggggagcatctgcagtcatttaccacatgccagctttgtgactcaattaagtatcttttacaaaagtgactggctccactcccccgcacaggactcaacagatgttgacttctcatccccgagttctttcaggtactggagtgcagtggtgcgatcttggcttactgcaacctctacctcctgggttcaagtgattctcctgcctcagcctcctgagtagctgggattacaggcgcctgccaccacgcccggctaatttttgtatttttagtagagacggggtttcaccatgttggccagactggtggaactcctgggcatcaagatgatccagctgccgggccgggcatggtgactcacgcctgtaatcccagcactttgggaggccgaagcgggcaggtcacaaggtcaggagatcgagactgaggcaacagagcgagactctgtatcaaacaaaaaaaaaaaatgatccagcagctgcctcagcctcccaaagcgctgggattacaggcatgagccaccgcacccggcctccatagagcctttaatgcttgtgttcggtacttttgcttgtcactttgtagatatctcatccaattcaatctcccttatttttatttatttatttatttatttattttgagacagaatctcactctgtcgcctaggctggaatacagtggcacgatcactgcatttgaactcctgggctcaagcaattttccctcctcagcctccgaatagctgggaccacaggcgcacaccaccatgcccagctaattaaagttttctgtagagatggggtgtcactatgttacccaggctggtctcgaactcctgagctcaagcaatcctcccatctcagcctaccaaaatgctgggatcacaggcatgagccaccgcccccagttctcaacctctctttaagaaaaccaaggctgggccggacacagtggctcacgcctataatcccagcactttgggaggccaaggcaggcagatcacttgaggtgaggagttggagacaagcctggcccacatggtgaaaccccatctctactaaaaaaacaaaaaaattggggccaggtgccatggctcacgcctgtaatcctagcactttgggaggccgaggcgggtggatcacaaggtcaggagattgagaccattctggctaatgtggtgaaaccccacatctactaaaaatacaaaaaaaaattagccgggcatggtggcgggcgcctgtagtcccagctacttgggaggctgaggcaggagaatggcgtgaacccgggaggcagagcttgcagtgagctgagatcacgccactgcactccagcctgggtgacagagcgagactccatctgaaaaaaaaaaaaaaaattagctggatatggtggtgcacgcccatgatcccagctacttggaaggctgaggcacaagaattgcttgaacctgggaggcagaggctacagtgagcggagatcacgccactgcactccagcctgggcgacagagcaagactctgtctccaaaaaaaagaaagaaagaaaagaaaaaaaaaaccaaggtccagagcaattcactaacttacccaaagcagggccgctagagatggttgtgcacattactccctacatagggatgtctggccaaggatccacactccactggccgtgctgtgtacccgcccagcagcatcacccaacccagagagtgcgccttttccactctacatgaaggtgctctgtggacttactgtaaacagcctcctcagtagtcagtcagtagtagagacagaatccaaacccaggtctgattccaaagcctctgttttgtttctgttttctgtttgtttttttttgagacagggtcttgctctgtcactcaggatggaatgcagtagtgttgtgatcatagcttactgcagcctcgaactcctgggctcaaatgatccaaagcattgggattacaggcatgagccaccatacccagccagccaaagcctctgtttttgcccatatcacactcattctcctccagaagacaagggccatatctggttaatctcctgctgttccactcaatgcctggctcatcataggtgggcagtaaatgcttatcagtgagtaactggagaacaacatggcccttccttataggccaaaaagcaaatggatttccacctgacaaatcttcgggatccaagaagcagaaacaatatcagcggattcggaaggagaagcctcaacaacacaacttcacccaccgcctcctggctgcagctctgaaggtacgtggggtacctggcacagcgtgcaccctgagactcagccccacaggcttttcctctggagtattccatgcatgttacaggctctcctgcctctgatcagaatcagcgggggtgcttaattctgtcccctctcatcgcagcccaatctcagcttgctgttaatccaggccacagggccccatctccccggctccaggtttggcttccccatctcccccaggagctcctattgacacttcctgccacccttcccctagagccacagcgggaacatatcttgcatggactttagcagcaatggcaaatacctggctacctgtgcagatgatcgcaccatccgcatctggagcaccaaggacttcctgcagcgagagcaccgcagcatgagagccaacgtggagctggaccacgccaccctggtgcgcttcagccctgactgcaggtgggacaagacggagcctcaggtttgcctgcagaggcctagtcccaggctttggccttcccatatctgctttgaggtagtgaggagggacctggacccagggcctcccttggggtgccagaaagagcatccacatagtttgcgcgctgcctggggctccctggagatctgggctgctatacagcaaggaaacagggggaggtctcttcctacctggaaataccttggcctggcttccagatgagccttagtttctaaaccctagagagaaactaaaggagccaaagctatcagaatcttaccttttgaggagttttatgagatttggaaccaggggcttaagttttaaggctagactgtggggcatgaggagagatcttgacttccccgagaacccagcacaggacctggaacacagagcctctttgtccagtgagagcgtgacttgtctgctgcctgtctctagagccttcatcgtctggctggccaacggggacaccctccgtgtcttcaagatgaccaagcgggaggatgggggctacaccttcacagccaccccagaggacttccctaaaaagcacaaggcgcctgtcatcgacattggcattgctaacacaggtaagaggcattcagagggtggcgcctgcccaaagcatgaaggaaagatccagttctatttcctcaatgagttaatgctgcctgaaagttctgctcaacctgagaggaacaaggggtccctggctctgaacagcctggctctgtgctcccctggagtccctgggccacaccaggtccctagggaaggtggggaagggccacagtcttcagcagagtccttatctgtagtgacccttggcctgggaggagacatgtatacttcgggcagcagaggccttgtaagtgtctttggagagtgacagttggtcaggtcactgcccgtgacccacatcactcccttcccgctcagggaagtttatcatgactgcctccagtgacaccactgtcctcatctggagcctgaagggtcaagtgctgtctaccatcaacaccaaccagatgaacaacacacacgctgctgtatctccctgtggcaggtgggcaaggaggggtattggcgtctgggaccacgagaggctggggctggggagcaggcacagaacagagagccagcttcatcgcgtgggaagagcatacggggtggggtcaggaacccgagcttcaagtctcagctctccccacttgcagtagtgggatttcatgcaggtcgccccatgtccttagtcgctatttcttcatcttcagtgtttttgttttttagaaaattagtctcactctgtcacccaggctggagcacagtggtgcgatcatagctcactgcagcctcaaactcctgggttgtagctattctcccagctcagcctcctgagtagtcaggactataggcatgtgccactgtactcagctaatttttgttttttgtttgtttgtttgttgagacggtttcaccctcgcccaggcaggagtgcagtggcgcaatcacagctcactgtagccttgacttcccaggctcagaccatcctcccaccttagcctcccgagtagctgggactacaggcgtgcactaccacacctggctaatttttgtattttttgttgagatggggtcttactatgttgcccaggctggtcctgaactcctggcctcaagtgatcctcttgcctcgacctcccaaagtggtagaattacaggcgtgagccactgtgccaagccacctttgggcggggatgttacatatcttagaacaaggctagaagataaactgaggtcacatacataaaagaacttttttgttgtggttgtttgtttgttttttgagatggagtttcgctcttgttgcttaggttggagtgcaatggcaggatcttggctcaccacaacctccgtctcccgggttcaagcgattctcctgcctcagcctcccccaagtagctgggattacaggcatgcaccaccatgcccagctaattttttatttttagtagaggtgaggtttctccatgttggtcaggctggtctcaaactgtcggaccttaggtgagctgcccgcctgggcctcccaaagtgctgggattacaggtatgagccaccacacccggcctttttttttttttttttctgagacagtctcactctgttgcccaggctggagtgcagtggtgcaatctcaatctcagctcactgcaacctccacctaccaggttcaagtgattctcccacctcagccttcccagtaggtgggactacaggcatgcgccaccacgcctggctaattttgtatttttagtagagatgaggtttcaccatgttggccaggctggtctcgaactcctgacctcaggtgatccacccacctcggcctcccaaagtgctgggatgacaggcgtgagccaccgcgcccggccaaaataactctttaaaggtttatattatccagatatgaggattatcaactttctcaggaaagagattgaggggttttacaggaacaacatgctccgaaaatgaagttttaaaggcttctgggttgtatggcagatttgtagcctcgtgtggcttcaccccagatgtgaaggtttgggaagtctgctttggaaagaagggggagttccaggaggtggtgcgagccttcgaactaaagggccactccgcggctgtgcactcgtttgctttctccaacgactcacggaggtgagtgaatccgctctgatgtctgaccagtggctcttggcccctcttgacaaccagggtccttctgtctgtttgtgccatggctctgaagagggtggggtgcctggccctcggcaggaagctgacttagcttcctagctggagctgctcaagttgggccagtgcttaccctgccagggtgtgttggggcttgagctgtgattttctgtgttgcaggatggcttctgtctccaaggatggtacatggaaactgtgggacacagatgtggaatacaagaagaagcaggacccctacttgctgaa

SEQ ID NO: 14443 - DNA, 1196 bp, Homo sapiens
gtgcgcggcccggcagagccgtgcgggcgcccgcgtactcactagctgaggtggcagtggttccaccaacatggagctctcgcagatgtcggagctcatggggctgtcggtgttgcttgggctgctggccctgatggcgacggcggcggtagcgcgggggtggctgcgcgcgggggaggagaggagcggccggcccgcctggcccaggagcttttttcctgttggaattggggagcatctgcagtcatttaccacatgccagctttgtgactcaattaagtatcttttacaaaagtgactggctccactcccccgcacaggactcaacagatgttgacttctcatccccgagttctttcaggccaaaaagcaaatggatttccacctgacaaatcttcgggatccaagaagcagaaacaatatcagcggattcggaaggagaagcctcaacaacacaacttcacccaccgcctcctggctgcagctctgaagagccacagcgggaacatatcttgcatggactttagcagcaatggcaaatacctggctacctgtgcagatgatcgcaccatccgcatctggagcaccaaggacttcctgcagcgagagcaccgcagcatgagagccaacgtggagctggaccacgccaccctggtgcgcttcagccctgactgcagagccttcatcgtctggctggccaacggggacaccctccgtgtcttcaagatgaccaagcgggaggatgggggctacaccttcacagccaccccagaggacttccctaaaaagcacaaggcgcctgtcatcgacattggcattgctaacacagggaagtttatcatgactgcctccagtgacaccactgtcctcatctggagcctgaagggtcaagtgctgtctaccatcaacaccaaccagatgaacaacacacacgctgctgtatctccctgtggcagatttgtagcctcgtgtggcttcaccccagatgtgaaggtttgggaagtctgctttggaaagaagggggagttccaggaggtggtgcgagccttcgaactaaagggccactccgcggctgtgcactcgtttgctttctccaacgactcacggaggatggcttctgtctccaaggatggtacatggaaactgtgggacacagatgtggaatacaagaagaagcaggacccctacttgctgaa

SEQ ID NO: 14444 - DNA, 8142 bp, Homo sapiens
gcggctggtggggcccggcgactccatgggcctcagtttctcctctggtaacgtgagcttcgcttccagagacggggacccgccttgccgggttaggcgcacctcctggggcgggactggctccaacctgggccccttactgcggctttctctgtggccgaggccaggccgtccccggggtggccaggagagcaccgtaaactcttcagcctgctccgtggccgcgatctcggaaaaagcaccaattctgtgatgtgcagcagcatttactgggcatctatgaccctgtgataggctttggggtctttttctgtaaggagtccagtaaaggagaagtacatctgtattatgaacacctaaatatgtaagtgaaaaacacggtgaaataagtttcactgaggccaggcgaagtggctcacgcctgtattcccagcactttgggaggccgaggcagggagatcgcttgagcccaggagtttgggaccagcctgagcaacatagcaagaccccatctctacgcaaaattagctgggtgtggttgtgcacgcccctgtagtcccagctccatgggaggccgaggcaggagggtgtcgtgagtccaggaattcaaggctgcagtgagttgtgatagatcgcgccactgtacttcagcctgggtgacggcaagagcctgtctctgaaaagtttcatagaagaggttagtactagaaatgggaaacaccagagagtcagtgggcagccctgctctttttatttatttttcagacagagtttcgctcttcttgcccaggctggagtgcagtggcacaatcttggctcgttgcaacttccgcctgccaggttcaagcgattcttctgcctctgcctcccgagtagctgggactacaggcacacaccaccacgcctggctaatttttgtatatttagtagacggggtttcgccacgttggtcaggctggtctcgaacgcctgatctcaggtgatccactcgtcctggcctccaaaagtgctgagattacaggcgtgaaccactgtgcccggccagccctgcattttttttttttttttttttgcagggggacggagttttgctctgtcgcccaatctggagtctagtggcgggatctcggctcactgcaagctccgcctctgggttcacgccattctcctgcctcagcctcctgagtagctgggactacaggcgtccgacaccacacccggctaattttttgtattttttgagtagagacggggtttcactgtgttagccaggatggtctcaatctcctaacctcttgtgatccacctgcctcggcctcccaaagtgctgggattacaggcgtgagccaccctgcctggccgagtcctgttcttttatgggggaggtggttgttagggaaatcattactgagaatagggggcacatgaggtagtgtggggtctcaaaggatggttctagaagaagagtttgccagaaggccaaggaaaaaagacattcctgccaatggcaatacccgagaaggcaaggagtccccaaacagcatttggtatgacttaagtgtgaggaggggggcttgttagacatgcctggagagaaggaagcagaggacagattgtggctgtgtttgtttgcagggcccaggagcttttttcctgttggaattggggagcatctgcagtcatttaccacatgccagctttgtgactcaattaagtatcttttacaaaagtgactggctccactcccccgcacaggactcaacagatgttgacttctcatccccgagttctttcaggtactggagtgcagtggtgcgatcttggcttactgcaacctctacctcctgggttcaagtgattctcctgcctcagcctcctgagtagctgggattacaggcgcctgccaccacgcccggctaatttttgtatttttagtagagacggggtttcaccatgttggccagactggtggaactcctgggcatcaagatgatccagctgccgggccgggcatggtgactcacgcctgtaatcccagcactttgggaggccgaagcgggcaggtcacaaggtcaggagatcgagactgaggcaacagagcgagactctgtatcaaacaaaaaaaaaaaatgatccagcagctgcctcagcctcccaaagcgctgggattacaggcatgagccaccgcacccggcctccatagagcctttaatgcttgtgttcggtacttttgcttgtcactttgtagatatctcatccaattcaatctcccttatttttatttatttatttatttatttattttgagacagaatctcactctgtcgcctaggctggaatacagtggcacgatcactgcatttgaactcctgggctcaagcaattttccctcctcagcctccgaatagctgggaccacaggcgcacaccaccatgcccagctaattaaagttttctgtagagatggggtgtcactatgttacccaggctggtctcgaactcctgagctcaagcaatcctcccatctcagcctaccaaaatgctgggatcacaggcatgagccaccgcccccagttctcaacctctctttaagaaaaccaaggctgggccggacacagtggctcacgcctataatcccagcactttgggaggccaaggcaggcagatcacttgaggtgaggagttggagacaagcctggcccacatggtgaaaccccatctctactaaaaaaacaaaaaaattggggccaggtgccatggctcacgcctgtaatcctagcactttgggaggccgaggcgggtggatcacaaggtcaggagattgagaccattctggctaatgtggtgaaaccccacatctactaaaaatacaaaaaaaaattagccgggcatggtggcgggcgcctgtagtcccagctacttgggaggctgaggcaggagaatggcgtgaacccgggaggcagagcttgcagtgagctgagatcacgccactgcactccagcctgggtgacagagcgagactccatctgaaaaaaaaaaaaaaaattagctggatatggtggtgcacgcccatgatcccagctacttggaaggctgaggcacaagaattgcttgaacctgggaggcagaggctacagtgagcggagatcacgccactgcactccagcctgggcgacagagcaagactctgtctccaaaaaaaagaaagaaagaaaagaaaaaaaaaaccaaggtccagagcaattcactaacttacccaaagcagggccgctagagatggttgtgcacattactccctacatagggatgtctggccaaggatccacactccactggccgtgctgtgtacccgcccagcagcatcacccaacccagagagtgcgccttttccactctacatgaaggtgctctgtggacttactgtaaacagcctcctcagtagtcagtcagtagtagagacagaatccaaacccaggtctgattccaaagcctctgttttgtttctgttttctgtttgtttttttttgagacagggtcttgctctgtcactcaggatggaatgcagtagtgttgtgatcatagcttactgcagcctcgaactcctgggctcaaatgatccaaagcattgggattacaggcatgagccaccatacccagccagccaaagcctctgtttttgcccatatcacactcattctcctccagaagacaagggccatatctggttaatctcctgctgttccactcaatgcctggctcatcataggtgggcagtaaatgcttatcagtgagtaactggagaacaacatggcccttccttataggccaaaaagcaaatggatttccacctgacaaatcttcgggatccaagaagcagaaacaatatcagcggattcggaaggagaagcctcaacaacacaacttcacccaccgcctcctggctgcagctctgaaggtacgtggggtacctggcacagcgtgcaccctgagactcagccccacaggcttttcctctggagtattccatgcatgttacaggctctcctgcctctgatcagaatcagcgggggtgcttaattctgtcccctctcatcgcagcccaatctcagcttgctgttaatccaggccacagggccccatctccccggctccaggtttggcttccccatctcccccaggagctcctattgacacttcctgccacccttcccctagagccacagcgggaacatatcttgcatggactttagcagcaatggcaaatacctggctacctgtgcagatgatcgcaccatccgcatctggagcaccaaggacttcctgcagcgagagcaccgcagcatgagagccaacgtggagctggaccacgccaccctggtgcgcttcagccctgactgcaggtgggacaagacggagcctcaggtttgcctgcagaggcctagtcccaggctttggccttcccatatctgctttgaggtagtgaggagggacctggacccagggcctcccttggggtgccagaaagagcatccacatagtttgcgcgctgcctggggctccctggagatctgggctgctatacagcaaggaaacagggggaggtctcttcctacctggaaataccttggcctggcttccagatgagccttagtttctaaaccctagagagaaactaaaggagccaaagctatcagaatcttaccttttgaggagttttatgagatttggaaccaggggcttaagttttaaggctagactgtggggcatgaggagagatcttgacttccccgagaacccagcacaggacctggaacacagagcctctttgtccagtgagagcgtgacttgtctgctgcctgtctctagagccttcatcgtctggctggccaacggggacaccctccgtgtcttcaagatgaccaagcgggaggatgggggctacaccttcacagccaccccagaggacttccctaaaaagcacaaggcgcctgtcatcgacattggcattgctaacacaggtaagaggcattcagagggtggcgcctgcccaaagcatgaaggaaagatccagttctatttcctcaatgagttaatgctgcctgaaagttctgctcaacctgagaggaacaaggggtccctggctctgaacagcctggctctgtgctcccctggagtccctgggccacaccaggtccctagggaaggtggggaagggccacagtcttcagcagagtccttatctgtagtgacccttggcctgggaggagacatgtatacttcgggcagcagaggccttgtaagtgtctttggagagtgacagttggtcaggtcactgcccgtgacccacatcactcccttcccgctcagggaagtttatcatgactgcctccagtgacaccactgtcctcatctggagcctgaagggtcaagtgctgtctaccatcaacaccaaccagatgaacaacacacacgctgctgtatctccctgtggcaggtgggcaaggaggggtattggcgtctgggaccacgagaggctggggctggggagcaggcacagaacagagagccagcttcatcgcgtgggaagagcatacggggtggggtcaggaacccgagcttcaagtctcagctctccccacttgcagtagtgggatttcatgcaggtcgccccatgtccttagtcgctatttcttcatcttcagtgtttttgttttttagaaaattagtctcactctgtcacccaggctggagcacagtggtgcgatcatagctcactgcagcctcaaactcctgggttgtagctattctcccagctcagcctcctgagtagtcaggactataggcatgtgccactgtactcagctaatttttgttttttgtttgtttgtttgttgagacggtttcaccctcgcccaggcaggagtgcagtggcgcaatcacagctcactgtagccttgacttcccaggctcagaccatcctcccaccttagcctcccgagtagctgggactacaggcgtgcactaccacacctggctaatttttgtattttttgttgagatggggtcttactatgttgcccaggctggtcctgaactcctggcctcaagtgatcctcttgcctcgacctcccaaagtggtagaattacaggcgtgagccactgtgccaagccacctttgggcggggatgttacatatcttagaacaaggctagaagataaactgaggtcacatacataaaagaacttttttgttgtggttgtttgtttgttttttgagatggagtttcgctcttgttgcttaggttggagtgcaatggcaggatcttggctcaccacaacctccgtctcccgggttcaagcgattctcctgcctcagcctcccccaagtagctgggattacaggcatgcaccaccatgcccagctaattttttatttttagtagaggtgaggtttctccatgttggtcaggctggtctcaaactgtcggaccttaggtgagctgcccgcctgggcctcccaaagtgctgggattacaggtatgagccaccacacccggcctttttttttttttttttctgagacagtctcactctgttgcccaggctggagtgcagtggtgcaatctcaatctcagctcactgcaacctccacctaccaggttcaagtgattctcccacctcagccttcccagtaggtgggactacaggcatgcgccaccacgcctggctaattttgtatttttagtagagatgaggtttcaccatgttggccaggctggtctcgaactcctgacctcaggtgatccacccacctcggcctcccaaagtgctgggatgacaggcgtgagccaccgcgcccggccaaaataactctttaaaggtttatattatccagatatgaggattatcaactttctcaggaaagagattgaggggttttacaggaacaacatgctccgaaaatgaagttttaaaggcttctgggttgtatggcagatttgtagcctcgtgtggcttcaccccagatgtgaaggtttgggaagtctgctttggaaagaagggggagttccaggaggtggtgcgagccttcgaactaaagggccactccgcggctgtgcactcgtttgctttctccaacgactcacggaggtgagtgaatccgctctgatgtctgaccagtggctcttggcccctcttgacaaccagggtccttctgtctgtttgtgccatggctctgaagagggtggggtgcctggccctcggcaggaagctgacttagcttcctagctggagctgctcaagttgggccagtgcttaccctgccagggtgtgttggggcttgagctgtgattttctgtgttgcaggatggcttctgtctccaaggatggtacatggaaactgtgggacacagatgtggaatacaagaagaagcaggacccctacttgctgaagacaggccgctttgaagaggcggcgggtgccgcgccgtgccgcctggccctctcccccaacgcccaggtcttggccttggccagtggcagtagtattcatctctacaatacccggcggggcgagaaggaggagtgctttgagcgggtccatggcgagtgtatcgccaacttgtcctttgacatcactggccgctttctggcctcctgtggggaccgggcggtgcggctgtttcacaacactcctggccaccgagccatggtggaggagatgcagggccacctgaagcgggcctccaacgagagcacccgccagaggctgcagcagcagctgacccaggcccaagagaccctgaagagcctgggtgccctgaagaagtgactctgggagggcccggcgcagaggattgaggaggagggatctggcctcctcatggcactgctgccatctttcctcccaggtggaagcctttcagaaggagtctcctggttttcttactggtggccctgcttcttcccattgaaactactcttgtctacttaggtctctctcttcttgctggctgtgactcctccctgactagtggccaaggtgcttttcttcctcccaggcccagtgggtggaatctgtccccacctggcactgaggagaatggtagagaggagaggagagagagagagaatgtgatttttg

SEQ ID NO: 14445 - DNA, 1573 bp, Homo sapiens
gcggctggtggggcccggcgactccatgggcctcagtttctcctctggccaaaaagcaaatggatttccacctgacaaatcttcgggatccaagaagcagaaacaatatcagcggattcggaaggagaagcctcaacaacacaacttcacccaccgcctcctggctgcagctctgaagagccacagcgggaacatatcttgcatggactttagcagcaatggcaaatacctggctacctgtgcagatgatcgcaccatccgcatctggagcaccaaggacttcctgcagcgagagcaccgcagcatgagagccaacgtggagctggaccacgccaccctggtgcgcttcagccctgactgcagagccttcatcgtctggctggccaacggggacaccctccgtgtcttcaagatgaccaagcgggaggatgggggctacaccttcacagccaccccagaggacttccctaaaaagcacaaggcgcctgtcatcgacattggcattgctaacacagggaagtttatcatgactgcctccagtgacaccactgtcctcatctggagcctgaagggtcaagtgctgtctaccatcaacaccaaccagatgaacaacacacacgctgctgtatctccctgtggcagatttgtagcctcgtgtggcttcaccccagatgtgaaggtttgggaagtctgctttggaaagaagggggagttccaggaggtggtgcgagccttcgaactaaagggccactccgcggctgtgcactcgtttgctttctccaacgactcacggaggatggcttctgtctccaaggatggtacatggaaactgtgggacacagatgtggaatacaagaagaagcaggacccctacttgctgaagacaggccgctttgaagaggcggcgggtgccgcgccgtgccgcctggccctctcccccaacgcccaggtcttggccttggccagtggcagtagtattcatctctacaatacccggcggggcgagaaggaggagtgctttgagcgggtccatggcgagtgtatcgccaacttgtcctttgacatcactggccgctttctggcctcctgtggggaccgggcggtgcggctgtttcacaacactcctggccaccgagccatggtggaggagatgcagggccacctgaagcgggcctccaacgagagcacccgccagaggctgcagcagcagctgacccaggcccaagagaccctgaagagcctgggtgccctgaagaagtgactctgggagggcccggcgcagaggattgaggaggagggatctggcctcctcatggcactgctgccatctttcctcccaggtggaagcctttcagaaggagtctcctggttttcttactggtggccctgcttcttcccattgaaactactcttgtctacttaggtctctctcttcttgctggctgtgactcctccctgactagtggccaaggtgcttttcttcctcccaggcccagtgggtggaatctgtccccacctggcactgaggagaatggtagagaggagaggagagagagagagaatgtgatttttg

SEQ ID NO: 14446 - DNA, 8189 bp, Homo sapiens
gtgcgggcgcccgcgtactcactagctgaggtggcagtggttccaccaacatggagctctcgcagatgtcggagctcatggggctgtcggtgttgcttgggctgctggccctgatggcgacggcggcggtagcgcgggggtggctgcgcgcgggggaggagaggagcggccggcccgcctgtaagtggggccgggtcgggtgggggcggcccgcggtgtcccggctcccggcctcctcgtggtccgacctgcggtttgggcccgcggctggtggggcccggcgactccatgggcctcagtttctcctctggtaacgtgagcttcgcttccagagacggggacccgccttgccgggttaggcgcacctcctggggcgggactggctccaacctgggccccttactgcggctttctctgtggccgaggccaggccgtccccggggtggccaggagagcaccgtaaactcttcagcctgctccgtggccgcgatctcggaaaaagcaccaattctgtgatgtgcagcagcatttactgggcatctatgaccctgtgataggctttggggtctttttctgtaaggagtccagtaaaggagaagtacatctgtattatgaacacctaaatatgtaagtgaaaaacacggtgaaataagtttcactgaggccaggcgaagtggctcacgcctgtattcccagcactttgggaggccgaggcagggagatcgcttgagcccaggagtttgggaccagcctgagcaacatagcaagaccccatctctacgcaaaattagctgggtgtggttgtgcacgcccctgtagtcccagctccatgggaggccgaggcaggagggtgtcgtgagtccaggaattcaaggctgcagtgagttgtgatagatcgcgccactgtacttcagcctgggtgacggcaagagcctgtctctgaaaagtttcatagaagaggttagtactagaaatgggaaacaccagagagtcagtgggcagccctgctctttttatttatttttcagacagagtttcgctcttcttgcccaggctggagtgcagtggcacaatcttggctcgttgcaacttccgcctgccaggttcaagcgattcttctgcctctgcctcccgagtagctgggactacaggcacacaccaccacgcctggctaatttttgtatatttagtagacggggtttcgccacgttggtcaggctggtctcgaacgcctgatctcaggtgatccactcgtcctggcctccaaaagtgctgagattacaggcgtgaaccactgtgcccggccagccctgcattttttttttttttttttttgcagggggacggagttttgctctgtcgcccaatctggagtctagtggcgggatctcggctcactgcaagctccgcctctgggttcacgccattctcctgcctcagcctcctgagtagctgggactacaggcgtccgacaccacacccggctaattttttgtattttttgagtagagacggggtttcactgtgttagccaggatggtctcaatctcctaacctcttgtgatccacctgcctcggcctcccaaagtgctgggattacaggcgtgagccaccctgcctggccgagtcctgttcttttatgggggaggtggttgttagggaaatcattactgagaatagggggcacatgaggtagtgtggggtctcaaaggatggttctagaagaagagtttgccagaaggccaaggaaaaaagacattcctgccaatggcaatacccgagaaggcaaggagtccccaaacagcatttggtatgacttaagtgtgaggaggggggcttgttagacatgcctggagagaaggaagcagaggacagattgtggctgtgtttgtttgcagggcccaggagcttttttcctgttggaattggggagcatctgcagtcatttaccacatgccagctttgtgactcaattaagtatcttttacaaaagtgactggctccactcccccgcacaggactcaacagatgttgacttctcatccccgagttctttcaggtactggagtgcagtggtgcgatcttggcttactgcaacctctacctcctgggttcaagtgattctcctgcctcagcctcctgagtagctgggattacaggcgcctgccaccacgcccggctaatttttgtatttttagtagagacggggtttcaccatgttggccagactggtggaactcctgggcatcaagatgatccagctgccgggccgggcatggtgactcacgcctgtaatcccagcactttgggaggccgaagcgggcaggtcacaaggtcaggagatcgagactgaggcaacagagcgagactctgtatcaaacaaaaaaaaaaaatgatccagcagctgcctcagcctcccaaagcgctgggattacaggcatgagccaccgcacccggcctccatagagcctttaatgcttgtgttcggtacttttgcttgtcactttgtagatatctcatccaattcaatctcccttatttttatttatttatttatttatttattttgagacagaatctcactctgtcgcctaggctggaatacagtggcacgatcactgcatttgaactcctgggctcaagcaattttccctcctcagcctccgaatagctgggaccacaggcgcacaccaccatgcccagctaattaaagttttctgtagagatggggtgtcactatgttacccaggctggtctcgaactcctgagctcaagcaatcctcccatctcagcctaccaaaatgctgggatcacaggcatgagccaccgcccccagttctcaacctctctttaagaaaaccaaggctgggccggacacagtggctcacgcctataatcccagcactttgggaggccaaggcaggcagatcacttgaggtgaggagttggagacaagcctggcccacatggtgaaaccccatctctactaaaaaaacaaaaaaattggggccaggtgccatggctcacgcctgtaatcctagcactttgggaggccgaggcgggtggatcacaaggtcaggagattgagaccattctggctaatgtggtgaaaccccacatctactaaaaatacaaaaaaaaattagccgggcatggtggcgggcgcctgtagtcccagctacttgggaggctgaggcaggagaatggcgtgaacccgggaggcagagcttgcagtgagctgagatcacgccactgcactccagcctgggtgacagagcgagactccatctgaaaaaaaaaaaaaaaattagctggatatggtggtgcacgcccatgatcccagctacttggaaggctgaggcacaagaattgcttgaacctgggaggcagaggctacagtgagcggagatcacgccactgcactccagcctgggcgacagagcaagactctgtctccaaaaaaaagaaagaaagaaaagaaaaaaaaaaccaaggtccagagcaattcactaacttacccaaagcagggccgctagagatggttgtgcacattactccctacatagggatgtctggccaaggatccacactccactggccgtgctgtgtacccgcccagcagcatcacccaacccagagagtgcgccttttccactctacatgaaggtgctctgtggacttactgtaaacagcctcctcagtagtcagtcagtagtagagacagaatccaaacccaggtctgattccaaagcctctgttttgtttctgttttctgtttgtttttttttgagacagggtcttgctctgtcactcaggatggaatgcagtagtgttgtgatcatagcttactgcagcctcgaactcctgggctcaaatgatccaaagcattgggattacaggcatgagccaccatacccagccagccaaagcctctgtttttgcccatatcacactcattctcctccagaagacaagggccatatctggttaatctcctgctgttccactcaatgcctggctcatcataggtgggcagtaaatgcttatcagtgagtaactggagaacaacatggcccttccttataggccaaaaagcaaatggatttccacctgacaaatcttcgggatccaagaagcagaaacaatatcagcggattcggaaggagaagcctcaacaacacaacttcacccaccgcctcctggctgcagctctgaaggtacgtggggtacctggcacagcgtgcaccctgagactcagccccacaggcttttcctctggagtattccatgcatgttacaggctctcctgcctctgatcagaatcagcgggggtgcttaattctgtcccctctcatcgcagcccaatctcagcttgctgttaatccaggccacagggccccatctccccggctccaggtttggcttccccatctcccccaggagctcctattgacacttcctgccacccttcccctagagccacagcgggaacatatcttgcatggactttagcagcaatggcaaatacctggctacctgtgcagatgatcgcaccatccgcatctggagcaccaaggacttcctgcagcgagagcaccgcagcatgagagccaacgtggagctggaccacgccaccctggtgcgcttcagccctgactgcaggtgggacaagacggagcctcaggtttgcctgcagaggcctagtcccaggctttggccttcccatatctgctttgaggtagtgaggagggacctggacccagggcctcccttggggtgccagaaagagcatccacatagtttgcgcgctgcctggggctccctggagatctgggctgctatacagcaaggaaacagggggaggtctcttcctacctggaaataccttggcctggcttccagatgagccttagtttctaaaccctagagagaaactaaaggagccaaagctatcagaatcttaccttttgaggagttttatgagatttggaaccaggggcttaagttttaaggctagactgtggggcatgaggagagatcttgacttccccgagaacccagcacaggacctggaacacagagcctctttgtccagtgagagcgtgacttgtctgctgcctgtctctagagccttcatcgtctggctggccaacggggacaccctccgtgtcttcaagatgaccaagcgggaggatgggggctacaccttcacagccaccccagaggacttccctaaaaagcacaaggcgcctgtcatcgacattggcattgctaacacaggtaagaggcattcagagggtggcgcctgcccaaagcatgaaggaaagatccagttctatttcctcaatgagttaatgctgcctgaaagttctgctcaacctgagaggaacaaggggtccctggctctgaacagcctggctctgtgctcccctggagtccctgggccacaccaggtccctagggaaggtggggaagggccacagtcttcagcagagtccttatctgtagtgacccttggcctgggaggagacatgtatacttcgggcagcagaggccttgtaagtgtctttggagagtgacagttggtcaggtcactgcccgtgacccacatcactcccttcccgctcagggaagtttatcatgactgcctccagtgacaccactgtcctcatctggagcctgaagggtcaagtgctgtctaccatcaacaccaaccagatgaacaacacacacgctgctgtatctccctgtggcaggtgggcaaggaggggtattggcgtctgggaccacgagaggctggggctggggagcaggcacagaacagagagccagcttcatcgcgtgggaagagcatacggggtggggtcaggaacccgagcttcaagtctcagctctccccacttgcagtagtgggatttcatgcaggtcgccccatgtccttagtcgctatttcttcatcttcagtgtttttgttttttagaaaattagtctcactctgtcacccaggctggagcacagtggtgcgatcatagctcactgcagcctcaaactcctgggttgtagctattctcccagctcagcctcctgagtagtcaggactataggcatgtgccactgtactcagctaatttttgttttttgtttgtttgtttgttgagacggtttcaccctcgcccaggcaggagtgcagtggcgcaatcacagctcactgtagccttgacttcccaggctcagaccatcctcccaccttagcctcccgagtagctgggactacaggcgtgcactaccacacctggctaatttttgtattttttgttgagatggggtcttactatgttgcccaggctggtcctgaactcctggcctcaagtgatcctcttgcctcgacctcccaaagtggtagaattacaggcgtgagccactgtgccaagccacctttgggcggggatgttacatatcttagaacaaggctagaagataaactgaggtcacatacataaaagaacttttttgttgtggttgtttgtttgttttttgagatggagtttcgctcttgttgcttaggttggagtgcaatggcaggatcttggctcaccacaacctccgtctcccgggttcaagcgattctcctgcctcagcctcccccaagtagctgggattacaggcatgcaccaccatgcccagctaattttttatttttagtagaggtgaggtttctccatgttggtcaggctggtctcaaactgtcggaccttaggtgagctgcccgcctgggcctcccaaagtgctgggattacaggtatgagccaccacacccggcctttttttttttttttttctgagacagtctcactctgttgcccaggctggagtgcagtggtgcaatctcaatctcagctcactgcaacctccacctaccaggttcaagtgattctcccacctcagccttcccagtaggtgggactacaggcatgcgccaccacgcctggctaattttgtatttttagtagagatgaggtttcaccatgttggccaggctggtctcgaactcctgacctcaggtgatccacccacctcggcctcccaaagtgctgggatgacaggcgtgagccaccgcgcccggccaaaataactctttaaaggtttatattatccagatatgaggattatcaactttctcaggaaagagattgaggggttttacaggaacaacatgctccgaaaatgaagttttaaaggcttctgggttgtatggcagatttgtagcctcgtgtggcttcaccccagatgtgaaggtttgggaagtctgctttggaaagaagggggagttccaggaggtggtgcgagccttcgaactaaagggccactccgcggctgtgcactcgtttgctttctccaacgactcacggaggtgagtgaatccgctctgatgtctgaccagtggctcttggcccctcttgacaaccagggtccttctgtctgtttgtgccatggctctgaagagggtggggtgcctggccctcggcaggaagctgacttagcttcctagctggagctgctcaagttgggccagtgcttaccctgccagggtgtgttggggcttgagctgtgattttctgtgttgcaggatggcttctgtctccaaggatggtacatggaaactgtgggacacagatgtggaatacaagaagaagcaggacccctacttgctgaagacaggccgctttgaagaggcggcgggtgccgcgccgtgccgcctggccctctcccccaacgcccaggtcttggccttggccagtggcagtagtattcatctctacaatacccggcggggcgagaaggaggagtgctttgagcgggtccatggcgagtgtatcgccaacttgtcctttgacatcactggccgctttctggcctcctgtggggaccgggcggtgcggctgtttcacaacactcctggccaccgagccatggtggaggagatgcagggccacctgaagcgggcctccaacgagagcacccgccagaggctgcagcagcagctgacccaggcccaagagaccctgaagagcctgggtgccctgaagaagtgactctgggagggcccggcgcagaggattgaggaggagggatctggcctcctcatggcactgctgccatctttcctcccaggtggaagcctttcagaa

SEQ ID NO: 14447 - DNA, 1423 bp, Homo sapiens
gtgcgggcgcccgcgtactcactagctgaggtggcagtggttccaccaacatggagctctcgcagatgtcggagctcatggggctgtcggtgttgcttgggctgctggccctgatggcgacggcggcggtagcgcgggggtggctgcgcgcgggggaggagaggagcggccggcccgcctgccaaaaagcaaatggatttccacctgacaaatcttcgggatccaagaagcagaaacaatatcagcggattcggaaggagaagcctcaacaacacaacttcacccaccgcctcctggctgcagctctgaagatgatcgcaccatccgcatctggagcaccaaggacttcctgcagcgagagcaccgcagcatgagagccaacgtggagctggaccacgccaccctggtgcgcttcagccctgactgcagagccttcatcgtctggctggccaacggggacaccctccgtgtcttcaagatgaccaagcgggaggatgggggctacaccttcacagccaccccagaggacttccctaaaaagcacaaggcgcctgtcatcgacattggcattgctaacacagggaagtttatcatgactgcctccagtgacaccactgtcctcatctggagcctgaagggtcaagtgctgtctaccatcaacaccaaccagatgaacaacacacacgctgctgtatctccctgtggcagatttgtagcctcgtgtggcttcaccccagatgtgaaggtttgggaagtctgctttggaaagaagggggagttccaggaggtggtgcgagccttcgaactaaagggccactccgcggctgtgcactcgtttgctttctccaacgactcacggaggatggcttctgtctccaaggatggtacatggaaactgtgggacacagatgtggaatacaagaagaagcaggacccctacttgctgaagacaggccgctttgaagaggcggcgggtgccgcgccgtgccgcctggccctctcccccaacgcccaggtcttggccttggccagtggcagtagtattcatctctacaatacccggcggggcgagaaggaggagtgctttgagcgggtccatggcgagtgtatcgccaacttgtcctttgacatcactggccgctttctggcctcctgtggggaccgggcggtgcggctgtttcacaacactcctggccaccgagccatggtggaggagatgcagggccacctgaagcgggcctccaacgagagcacccgccagaggctgcagcagcagctgacccaggcccaagagaccctgaagagcctgggtgccctgaagaagtgactctgggagggcccggcgcagaggattgaggaggagggatctggcctcctcatggcactgctgccatctttcctcccaggtggaagcctttcagaa

SEQ ID NO: 14448 - DNA, 5799 bp, Homo sapiens
aacggccaggcccagccgcttgaggctccccaacggccaggccgcgcccccgcgtgcgtgcgcggcccggcagagccgtgcgggcgcccgcgtactcactagctgaggtggcagtggttccaccaacatggagctctcgcagatgtcggagctcatggggctgtcggtgttgcttgggctgctggccctgatggcgacggcggcggtagcgcgggggtggctgcgcgcgggggaggagaggagcggccggcccgcctgtaagtggggccgggtcgggtgggggcggcccgcggtgtcccggctcccggcctcctcgtggtccgacctgcggtttgggcccgcggctggtggggcccggcgactccatgggcctcagtttctcctctggtaacgtgagcttcgcttccagagacggggacccgccttgccgggttaggcgcacctcctggggcgggactggctccaacctgggccccttactgcggctttctctgtggccgaggccaggccgtccccggggtggccaggagagcaccgtaaactcttcagcctgctccgtggccgcgatctcggaaaaagcaccaattctgtgatgtgcagcagcatttactgggcatctatgaccctgtgataggctttggggtctttttctgtaaggagtccagtaaaggagaagtacatctgtattatgaacacctaaatatgtaagtgaaaaacacggtgaaataagtttcactgaggccaggcgaagtggctcacgcctgtattcccagcactttgggaggccgaggcagggagatcgcttgagcccaggagtttgggaccagcctgagcaacatagcaagaccccatctctacgcaaaattagctgggtgtggttgtgcacgcccctgtagtcccagctccatgggaggccgaggcaggagggtgtcgtgagtccaggaattcaaggctgcagtgagttgtgatagatcgcgccactgtacttcagcctgggtgacggcaagagcctgtctctgaaaagtttcatagaagaggttagtactagaaatgggaaacaccagagagtcagtgggcagccctgctctttttatttatttttcagacagagtttcgctcttcttgcccaggctggagtgcagtggcacaatcttggctcgttgcaacttccgcctgccaggttcaagcgattcttctgcctctgcctcccgagtagctgggactacaggcacacaccaccacgcctggctaatttttgtatatttagtagacggggtttcgccacgttggtcaggctggtctcgaacgcctgatctcaggtgatccactcgtcctggcctccaaaagtgctgagattacaggcgtgaaccactgtgcccggccagccctgcattttttttttttttttttttgcagggggacggagttttgctctgtcgcccaatctggagtctagtggcgggatctcggctcactgcaagctccgcctctgggttcacgccattctcctgcctcagcctcctgagtagctgggactacaggcgtccgacaccacacccggctaattttttgtattttttgagtagagacggggtttcactgtgttagccaggatggtctcaatctcctaacctcttgtgatccacctgcctcggcctcccaaagtgctgggattacaggcgtgagccaccctgcctggccgagtcctgttcttttatgggggaggtggttgttagggaaatcattactgagaatagggggcacatgaggtagtgtggggtctcaaaggatggttctagaagaagagtttgccagaaggccaaggaaaaaagacattcctgccaatggcaatacccgagaaggcaaggagtccccaaacagcatttggtatgacttaagtgtgaggaggggggcttgttagacatgcctggagagaaggaagcagaggacagattgtggctgtgtttgtttgcagggcccaggagcttttttcctgttggaattggggagcatctgcagtcatttaccacatgccagctttgtgactcaattaagtatcttttacaaaagtgactggctccactcccccgcacaggactcaacagatgttgacttctcatccccgagttctttcaggtactggagtgcagtggtgcgatcttggcttactgcaacctctacctcctgggttcaagtgattctcctgcctcagcctcctgagtagctgggattacaggcgcctgccaccacgcccggctaatttttgtatttttagtagagacggggtttcaccatgttggccagactggtggaactcctgggcatcaagatgatccagctgccgggccgggcatggtgactcacgcctgtaatcccagcactttgggaggccgaagcgggcaggtcacaaggtcaggagatcgagactgaggcaacagagcgagactctgtatcaaacaaaaaaaaaaaatgatccagcagctgcctcagcctcccaaagcgctgggattacaggcatgagccaccgcacccggcctccatagagcctttaatgcttgtgttcggtacttttgcttgtcactttgtagatatctcatccaattcaatctcccttatttttatttatttatttatttatttattttgagacagaatctcactctgtcgcctaggctggaatacagtggcacgatcactgcatttgaactcctgggctcaagcaattttccctcctcagcctccgaatagctgggaccacaggcgcacaccaccatgcccagctaattaaagttttctgtagagatggggtgtcactatgttacccaggctggtctcgaactcctgagctcaagcaatcctcccatctcagcctaccaaaatgctgggatcacaggcatgagccaccgcccccagttctcaacctctctttaagaaaaccaaggctgggccggacacagtggctcacgcctataatcccagcactttgggaggccaaggcaggcagatcacttgaggtgaggagttggagacaagcctggcccacatggtgaaaccccatctctactaaaaaaacaaaaaaattggggccaggtgccatggctcacgcctgtaatcctagcactttgggaggccgaggcgggtggatcacaaggtcaggagattgagaccattctggctaatgtggtgaaaccccacatctactaaaaatacaaaaaaaaattagccgggcatggtggcgggcgcctgtagtcccagctacttgggaggctgaggcaggagaatggcgtgaacccgggaggcagagcttgcagtgagctgagatcacgccactgcactccagcctgggtgacagagcgagactccatctgaaaaaaaaaaaaaaaattagctggatatggtggtgcacgcccatgatcccagctacttggaaggctgaggcacaagaattgcttgaacctgggaggcagaggctacagtgagcggagatcacgccactgcactccagcctgggcgacagagcaagactctgtctccaaaaaaaagaaagaaagaaaagaaaaaaaaaaccaaggtccagagcaattcactaacttacccaaagcagggccgctagagatggttgtgcacattactccctacatagggatgtctggccaaggatccacactccactggccgtgctgtgtacccgcccagcagcatcacccaacccagagagtgcgccttttccactctacatgaaggtgctctgtggacttactgtaaacagcctcctcagtagtcagtcagtagtagagacagaatccaaacccaggtctgattccaaagcctctgttttgtttctgttttctgtttgtttttttttgagacagggtcttgctctgtcactcaggatggaatgcagtagtgttgtgatcatagcttactgcagcctcgaactcctgggctcaaatgatccaaagcattgggattacaggcatgagccaccatacccagccagccaaagcctctgtttttgcccatatcacactcattctcctccagaagacaagggccatatctggttaatctcctgctgttccactcaatgcctggctcatcataggtgggcagtaaatgcttatcagtgagtaactggagaacaacatggcccttccttataggccaaaaagcaaatggatttccacctgacaaatcttcgggatccaagaagcagaaacaatatcagcggattcggaaggagaagcctcaacaacacaacttcacccaccgcctcctggctgcagctctgaaggtacgtggggtacctggcacagcgtgcaccctgagactcagccccacaggcttttcctctggagtattccatgcatgttacaggctctcctgcctctgatcagaatcagcgggggtgcttaattctgtcccctctcatcgcagcccaatctcagcttgctgttaatccaggccacagggccccatctccccggctccaggtttggcttccccatctcccccaggagctcctattgacacttcctgccacccttcccctagagccacagcgggaacatatcttgcatggactttagcagcaatggcaaatacctggctacctgtgcagatgatcgcaccatccgcatctggagcaccaaggacttcctgcagcgagagcaccgcagcatgagagccaacgtggagctggaccacgccaccctggtgcgcttcagccctgactgcaggtgggacaagacggagcctcaggtttgcctgcagaggcctagtcccaggctttggccttcccatatctgctttgaggtagtgaggagggacctggacccagggcctcccttggggtgccagaaagagcatccacatagtttgcgcgctgcctggggctccctggagatctgggctgctatacagcaaggaaacagggggaggtctcttcctacctggaaataccttggcctggcttccagatgagccttagtttctaaaccctagagagaaactaaaggagccaaagctatcagaatcttaccttttgaggagttttatgagatttggaaccaggggcttaagttttaaggctagactgtggggcatgaggagagatcttgacttccccgagaacccagcacaggacctggaacacagagcctctttgtccagtgagagcgtgacttgtctgctgcctgtctctagagccttcatcgtctggctggccaacggggacaccctccgtgtcttcaagatgaccaagcgggaggatgggggctacaccttcacagccaccccagaggacttccctaaaaagcacaaggcgcctgtcatcgacattggcattgctaacacaggtaagaggcattcagagggtggcgcctgcccaaagcatgaaggaaagatccagttctatttcctcaatgagttaatgctgcctgaaagttctgctcaacctgagaggaacaaggggtccctggctctgaacagcctggctctgtgctcccctggagtccctgggccacaccaggtccctagggaaggtggggaagggccacagtcttcagcagagtccttatctgtagtgacccttggcctgggaggagacatgtatacttcgggcagcagaggccttgtaagtgtctttggagagtgacagttggtcaggtcactgcccgtgacccacatcactcccttcccgctcagggaagtttatcatgactgcctccagtgacaccactgtcctcatctggagcctgaagggtcaagtgctgtctaccatcaacaccaaccagatga

SEQ ID NO: 14449 - DNA, 1109 bp, Homo sapiens
aacggccaggcccagccgcttgaggctccccaacggccaggccgcgcccccgcgtgcgtgcgcggcccggcagagccgtgcgggcgcccgcgtactcactagctgaggtggcagtggttccaccaacatggagctctcgcagatgtcggagctcatggggctgtcggtgttgcttgggctgctggccctgatggcgacggcggcggtagcgcgggggtggctgcgcgcgggggaggagaggagcggccggcccgcctggtcttgctctgtcactcaggatggaatgcagtagtgttgtgatcatagcttactgcagcctcgaactcctgggctcaaatgatccaaagcattgggattacaggcatgagccaccatacccagccagccaaagcctctgtttttgcccatatcacactcattctcctccagaagacaagggccatatctggttaatctcctgctgttccactcaatgcctggctcatcataggtgggcagtaaatgcttatcagtgagtaactggagaacaacatggcccttccttataggccaaaaagcaaatggatttccacctgacaaatcttcgggatccaagaagcagaaacaatatcagcggattcggaaggagaagcctcaacaacacaacttcacccaccgcctcctggctgcagctctgaagagccacagcgggaacatatcttgcatggactttagcagcaatggcaaatacctggctacctgtgcagatgatcgcaccatccgcatctggagcaccaaggacttcctgcagcgagagcaccgcagcatgagagccaacgtggagctggaccacgccaccctggtgcgcttcagccctgactgcagagccttcatcgtctggctggccaacggggacaccctccgtgtcttcaagatgaccaagcgggaggatgggggctacaccttcacagccaccccagaggacttccctaaaaagcacaaggcgcctgtcatcgacattggcattgctaacacagggaagtttatcatgactgcctccagtgacaccactgtcctcatctggagcctgaagggtcaagtgctgtctaccatcaacaccaaccagatga

SEQ ID NO: 14450 - DNA, 5524 bp, Homo sapiens
cggcctcctcgtggtccgacctgcggtttgggcccgcggctggtggggcccggcgactccatgggcctcagtttctcctctggtaacgtgagcttcgcttccagagacggggacccgccttgccgggttaggcgcacctcctggggcgggactggctccaacctgggccccttactgcggctttctctgtggccgaggccaggccgtccccggggtggccaggagagcaccgtaaactcttcagcctgctccgtggccgcgatctcggaaaaagcaccaattctgtgatgtgcagcagcatttactgggcatctatgaccctgtgataggctttggggtctttttctgtaaggagtccagtaaaggagaagtacatctgtattatgaacacctaaatatgtaagtgaaaaacacggtgaaataagtttcactgaggccaggcgaagtggctcacgcctgtattcccagcactttgggaggccgaggcagggagatcgcttgagcccaggagtttgggaccagcctgagcaacatagcaagaccccatctctacgcaaaattagctgggtgtggttgtgcacgcccctgtagtcccagctccatgggaggccgaggcaggagggtgtcgtgagtccaggaattcaaggctgcagtgagttgtgatagatcgcgccactgtacttcagcctgggtgacggcaagagcctgtctctgaaaagtttcatagaagaggttagtactagaaatgggaaacaccagagagtcagtgggcagccctgctctttttatttatttttcagacagagtttcgctcttcttgcccaggctggagtgcagtggcacaatcttggctcgttgcaacttccgcctgccaggttcaagcgattcttctgcctctgcctcccgagtagctgggactacaggcacacaccaccacgcctggctaatttttgtatatttagtagacggggtttcgccacgttggtcaggctggtctcgaacgcctgatctcaggtgatccactcgtcctggcctccaaaagtgctgagattacaggcgtgaaccactgtgcccggccagccctgcattttttttttttttttttttgcagggggacggagttttgctctgtcgcccaatctggagtctagtggcgggatctcggctcactgcaagctccgcctctgggttcacgccattctcctgcctcagcctcctgagtagctgggactacaggcgtccgacaccacacccggctaattttttgtattttttgagtagagacggggtttcactgtgttagccaggatggtctcaatctcctaacctcttgtgatccacctgcctcggcctcccaaagtgctgggattacaggcgtgagccaccctgcctggccgagtcctgttcttttatgggggaggtggttgttagggaaatcattactgagaatagggggcacatgaggtagtgtggggtctcaaaggatggttctagaagaagagtttgccagaaggccaaggaaaaaagacattcctgccaatggcaatacccgagaaggcaaggagtccccaaacagcatttggtatgacttaagtgtgaggaggggggcttgttagacatgcctggagagaaggaagcagaggacagattgtggctgtgtttgtttgcagggcccaggagcttttttcctgttggaattggggagcatctgcagtcatttaccacatgccagctttgtgactcaattaagtatcttttacaaaagtgactggctccactcccccgcacaggactcaacagatgttgacttctcatccccgagttctttcaggtactggagtgcagtggtgcgatcttggcttactgcaacctctacctcctgggttcaagtgattctcctgcctcagcctcctgagtagctgggattacaggcgcctgccaccacgcccggctaatttttgtatttttagtagagacggggtttcaccatgttggccagactggtggaactcctgggcatcaagatgatccagctgccgggccgggcatggtgactcacgcctgtaatcccagcactttgggaggccgaagcgggcaggtcacaaggtcaggagatcgagactgaggcaacagagcgagactctgtatcaaacaaaaaaaaaaaatgatccagcagctgcctcagcctcccaaagcgctgggattacaggcatgagccaccgcacccggcctccatagagcctttaatgcttgtgttcggtacttttgcttgtcactttgtagatatctcatccaattcaatctcccttatttttatttatttatttatttatttattttgagacagaatctcactctgtcgcctaggctggaatacagtggcacgatcactgcatttgaactcctgggctcaagcaattttccctcctcagcctccgaatagctgggaccacaggcgcacaccaccatgcccagctaattaaagttttctgtagagatggggtgtcactatgttacccaggctggtctcgaactcctgagctcaagcaatcctcccatctcagcctaccaaaatgctgggatcacaggcatgagccaccgcccccagttctcaacctctctttaagaaaaccaaggctgggccggacacagtggctcacgcctataatcccagcactttgggaggccaaggcaggcagatcacttgaggtgaggagttggagacaagcctggcccacatggtgaaaccccatctctactaaaaaaacaaaaaaattggggccaggtgccatggctcacgcctgtaatcctagcactttgggaggccgaggcgggtggatcacaaggtcaggagattgagaccattctggctaatgtggtgaaaccccacatctactaaaaatacaaaaaaaaattagccgggcatggtggcgggcgcctgtagtcccagctacttgggaggctgaggcaggagaatggcgtgaacccgggaggcagagcttgcagtgagctgagatcacgccactgcactccagcctgggtgacagagcgagactccatctgaaaaaaaaaaaaaaaattagctggatatggtggtgcacgcccatgatcccagctacttggaaggctgaggcacaagaattgcttgaacctgggaggcagaggctacagtgagcggagatcacgccactgcactccagcctgggcgacagagcaagactctgtctccaaaaaaaagaaagaaagaaaagaaaaaaaaaaccaaggtccagagcaattcactaacttacccaaagcagggccgctagagatggttgtgcacattactccctacatagggatgtctggccaaggatccacactccactggccgtgctgtgtacccgcccagcagcatcacccaacccagagagtgcgccttttccactctacatgaaggtgctctgtggacttactgtaaacagcctcctcagtagtcagtcagtagtagagacagaatccaaacccaggtctgattccaaagcctctgttttgtttctgttttctgtttgtttttttttgagacagggtcttgctctgtcactcaggatggaatgcagtagtgttgtgatcatagcttactgcagcctcgaactcctgggctcaaatgatccaaagcattgggattacaggcatgagccaccatacccagccagccaaagcctctgtttttgcccatatcacactcattctcctccagaagacaagggccatatctggttaatctcctgctgttccactcaatgcctggctcatcataggtgggcagtaaatgcttatcagtgagtaactggagaacaacatggcccttccttataggccaaaaagcaaatggatttccacctgacaaatcttcgggatccaagaagcagaaacaatatcagcggattcggaaggagaagcctcaacaacacaacttcacccaccgcctcctggctgcagctctgaaggtacgtggggtacctggcacagcgtgcaccctgagactcagccccacaggcttttcctctggagtattccatgcatgttacaggctctcctgcctctgatcagaatcagcgggggtgcttaattctgtcccctctcatcgcagcccaatctcagcttgctgttaatccaggccacagggccccatctccccggctccaggtttggcttccccatctcccccaggagctcctattgacacttcctgccacccttcccctagagccacagcgggaacatatcttgcatggactttagcagcaatggcaaatacctggctacctgtgcagatgatcgcaccatccgcatctggagcaccaaggacttcctgcagcgagagcaccgcagcatgagagccaacgtggagctggaccacgccaccctggtgcgcttcagccctgactgcaggtgggacaagacggagcctcaggtttgcctgcagaggcctagtcccaggctttggccttcccatatctgctttgaggtagtgaggagggacctggacccagggcctcccttggggtgccagaaagagcatccacatagtttgcgcgctgcctggggctccctggagatctgggctgctatacagcaaggaaacagggggaggtctcttcctacctggaaataccttggcctggcttccagatgagccttagtttctaaaccctagagagaaactaaaggagccaaagctatcagaatcttaccttttgaggagttttatgagatttggaaccaggggcttaagttttaaggctagactgtggggcatgaggagagatcttgacttccccgagaacccagcacaggacctggaacacagagcctctttgtccagtgagagcgtgacttgtctgctgcctgtctctagagccttcatcgtctggctggccaacggggacaccctccgtgtcttcaagatgaccaagcgggaggatgggggctacaccttcacagccaccccagaggacttccctaaaaagcacaaggcgcctgtcatcgacattggcattgctaacacaggtaagaggcattcagagggtggcgcctgcccaaagcatgaaggaaagatccagttctatttcctcaatgagttaatgctgcctgaaagttctgctcaacctgagaggaacaaggggtccctggctctgaacagcctggctctgtgctcccctggagtccctgggccacaccaggtccctagggaaggtggggaagggccacagtcttcagcagagtccttatctgtagtgacccttggcctgggaggagacatgtatacttcgggcagcagaggccttgtaagtgtctttggagagtgacagttggtcaggtcactgcccgtgacccacatcactcccttcccgctcagggaagtttatcatgactgcctccagtgacaccactgtcctcatctggagcctgaagggtcaagtgctgtctaccatcaacaccaaccagatgaacaacacacacgctgctgtatctccctgtg

SEQ ID NO: 14451 - DNA, 834 bp, Homo sapiens
cggcctcctcgtggtccgacctgcggtttgggcccgcggctggtggggcccggcgactccatgggcctcagtttctcctctgggcccaggagcttttttcctgttggaattggggagcatctgcagtcatttaccacatgccagctttgtgactcaattaagtatcttttacaaaagtgactggctccactcccccgcacaggactcaacagatgttgacttctcatccccgagttctttcaggccaaaaagcaaatggatttccacctgacaaatcttcgggatccaagaagcagaaacaatatcagcggattcggaaggagaagcctcaacaacacaacttcacccaccgcctcctggctgcagctctgaagagccacagcgggaacatatcttgcatggactttagcagcaatggcaaatacctggctacctgtgcagatgatcgcaccatccgcatctggagcaccaaggacttcctgcagcgagagcaccgcagcatgagagccaacgtggagctggaccacgccaccctggtgcgcttcagccctgactgcagagccttcatcgtctggctggccaacggggacaccctccgtgtcttcaagatgaccaagcgggaggatgggggctacaccttcacagccaccccagaggacttccctaaaaagcacaaggcgcctgtcatcgacattggcattgctaacacagggaagtttatcatgactgcctccagtgacaccactgtcctcatctggagcctgaagggtcaagtgctgtctaccatcaacaccaaccagatgaacaacacacacgctgctgtatctccctgtg

SEQ ID NO: 14452 - DNA, 8931 bp, Homo sapiens
cccgcgtactcactagctgaggtggcagtggttccaccaacatggagctctcgcagatgtcggagctcatggggctgtcggtgttgcttgggctgctggccctgatggcgacggcggcggtagcgcgggggtggctgcgcgcgggggaggagaggagcggccggcccgcctgtaagtggggccgggtcgggtgggggcggcccgcggtgtcccggctcccggcctcctcgtggtccgacctgcggtttgggcccgcggctggtggggcccggcgactccatgggcctcagtttctcctctggtaacgtgagcttcgcttccagagacggggacccgccttgccgggttaggcgcacctcctggggcgggactggctccaacctgggccccttactgcggctttctctgtggccgaggccaggccgtccccggggtggccaggagagcaccgtaaactcttcagcctgctccgtggccgcgatctcggaaaaagcaccaattctgtgatgtgcagcagcatttactgggcatctatgaccctgtgataggctttggggtctttttctgtaaggagtccagtaaaggagaagtacatctgtattatgaacacctaaatatgtaagtgaaaaacacggtgaaataagtttcactgaggccaggcgaagtggctcacgcctgtattcccagcactttgggaggccgaggcagggagatcgcttgagcccaggagtttgggaccagcctgagcaacatagcaagaccccatctctacgcaaaattagctgggtgtggttgtgcacgcccctgtagtcccagctccatgggaggccgaggcaggagggtgtcgtgagtccaggaattcaaggctgcagtgagttgtgatagatcgcgccactgtacttcagcctgggtgacggcaagagcctgtctctgaaaagtttcatagaagaggttagtactagaaatgggaaacaccagagagtcagtgggcagccctgctctttttatttatttttcagacagagtttcgctcttcttgcccaggctggagtgcagtggcacaatcttggctcgttgcaacttccgcctgccaggttcaagcgattcttctgcctctgcctcccgagtagctgggactacaggcacacaccaccacgcctggctaatttttgtatatttagtagacggggtttcgccacgttggtcaggctggtctcgaacgcctgatctcaggtgatccactcgtcctggcctccaaaagtgctgagattacaggcgtgaaccactgtgcccggccagccctgcattttttttttttttttttttgcagggggacggagttttgctctgtcgcccaatctggagtctagtggcgggatctcggctcactgcaagctccgcctctgggttcacgccattctcctgcctcagcctcctgagtagctgggactacaggcgtccgacaccacacccggctaattttttgtattttttgagtagagacggggtttcactgtgttagccaggatggtctcaatctcctaacctcttgtgatccacctgcctcggcctcccaaagtgctgggattacaggcgtgagccaccctgcctggccgagtcctgttcttttatgggggaggtggttgttagggaaatcattactgagaatagggggcacatgaggtagtgtggggtctcaaaggatggttctagaagaagagtttgccagaaggccaaggaaaaaagacattcctgccaatggcaatacccgagaaggcaaggagtccccaaacagcatttggtatgacttaagtgtgaggaggggggcttgttagacatgcctggagagaaggaagcagaggacagattgtggctgtgtttgtttgcagggcccaggagcttttttcctgttggaattggggagcatctgcagtcatttaccacatgccagctttgtgactcaattaagtatcttttacaaaagtgactggctccactcccccgcacaggactcaacagatgttgacttctcatccccgagttctttcaggtactggagtgcagtggtgcgatcttggcttactgcaacctctacctcctgggttcaagtgattctcctgcctcagcctcctgagtagctgggattacaggcgcctgccaccacgcccggctaatttttgtatttttagtagagacggggtttcaccatgttggccagactggtggaactcctgggcatcaagatgatccagctgccgggccgggcatggtgactcacgcctgtaatcccagcactttgggaggccgaagcgggcaggtcacaaggtcaggagatcgagactgaggcaacagagcgagactctgtatcaaacaaaaaaaaaaaatgatccagcagctgcctcagcctcccaaagcgctgggattacaggcatgagccaccgcacccggcctccatagagcctttaatgcttgtgttcggtacttttgcttgtcactttgtagatatctcatccaattcaatctcccttatttttatttatttatttatttatttattttgagacagaatctcactctgtcgcctaggctggaatacagtggcacgatcactgcatttgaactcctgggctcaagcaattttccctcctcagcctccgaatagctgggaccacaggcgcacaccaccatgcccagctaattaaagttttctgtagagatggggtgtcactatgttacccaggctggtctcgaactcctgagctcaagcaatcctcccatctcagcctaccaaaatgctgggatcacaggcatgagccaccgcccccagttctcaacctctctttaagaaaaccaaggctgggccggacacagtggctcacgcctataatcccagcactttgggaggccaaggcaggcagatcacttgaggtgaggagttggagacaagcctggcccacatggtgaaaccccatctctactaaaaaaacaaaaaaattggggccaggtgccatggctcacgcctgtaatcctagcactttgggaggccgaggcgggtggatcacaaggtcaggagattgagaccattctggctaatgtggtgaaaccccacatctactaaaaatacaaaaaaaaattagccgggcatggtggcgggcgcctgtagtcccagctacttgggaggctgaggcaggagaatggcgtgaacccgggaggcagagcttgcagtgagctgagatcacgccactgcactccagcctgggtgacagagcgagactccatctgaaaaaaaaaaaaaaaattagctggatatggtggtgcacgcccatgatcccagctacttggaaggctgaggcacaagaattgcttgaacctgggaggcagaggctacagtgagcggagatcacgccactgcactccagcctgggcgacagagcaagactctgtctccaaaaaaaagaaagaaagaaaagaaaaaaaaaaccaaggtccagagcaattcactaacttacccaaagcagggccgctagagatggttgtgcacattactccctacatagggatgtctggccaaggatccacactccactggccgtgctgtgtacccgcccagcagcatcacccaacccagagagtgcgccttttccactctacatgaaggtgctctgtggacttactgtaaacagcctcctcagtagtcagtcagtagtagagacagaatccaaacccaggtctgattccaaagcctctgttttgtttctgttttctgtttgtttttttttgagacagggtcttgctctgtcactcaggatggaatgcagtagtgttgtgatcatagcttactgcagcctcgaactcctgggctcaaatgatccaaagcattgggattacaggcatgagccaccatacccagccagccaaagcctctgtttttgcccatatcacactcattctcctccagaagacaagggccatatctggttaatctcctgctgttccactcaatgcctggctcatcataggtgggcagtaaatgcttatcagtgagtaactggagaacaacatggcccttccttataggccaaaaagcaaatggatttccacctgacaaatcttcgggatccaagaagcagaaacaatatcagcggattcggaaggagaagcctcaacaacacaacttcacccaccgcctcctggctgcagctctgaaggtacgtggggtacctggcacagcgtgcaccctgagactcagccccacaggcttttcctctggagtattccatgcatgttacaggctctcctgcctctgatcagaatcagcgggggtgcttaattctgtcccctctcatcgcagcccaatctcagcttgctgttaatccaggccacagggccccatctccccggctccaggtttggcttccccatctcccccaggagctcctattgacacttcctgccacccttcccctagagccacagcgggaacatatcttgcatggactttagcagcaatggcaaatacctggctacctgtgcagatgatcgcaccatccgcatctggagcaccaaggacttcctgcagcgagagcaccgcagcatgagagccaacgtggagctggaccacgccaccctggtgcgcttcagccctgactgcaggtgggacaagacggagcctcaggtttgcctgcagaggcctagtcccaggctttggccttcccatatctgctttgaggtagtgaggagggacctggacccagggcctcccttggggtgccagaaagagcatccacatagtttgcgcgctgcctggggctccctggagatctgggctgctatacagcaaggaaacagggggaggtctcttcctacctggaaataccttggcctggcttccagatgagccttagtttctaaaccctagagagaaactaaaggagccaaagctatcagaatcttaccttttgaggagttttatgagatttggaaccaggggcttaagttttaaggctagactgtggggcatgaggagagatcttgacttccccgagaacccagcacaggacctggaacacagagcctctttgtccagtgagagcgtgacttgtctgctgcctgtctctagagccttcatcgtctggctggccaacggggacaccctccgtgtcttcaagatgaccaagcgggaggatgggggctacaccttcacagccaccccagaggacttccctaaaaagcacaaggcgcctgtcatcgacattggcattgctaacacaggtaagaggcattcagagggtggcgcctgcccaaagcatgaaggaaagatccagttctatttcctcaatgagttaatgctgcctgaaagttctgctcaacctgagaggaacaaggggtccctggctctgaacagcctggctctgtgctcccctggagtccctgggccacaccaggtccctagggaaggtggggaagggccacagtcttcagcagagtccttatctgtagtgacccttggcctgggaggagacatgtatacttcgggcagcagaggccttgtaagtgtctttggagagtgacagttggtcaggtcactgcccgtgacccacatcactcccttcccgctcagggaagtttatcatgactgcctccagtgacaccactgtcctcatctggagcctgaagggtcaagtgctgtctaccatcaacaccaaccagatgaacaacacacacgctgctgtatctccctgtggcaggtgggcaaggaggggtattggcgtctgggaccacgagaggctggggctggggagcaggcacagaacagagagccagcttcatcgcgtgggaagagcatacggggtggggtcaggaacccgagcttcaagtctcagctctccccacttgcagtagtgggatttcatgcaggtcgccccatgtccttagtcgctatttcttcatcttcagtgtttttgttttttagaaaattagtctcactctgtcacccaggctggagcacagtggtgcgatcatagctcactgcagcctcaaactcctgggttgtagctattctcccagctcagcctcctgagtagtcaggactataggcatgtgccactgtactcagctaatttttgttttttgtttgtttgtttgttgagacggtttcaccctcgcccaggcaggagtgcagtggcgcaatcacagctcactgtagccttgacttcccaggctcagaccatcctcccaccttagcctcccgagtagctgggactacaggcgtgcactaccacacctggctaatttttgtattttttgttgagatggggtcttactatgttgcccaggctggtcctgaactcctggcctcaagtgatcctcttgcctcgacctcccaaagtggtagaattacaggcgtgagccactgtgccaagccacctttgggcggggatgttacatatcttagaacaaggctagaagataaactgaggtcacatacataaaagaacttttttgttgtggttgtttgtttgttttttgagatggagtttcgctcttgttgcttaggttggagtgcaatggcaggatcttggctcaccacaacctccgtctcccgggttcaagcgattctcctgcctcagcctcccccaagtagctgggattacaggcatgcaccaccatgcccagctaattttttatttttagtagaggtgaggtttctccatgttggtcaggctggtctcaaactgtcggaccttaggtgagctgcccgcctgggcctcccaaagtgctgggattacaggtatgagccaccacacccggcctttttttttttttttttctgagacagtctcactctgttgcccaggctggagtgcagtggtgcaatctcaatctcagctcactgcaacctccacctaccaggttcaagtgattctcccacctcagccttcccagtaggtgggactacaggcatgcgccaccacgcctggctaattttgtatttttagtagagatgaggtttcaccatgttggccaggctggtctcgaactcctgacctcaggtgatccacccacctcggcctcccaaagtgctgggatgacaggcgtgagccaccgcgcccggccaaaataactctttaaaggtttatattatccagatatgaggattatcaactttctcaggaaagagattgaggggttttacaggaacaacatgctccgaaaatgaagttttaaaggcttctgggttgtatggcagatttgtagcctcgtgtggcttcaccccagatgtgaaggtttgggaagtctgctttggaaagaagggggagttccaggaggtggtgcgagccttcgaactaaagggccactccgcggctgtgcactcgtttgctttctccaacgactcacggaggtgagtgaatccgctctgatgtctgaccagtggctcttggcccctcttgacaaccagggtccttctgtctgtttgtgccatggctctgaagagggtggggtgcctggccctcggcaggaagctgacttagcttcctagctggagctgctcaagttgggccagtgcttaccctgccagggtgtgttggggcttgagctgtgattttctgtgttgcaggatggcttctgtctccaaggatggtacatggaaactgtgggacacagatgtggaatacaagaagaagcaggacccctacttgctgaagacaggccgctttgaagaggcggcgggtgccgcgccgtgccgcctggccctctcccccaacgcccaggtcttggccttggccagtggcagtagtattcatctctacaatacccggcggggcgagaaggaggagtgctttgagcgggtccatggcgagtgtatcgccaacttgtcctttgacatcactggccgctttctggcctcctgtggggaccgggcggtgcggctgtttcacaacactcctggccaccgagccatggtggaggagatgcagggccacctgaagcgggcctccaacgagagcacccgccagaggctgcagcagcagctgacccaggcccaagagaccctgaagagcctgggtgccctgaagaagtgactctgggagggcccggcgcagaggattgaggaggagggatctggcctcctcatggcactgctgccatctttcctcccaggtggaagcctttcagaaggagtctcctggttttcttactggtggccctgcttcttcccattgaaactactcttgtctacttaggtctctctcttcttgctggctgtgactcctccctgactagtggccaaggtgcttttcttcctcccaggcccagtgggtggaatctgtccccacctggcactgaggagaatggtagagaggagaggagagagagagagaatgtgatttttggccttgtggcagcacatcctcacacccaaagaagtttgtaaatgttccagaacaacctagagaacacctgagtactaagcagcagttttgcaaggatgggagactgggatagcttcccatcacagaactgtgttccatcaaaaagacactaagggatttccttctgggcctcagttctatttgtaagatggagaataatcctctctgtgaactccttgcaaagatgatatgaggctaagagaatatcaagtccccaggtctggaagaaaagtagaaaagagtagtactattgtccaatgtcatgaaagtggtaaaagtgggaaccagtgtgctttgaaaccaaattagaaacacattccttgggaaggcaaagttttctgggacttgatcatacattttatatggttgggacttctctcttcgggagatgatatcttgtttaaggagacctcttttcagttcatcaagttcatcagatatttgagtgcccactctgtgcccaaataaatatgagctggggattaaatacgaataa

SEQ ID NO: 14453 - DNA, 2209 bp, Homo sapiens
cccgcgtactcactagctgaggtggcagtggttccaccaacatggagctctcgcagatgtcggagctcatggggctgtcggtgttgcttgggctgctggccctgatggcgacggcggcggtagcgcgggggtggctgcgcgcgggggaggagaggagcggccggcccgcctgccaaaaagcaaatggatttccacctgacaaatcttcgggatccaagaagcagaaacaatatcagcggattcggaaggagaagcctcaacaacacaacttcacccaccgcctcctggctgcagctctgaagagccacagcgggaacatatcttgcatggactttagcagcaatggcaaatacctggctacctgtgcagatgatcgcaccatccgcatctggagcaccaaggacttcctgcagcgagagcaccgcagcatgagagccaacgtggagctggaccacgccaccctgagccttcatcgtctggctggccaacggggacaccctccgtgtcttcaagatgaccaagcgggaggatgggggctacaccttcacagccaccccagaggacttccctaaaaagcacaaggcgcctgtcatcgacattggcattgctaacacagggaagtttatcatgactgcctccagtgacaccactgtcctcatctggagcctgaagggtcaagtgctgtctaccatcaacaccaaccagatgaacaacacacacgctgctgtatctccctgtggcagatttgtagcctcgtgtggcttcaccccagatgtgaaggtttgggaagtctgctttggaaagaagggggagttccaggaggtggtgcgagccttcgaactaaagggccactccgcggctgtgcactcgtttgctttctccaacgactcacggaggatggcttctgtctccaaggatggtacatggaaactgtgggacacagatgtggaatacaagaagaagcaggacccctacttgctgaagacaggccgctttgaagaggcggcgggtgccgcgccgtgccgcctggccctctcccccaacgcccaggtcttggccttggccagtggcagtagtattcatctctacaatacccggcggggcgagaaggaggagtgctttgagcgggtccatggcgagtgtatcgccaacttgtcctttgacatcactggccgctttctggcctcctgtggggaccgggcggtgcggctgtttcacaacactcctggccaccgagccatggtggaggagatgcagggccacctgaagcgggcctccaacgagagcacccgccagaggctgcagcagcagctgacccaggcccaagagaccctgaagagcctgggtgccctgaagaagtgactctgggagggcccggcgcagaggattgaggaggagggatctggcctcctcatggcactgctgccatctttcctcccaggtggaagcctttcagaaggagtctcctggttttcttactggtggccctgcttcttcccattgaaactactcttgtctacttaggtctctctcttcttgctggctgtgactcctccctgactagtggccaaggtgcttttcttcctcccaggcccagtgggtggaatctgtccccacctggcactgaggagaatggtagagaggagaggagagagagagagaatgtgatttttggccttgtggcagcacatcctcacacccaaagaagtttgtaaatgttccagaacaacctagagaacacctgagtactaagcagcagttttgcaaggatgggagactgggatagcttcccatcacagaactgtgttccatcaaaaagacactaagggatttccttctgggcctcagttctatttgtaagatggagaataatcctctctgtgaactccttgcaaagatgatatgaggctaagagaatatcaagtccccaggtctggaagaaaagtagaaaagagtagtactattgtccaatgtcatgaaagtggtaaaagtgggaaccagtgtgctttgaaaccaaattagaaacacattccttgggaaggcaaagttttctgggacttgatcatacattttatatggttgggacttctctcttcgggagatgatatcttgtttaaggagacctcttttcagttcatcaagttcatcagatatttgagtgcccactctgtgcccaaataaatatgagctggggattaaatacgaataa

SEQ ID NO: 14454 - DNA, 5034 bp, Homo sapiens
gacctgcggtttgggcccgcggctggtggggcccggcgactccatgggcctcagtttctcctctggtaacgtgagcttcgcttccagagacggggacccgccttgccgggttaggcgcacctcctggggcgggactggctccaacctgggccccttactgcggctttctctgtggccgaggccaggccgtccccggggtggccaggagagcaccgtaaactcttcagcctgctccgtggccgcgatctcggaaaaagcaccaattctgtgatgtgcagcagcatttactgggcatctatgaccctgtgataggctttggggtctttttctgtaaggagtccagtaaaggagaagtacatctgtattatgaacacctaaatatgtaagtgaaaaacacggtgaaataagtttcactgaggccaggcgaagtggctcacgcctgtattcccagcactttgggaggccgaggcagggagatcgcttgagcccaggagtttgggaccagcctgagcaacatagcaagaccccatctctacgcaaaattagctgggtgtggttgtgcacgcccctgtagtcccagctccatgggaggccgaggcaggagggtgtcgtgagtccaggaattcaaggctgcagtgagttgtgatagatcgcgccactgtacttcagcctgggtgacggcaagagcctgtctctgaaaagtttcatagaagaggttagtactagaaatgggaaacaccagagagtcagtgggcagccctgctctttttatttatttttcagacagagtttcgctcttcttgcccaggctggagtgcagtggcacaatcttggctcgttgcaacttccgcctgccaggttcaagcgattcttctgcctctgcctcccgagtagctgggactacaggcacacaccaccacgcctggctaatttttgtatatttagtagacggggtttcgccacgttggtcaggctggtctcgaacgcctgatctcaggtgatccactcgtcctggcctccaaaagtgctgagattacaggcgtgaaccactgtgcccggccagccctgcattttttttttttttttttttgcagggggacggagttttgctctgtcgcccaatctggagtctagtggcgggatctcggctcactgcaagctccgcctctgggttcacgccattctcctgcctcagcctcctgagtagctgggactacaggcgtccgacaccacacccggctaattttttgtattttttgagtagagacggggtttcactgtgttagccaggatggtctcaatctcctaacctcttgtgatccacctgcctcggcctcccaaagtgctgggattacaggcgtgagccaccctgcctggccgagtcctgttcttttatgggggaggtggttgttagggaaatcattactgagaatagggggcacatgaggtagtgtggggtctcaaaggatggttctagaagaagagtttgccagaaggccaaggaaaaaagacattcctgccaatggcaatacccgagaaggcaaggagtccccaaacagcatttggtatgacttaagtgtgaggaggggggcttgttagacatgcctggagagaaggaagcagaggacagattgtggctgtgtttgtttgcagggcccaggagcttttttcctgttggaattggggagcatctgcagtcatttaccacatgccagctttgtgactcaattaagtatcttttacaaaagtgactggctccactcccccgcacaggactcaacagatgttgacttctcatccccgagttctttcaggtactggagtgcagtggtgcgatcttggcttactgcaacctctacctcctgggttcaagtgattctcctgcctcagcctcctgagtagctgggattacaggcgcctgccaccacgcccggctaatttttgtatttttagtagagacggggtttcaccatgttggccagactggtggaactcctgggcatcaagatgatccagctgccgggccgggcatggtgactcacgcctgtaatcccagcactttgggaggccgaagcgggcaggtcacaaggtcaggagatcgagactgaggcaacagagcgagactctgtatcaaacaaaaaaaaaaaatgatccagcagctgcctcagcctcccaaagcgctgggattacaggcatgagccaccgcacccggcctccatagagcctttaatgcttgtgttcggtacttttgcttgtcactttgtagatatctcatccaattcaatctcccttatttttatttatttatttatttatttattttgagacagaatctcactctgtcgcctaggctggaatacagtggcacgatcactgcatttgaactcctgggctcaagcaattttccctcctcagcctccgaatagctgggaccacaggcgcacaccaccatgcccagctaattaaagttttctgtagagatggggtgtcactatgttacccaggctggtctcgaactcctgagctcaagcaatcctcccatctcagcctaccaaaatgctgggatcacaggcatgagccaccgcccccagttctcaacctctctttaagaaaaccaaggctgggccggacacagtggctcacgcctataatcccagcactttgggaggccaaggcaggcagatcacttgaggtgaggagttggagacaagcctggcccacatggtgaaaccccatctctactaaaaaaacaaaaaaattggggccaggtgccatggctcacgcctgtaatcctagcactttgggaggccgaggcgggtggatcacaaggtcaggagattgagaccattctggctaatgtggtgaaaccccacatctactaaaaatacaaaaaaaaattagccgggcatggtggcgggcgcctgtagtcccagctacttgggaggctgaggcaggagaatggcgtgaacccgggaggcagagcttgcagtgagctgagatcacgccactgcactccagcctgggtgacagagcgagactccatctgaaaaaaaaaaaaaaaattagctggatatggtggtgcacgcccatgatcccagctacttggaaggctgaggcacaagaattgcttgaacctgggaggcagaggctacagtgagcggagatcacgccactgcactccagcctgggcgacagagcaagactctgtctccaaaaaaaagaaagaaagaaaagaaaaaaaaaaccaaggtccagagcaattcactaacttacccaaagcagggccgctagagatggttgtgcacattactccctacatagggatgtctggccaaggatccacactccactggccgtgctgtgtacccgcccagcagcatcacccaacccagagagtgcgccttttccactctacatgaaggtgctctgtggacttactgtaaacagcctcctcagtagtcagtcagtagtagagacagaatccaaacccaggtctgattccaaagcctctgttttgtttctgttttctgtttgtttttttttgagacagggtcttgctctgtcactcaggatggaatgcagtagtgttgtgatcatagcttactgcagcctcgaactcctgggctcaaatgatccaaagcattgggattacaggcatgagccaccatacccagccagccaaagcctctgtttttgcccatatcacactcattctcctccagaagacaagggccatatctggttaatctcctgctgttccactcaatgcctggctcatcataggtgggcagtaaatgcttatcagtgagtaactggagaacaacatggcccttccttataggccaaaaagcaaatggatttccacctgacaaatcttcgggatccaagaagcagaaacaatatcagcggattcggaaggagaagcctcaacaacacaacttcacccaccgcctcctggctgcagctctgaaggtacgtggggtacctggcacagcgtgcaccctgagactcagccccacaggcttttcctctggagtattccatgcatgttacaggctctcctgcctctgatcagaatcagcgggggtgcttaattctgtcccctctcatcgcagcccaatctcagcttgctgttaatccaggccacagggccccatctccccggctccaggtttggcttccccatctcccccaggagctcctattgacacttcctgccacccttcccctagagccacagcgggaacatatcttgcatggactttagcagcaatggcaaatacctggctacctgtgcagatgatcgcaccatccgcatctggagcaccaaggacttcctgcagcgagagcaccgcagcatgagagccaacgtggagctggaccacgccaccctggtgcgcttcagccctgactgcaggtgggacaagacggagcctcaggtttgcctgcagaggcctagtcccaggctttggccttcccatatctgctttgaggtagtgaggagggacctggacccagggcctcccttggggtgccagaaagagcatccacatagtttgcgcgctgcctggggctccctggagatctgggctgctatacagcaaggaaacagggggaggtctcttcctacctggaaataccttggcctggcttccagatgagccttagtttctaaaccctagagagaaactaaaggagccaaagctatcagaatcttaccttttgaggagttttatgagatttggaaccaggggcttaagttttaaggctagactgtggggcatgaggagagatcttgacttccccgagaacccagcacaggacctggaacacagagcctctttgtccagtgagagcgtgacttgtctgctgcctgtctctagagccttcatcgtctggctggccaacggggacaccctccgtgtcttcaagatgaccaagcgggaggatgggggctacaccttcacagccaccccagaggacttccctaaaaagcacaaggcgcctgtcatcgacattggcattgctaacaca

SEQ ID NO: 14455 - DNA, 576 bp, Homo sapiens
gacctgcggtttgggcccgcggctggtggggcccggcgactccatgggcctcagtttctcctctggtaacgtgagcttcgcttccagagacggggacccgccttgccgggccaaaaagcaaatggatttccacctgacaaatcttcgggatccaagaagcagaaacaatatcagcggattcggaaggagaagcctcaacaacacaacttcacccaccgcctcctggctgcagctctgaagagccacagcgggaacatatcttgcatggactttagcagcaatggcaaatacctggctacctgtgcagatgatcgcaccatccgcatctggagcaccaaggacttcctgcagcgagagcaccgcagcatgagagccaacgtggagctggaccacgccaccctggtgcgcttcagccctgactgcagagccttcatcgtctggctggccaacggggacaccctccgtgtcttcaagatgaccaagcgggaggatgggggctacaccttcacagccaccccagaggacttccctaaaaagcacaaggcgcctgtcatcgacattggcattgctaacaca

SEQ ID NO: 14456 - DNA, 7051 bp, Homo sapiens
cgcgcccccgcgtgcgtgcgcggcccggcagagccgtgcgggcgcccgcgtactcactagctgaggtggcagtggttccaccaacatggagctctcgcagatgtcggagctcatggggctgtcggtgttgcttgggctgctggccctgatggcgacggcggcggtagcgcgggggtggctgcgcgcgggggaggagaggagcggccggcccgcctgtaagtggggccgggtcgggtgggggcggcccgcggtgtcccggctcccggcctcctcgtggtccgacctgcggtttgggcccgcggctggtggggcccggcgactccatgggcctcagtttctcctctggtaacgtgagcttcgcttccagagacggggacccgccttgccgggttaggcgcacctcctggggcgggactggctccaacctgggccccttactgcggctttctctgtggccgaggccaggccgtccccggggtggccaggagagcaccgtaaactcttcagcctgctccgtggccgcgatctcggaaaaagcaccaattctgtgatgtgcagcagcatttactgggcatctatgaccctgtgataggctttggggtctttttctgtaaggagtccagtaaaggagaagtacatctgtattatgaacacctaaatatgtaagtgaaaaacacggtgaaataagtttcactgaggccaggcgaagtggctcacgcctgtattcccagcactttgggaggccgaggcagggagatcgcttgagcccaggagtttgggaccagcctgagcaacatagcaagaccccatctctacgcaaaattagctgggtgtggttgtgcacgcccctgtagtcccagctccatgggaggccgaggcaggagggtgtcgtgagtccaggaattcaaggctgcagtgagttgtgatagatcgcgccactgtacttcagcctgggtgacggcaagagcctgtctctgaaaagtttcatagaagaggttagtactagaaatgggaaacaccagagagtcagtgggcagccctgctctttttatttatttttcagacagagtttcgctcttcttgcccaggctggagtgcagtggcacaatcttggctcgttgcaacttccgcctgccaggttcaagcgattcttctgcctctgcctcccgagtagctgggactacaggcacacaccaccacgcctggctaatttttgtatatttagtagacggggtttcgccacgttggtcaggctggtctcgaacgcctgatctcaggtgatccactcgtcctggcctccaaaagtgctgagattacaggcgtgaaccactgtgcccggccagccctgcattttttttttttttttttttgcagggggacggagttttgctctgtcgcccaatctggagtctagtggcgggatctcggctcactgcaagctccgcctctgggttcacgccattctcctgcctcagcctcctgagtagctgggactacaggcgtccgacaccacacccggctaattttttgtattttttgagtagagacggggtttcactgtgttagccaggatggtctcaatctcctaacctcttgtgatccacctgcctcggcctcccaaagtgctgggattacaggcgtgagccaccctgcctggccgagtcctgttcttttatgggggaggtggttgttagggaaatcattactgagaatagggggcacatgaggtagtgtggggtctcaaaggatggttctagaagaagagtttgccagaaggccaaggaaaaaagacattcctgccaatggcaatacccgagaaggcaaggagtccccaaacagcatttggtatgacttaagtgtgaggaggggggcttgttagacatgcctggagagaaggaagcagaggacagattgtggctgtgtttgtttgcagggcccaggagcttttttcctgttggaattggggagcatctgcagtcatttaccacatgccagctttgtgactcaattaagtatcttttacaaaagtgactggctccactcccccgcacaggactcaacagatgttgacttctcatccccgagttctttcaggtactggagtgcagtggtgcgatcttggcttactgcaacctctacctcctgggttcaagtgattctcctgcctcagcctcctgagtagctgggattacaggcgcctgccaccacgcccggctaatttttgtatttttagtagagacggggtttcaccatgttggccagactggtggaactcctgggcatcaagatgatccagctgccgggccgggcatggtgactcacgcctgtaatcccagcactttgggaggccgaagcgggcaggtcacaaggtcaggagatcgagactgaggcaacagagcgagactctgtatcaaacaaaaaaaaaaaatgatccagcagctgcctcagcctcccaaagcgctgggattacaggcatgagccaccgcacccggcctccatagagcctttaatgcttgtgttcggtacttttgcttgtcactttgtagatatctcatccaattcaatctcccttatttttatttatttatttatttatttattttgagacagaatctcactctgtcgcctaggctggaatacagtggcacgatcactgcatttgaactcctgggctcaagcaattttccctcctcagcctccgaatagctgggaccacaggcgcacaccaccatgcccagctaattaaagttttctgtagagatggggtgtcactatgttacccaggctggtctcgaactcctgagctcaagcaatcctcccatctcagcctaccaaaatgctgggatcacaggcatgagccaccgcccccagttctcaacctctctttaagaaaaccaaggctgggccggacacagtggctcacgcctataatcccagcactttgggaggccaaggcaggcagatcacttgaggtgaggagttggagacaagcctggcccacatggtgaaaccccatctctactaaaaaaacaaaaaaattggggccaggtgccatggctcacgcctgtaatcctagcactttgggaggccgaggcgggtggatcacaaggtcaggagattgagaccattctggctaatgtggtgaaaccccacatctactaaaaatacaaaaaaaaattagccgggcatggtggcgggcgcctgtagtcccagctacttgggaggctgaggcaggagaatggcgtgaacccgggaggcagagcttgcagtgagctgagatcacgccactgcactccagcctgggtgacagagcgagactccatctgaaaaaaaaaaaaaaaattagctggatatggtggtgcacgcccatgatcccagctacttggaaggctgaggcacaagaattgcttgaacctgggaggcagaggctacagtgagcggagatcacgccactgcactccagcctgggcgacagagcaagactctgtctccaaaaaaaagaaagaaagaaaagaaaaaaaaaaccaaggtccagagcaattcactaacttacccaaagcagggccgctagagatggttgtgcacattactccctacatagggatgtctggccaaggatccacactccactggccgtgctgtgtacccgcccagcagcatcacccaacccagagagtgcgccttttccactctacatgaaggtgctctgtggacttactgtaaacagcctcctcagtagtcagtcagtagtagagacagaatccaaacccaggtctgattccaaagcctctgttttgtttctgttttctgtttgtttttttttgagacagggtcttgctctgtcactcaggatggaatgcagtagtgttgtgatcatagcttactgcagcctcgaactcctgggctcaaatgatccaaagcattgggattacaggcatgagccaccatacccagccagccaaagcctctgtttttgcccatatcacactcattctcctccagaagacaagggccatatctggttaatctcctgctgttccactcaatgcctggctcatcataggtgggcagtaaatgcttatcagtgagtaactggagaacaacatggcccttccttataggccaaaaagcaaatggatttccacctgacaaatcttcgggatccaagaagcagaaacaatatcagcggattcggaaggagaagcctcaacaacacaacttcacccaccgcctcctggctgcagctctgaaggtacgtggggtacctggcacagcgtgcaccctgagactcagccccacaggcttttcctctggagtattccatgcatgttacaggctctcctgcctctgatcagaatcagcgggggtgcttaattctgtcccctctcatcgcagcccaatctcagcttgctgttaatccaggccacagggccccatctccccggctccaggtttggcttccccatctcccccaggagctcctattgacacttcctgccacccttcccctagagccacagcgggaacatatcttgcatggactttagcagcaatggcaaatacctggctacctgtgcagatgatcgcaccatccgcatctggagcaccaaggacttcctgcagcgagagcaccgcagcatgagagccaacgtggagctggaccacgccaccctggtgcgcttcagccctgactgcaggtgggacaagacggagcctcaggtttgcctgcagaggcctagtcccaggctttggccttcccatatctgctttgaggtagtgaggagggacctggacccagggcctcccttggggtgccagaaagagcatccacatagtttgcgcgctgcctggggctccctggagatctgggctgctatacagcaaggaaacagggggaggtctcttcctacctggaaataccttggcctggcttccagatgagccttagtttctaaaccctagagagaaactaaaggagccaaagctatcagaatcttaccttttgaggagttttatgagatttggaaccaggggcttaagttttaaggctagactgtggggcatgaggagagatcttgacttccccgagaacccagcacaggacctggaacacagagcctctttgtccagtgagagcgtgacttgtctgctgcctgtctctagagccttcatcgtctggctggccaacggggacaccctccgtgtcttcaagatgaccaagcgggaggatgggggctacaccttcacagccaccccagaggacttccctaaaaagcacaaggcgcctgtcatcgacattggcattgctaacacaggtaagaggcattcagagggtggcgcctgcccaaagcatgaaggaaagatccagttctatttcctcaatgagttaatgctgcctgaaagttctgctcaacctgagaggaacaaggggtccctggctctgaacagcctggctctgtgctcccctggagtccctgggccacaccaggtccctagggaaggtggggaagggccacagtcttcagcagagtccttatctgtagtgacccttggcctgggaggagacatgtatacttcgggcagcagaggccttgtaagtgtctttggagagtgacagttggtcaggtcactgcccgtgacccacatcactcccttcccgctcagggaagtttatcatgactgcctccagtgacaccactgtcctcatctggagcctgaagggtcaagtgctgtctaccatcaacaccaaccagatgaacaacacacacgctgctgtatctccctgtggcaggtgggcaaggaggggtattggcgtctgggaccacgagaggctggggctggggagcaggcacagaacagagagccagcttcatcgcgtgggaagagcatacggggtggggtcaggaacccgagcttcaagtctcagctctccccacttgcagtagtgggatttcatgcaggtcgccccatgtccttagtcgctatttcttcatcttcagtgtttttgttttttagaaaattagtctcactctgtcacccaggctggagcacagtggtgcgatcatagctcactgcagcctcaaactcctgggttgtagctattctcccagctcagcctcctgagtagtcaggactataggcatgtgccactgtactcagctaatttttgttttttgtttgtttgtttgttgagacggtttcaccctcgcccaggcaggagtgcagtggcgcaatcacagctcactgtagccttgacttcccaggctcagaccatcctcccaccttagcctcccgagtagctgggactacaggcgtgcactaccacacctggctaatttttgtattttttgttgagatggggtcttactatgttgcccaggctggtcctgaactcctggcctcaagtgatcctcttgcctcgacctcccaaagtggtagaattacaggcgtgagccactgtgccaagccacctttgggcggggatgttacatatcttagaacaaggctagaagataaactgaggtcacatacataaaagaacttttttgttgtggttgtttgtttgttttttgagatggagtttcgctcttgttgcttaggttggagtgcaatggcaggatcttggctcaccacaacctccgtctcccgggttcaagcgattctcctgcctcagcctcccccaagtagctgggattacaggcatgcaccaccatgcccagctaattttttatttttagtagaggtgaggtttctccatgttggtcaggctggtctcaaactgtcggaccttaggtgagctgcccgcctgggcctcccaaagtgctgggattacaggtatgagccaccacacccggcctttttttttttttttttctgagacagtctcactctgttgcccaggctggagtgcagtggtgcaatctcaatctcagctcactgcaacctccacctaccaggttcaagtgattctcccacctcagccttcccagtaggtgggactacaggcatgcgccaccacgcctggctaattttgtatttttagtagagatga

SEQ ID NO: 14457 - DNA, 1262 bp, Homo sapiens
cgcgcccccgcgtgcgtgcgcggcccggcagagccgtgcgggcgcccgcgtactcactagctgaggtggcagtggttccaccaacatggagctctcgcagatgtcggagctcatggggctgtcggtgttgcttgggctgctggccctgatggcgacggcggcggtagcgcgggggtggctgcgcgcgggggaggagaggagcggccggcccgcctgccaaaaagcaaatggatttccacctgacaaatcttcgggatccaagaagcagaaacaatatcagcggattcggaaggagaagcctcaacaacacaacttcacccaccgcctcctggctgcagctctgaagagccacagcgggaacatatcttgcatggactttagcagcaatggcaaatacctggctacctgtgcagatgatcgcaccatccgcatctggagcaccaaggacttcctgcagcgagagcaccgcagcatgagagccaacgtggagctggaccacgccaccctggtgcgcttcagccctgactgcagagccttcatcgtctggctggccaacggggacaccctccgtgtcttcaagatgaccaagcgggaggatgggggctacaccttcacagccaccccagaggacttccctaaaaagcacaaggcgcctgtcatcgacattggcattgctaacacagggaagtttatcatgactgcctccagtgacaccactgtcctcatctggagcctgaagggtcaagtgctgtctaccatcaacaccaaccagatgaacaacacacacgctgctgtatctccctgtggcaggttggagtgcaatggcaggatcttggctcaccacaacctccgtctcccgggttcaagcgattctcctgcctcagcctcccccaagtagctgggattacaggcatgcaccaccatgcccagctaattttttatttttagtagaggtgaggtttctccatgttggtcaggctggtctcaaactgtcggaccttaggtgagctgcccgcctgggcctcccaaagtgctgggattacaggtatgagccaccacacccggcctttttttttttttttttctgagacagtctcactctgttgcccaggctggagtgcagtggtgcaatctcaatctcagctcactgcaacctccacctaccaggttcaagtgattctcccacctcagccttcccagtaggtgggactacaggcatgcgccaccacgcctggctaattttgtatttttagtagagatga

SEQ ID NO: 14458 - DNA, 4123 bp, Homo sapiens
gtgcgggcgcccgcgtactcactagctgaggtggcagtggttccaccaacatggagctctcgcagatgtcggagctcatggggctgtcggtgttgcttgggctgctggccctgatggcgacggcggcggtagcgcgggggtggctgcgcgcgggggaggagaggagcggccggcccgcctgtaagtggggccgggtcgggtgggggcggcccgcggtgtcccggctcccggcctcctcgtggtccgacctgcggtttgggcccgcggctggtggggcccggcgactccatgggcctcagtttctcctctggtaacgtgagcttcgcttccagagacggggacccgccttgccgggttaggcgcacctcctggggcgggactggctccaacctgggccccttactgcggctttctctgtggccgaggccaggccgtccccggggtggccaggagagcaccgtaaactcttcagcctgctccgtggccgcgatctcggaaaaagcaccaattctgtgatgtgcagcagcatttactgggcatctatgaccctgtgataggctttggggtctttttctgtaaggagtccagtaaaggagaagtacatctgtattatgaacacctaaatatgtaagtgaaaaacacggtgaaataagtttcactgaggccaggcgaagtggctcacgcctgtattcccagcactttgggaggccgaggcagggagatcgcttgagcccaggagtttgggaccagcctgagcaacatagcaagaccccatctctacgcaaaattagctgggtgtggttgtgcacgcccctgtagtcccagctccatgggaggccgaggcaggagggtgtcgtgagtccaggaattcaaggctgcagtgagttgtgatagatcgcgccactgtacttcagcctgggtgacggcaagagcctgtctctgaaaagtttcatagaagaggttagtactagaaatgggaaacaccagagagtcagtgggcagccctgctctttttatttatttttcagacagagtttcgctcttcttgcccaggctggagtgcagtggcacaatcttggctcgttgcaacttccgcctgccaggttcaagcgattcttctgcctctgcctcccgagtagctgggactacaggcacacaccaccacgcctggctaatttttgtatatttagtagacggggtttcgccacgttggtcaggctggtctcgaacgcctgatctcaggtgatccactcgtcctggcctccaaaagtgctgagattacaggcgtgaaccactgtgcccggccagccctgcattttttttttttttttttttgcagggggacggagttttgctctgtcgcccaatctggagtctagtggcgggatctcggctcactgcaagctccgcctctgggttcacgccattctcctgcctcagcctcctgagtagctgggactacaggcgtccgacaccacacccggctaattttttgtattttttgagtagagacggggtttcactgtgttagccaggatggtctcaatctcctaacctcttgtgatccacctgcctcggcctcccaaagtgctgggattacaggcgtgagccaccctgcctggccgagtcctgttcttttatgggggaggtggttgttagggaaatcattactgagaatagggggcacatgaggtagtgtggggtctcaaaggatggttctagaagaagagtttgccagaaggccaaggaaaaaagacattcctgccaatggcaatacccgagaaggcaaggagtccccaaacagcatttggtatgacttaagtgtgaggaggggggcttgttagacatgcctggagagaaggaagcagaggacagattgtggctgtgtttgtttgcagggcccaggagcttttttcctgttggaattggggagcatctgcagtcatttaccacatgccagctttgtgactcaattaagtatcttttacaaaagtgactggctccactcccccgcacaggactcaacagatgttgacttctcatccccgagttctttcaggtactggagtgcagtggtgcgatcttggcttactgcaacctctacctcctgggttcaagtgattctcctgcctcagcctcctgagtagctgggattacaggcgcctgccaccacgcccggctaatttttgtatttttagtagagacggggtttcaccatgttggccagactggtggaactcctgggcatcaagatgatccagctgccgggccgggcatggtgactcacgcctgtaatcccagcactttgggaggccgaagcgggcaggtcacaaggtcaggagatcgagactgaggcaacagagcgagactctgtatcaaacaaaaaaaaaaaatgatccagcagctgcctcagcctcccaaagcgctgggattacaggcatgagccaccgcacccggcctccatagagcctttaatgcttgtgttcggtacttttgcttgtcactttgtagatatctcatccaattcaatctcccttatttttatttatttatttatttatttattttgagacagaatctcactctgtcgcctaggctggaatacagtggcacgatcactgcatttgaactcctgggctcaagcaattttccctcctcagcctccgaatagctgggaccacaggcgcacaccaccatgcccagctaattaaagttttctgtagagatggggtgtcactatgttacccaggctggtctcgaactcctgagctcaagcaatcctcccatctcagcctaccaaaatgctgggatcacaggcatgagccaccgcccccagttctcaacctctctttaagaaaaccaaggctgggccggacacagtggctcacgcctataatcccagcactttgggaggccaaggcaggcagatcacttgaggtgaggagttggagacaagcctggcccacatggtgaaaccccatctctactaaaaaaacaaaaaaattggggccaggtgccatggctcacgcctgtaatcctagcactttgggaggccgaggcgggtggatcacaaggtcaggagattgagaccattctggctaatgtggtgaaaccccacatctactaaaaatacaaaaaaaaattagccgggcatggtggcgggcgcctgtagtcccagctacttgggaggctgaggcaggagaatggcgtgaacccgggaggcagagcttgcagtgagctgagatcacgccactgcactccagcctgggtgacagagcgagactccatctgaaaaaaaaaaaaaaaattagctggatatggtggtgcacgcccatgatcccagctacttggaaggctgaggcacaagaattgcttgaacctgggaggcagaggctacagtgagcggagatcacgccactgcactccagcctgggcgacagagcaagactctgtctccaaaaaaaagaaagaaagaaaagaaaaaaaaaaccaaggtccagagcaattcactaacttacccaaagcagggccgctagagatggttgtgcacattactccctacatagggatgtctggccaaggatccacactccactggccgtgctgtgtacccgcccagcagcatcacccaacccagagagtgcgccttttccactctacatgaaggtgctctgtggacttactgtaaacagcctcctcagtagtcagtcagtagtagagacagaatccaaacccaggtctgattccaaagcctctgttttgtttctgttttctgtttgtttttttttgagacagggtcttgctctgtcactcaggatggaatgcagtagtgttgtgatcatagcttactgcagcctcgaactcctgggctcaaatgatccaaagcattgggattacaggcatgagccaccatacccagccagccaaagcctctgtttttgcccatatcacactcattctcctccagaagacaagggccatatctggttaatctcctgctgttccactcaatgcctggctcatcataggtgggcagtaaatgcttatcagtgagtaactggagaacaacatggcccttccttataggccaaaaagcaaatggatttccacctgacaaatcttc

SEQ ID NO: 14459 - DNA, 673 bp, Homo sapiens
gtgcgggcgcccgcgtactcactagctgaggtggcagtggttccaccaacatggagctctcgcagatgtcggagctcatggggctgtcggtgttgcttgggctgctggccctgatggcgacggcggcggtagcgcgggggtggctgcgcgcgggggaggagaggagcggccggcccgcctagacggggacccgccttgccgggttaggcgcacctcctggggcgggactggctccaacctgggccccttactgcggctttctctgtggccgaggccaggccgtccccggggtggccaggagagcaccgtaaactcttcagcctgctccgtggccgcgatctcggaaaaagcaccaattctgtgatgtgcagcagcatttactgggcatctatgaccctgtgataggctttggggtctttttctgtaaggagtccagtaaaggagaagtacatctgtattatgaacacctaaatatggcccaggagcttttttcctgttggaattggggagcatctgcagtcatttaccacatgccagctttgtgactcaattaagtatcttttacaaaagtgactggctccactcccccgcacaggactcaacagatgttgacttctcatccccgagttctttcaggccaaaaagcaaatggatttccacctgacaaatcttc

SEQ ID NO: 14460 - DNA, 8610 bp, Homo sapiens
agagacggggacccgccttgccgggttaggcgcacctcctggggcgggactggctccaacctgggccccttactgcggctttctctgtggccgaggccaggccgtccccggggtggccaggagagcaccgtaaactcttcagcctgctccgtggccgcgatctcggaaaaagcaccaattctgtgatgtgcagcagcatttactgggcatctatgaccctgtgataggctttggggtctttttctgtaaggagtccagtaaaggagaagtacatctgtattatgaacacctaaatatgtaagtgaaaaacacggtgaaataagtttcactgaggccaggcgaagtggctcacgcctgtattcccagcactttgggaggccgaggcagggagatcgcttgagcccaggagtttgggaccagcctgagcaacatagcaagaccccatctctacgcaaaattagctgggtgtggttgtgcacgcccctgtagtcccagctccatgggaggccgaggcaggagggtgtcgtgagtccaggaattcaaggctgcagtgagttgtgatagatcgcgccactgtacttcagcctgggtgacggcaagagcctgtctctgaaaagtttcatagaagaggttagtactagaaatgggaaacaccagagagtcagtgggcagccctgctctttttatttatttttcagacagagtttcgctcttcttgcccaggctggagtgcagtggcacaatcttggctcgttgcaacttccgcctgccaggttcaagcgattcttctgcctctgcctcccgagtagctgggactacaggcacacaccaccacgcctggctaatttttgtatatttagtagacggggtttcgccacgttggtcaggctggtctcgaacgcctgatctcaggtgatccactcgtcctggcctccaaaagtgctgagattacaggcgtgaaccactgtgcccggccagccctgcattttttttttttttttttttgcagggggacggagttttgctctgtcgcccaatctggagtctagtggcgggatctcggctcactgcaagctccgcctctgggttcacgccattctcctgcctcagcctcctgagtagctgggactacaggcgtccgacaccacacccggctaattttttgtattttttgagtagagacggggtttcactgtgttagccaggatggtctcaatctcctaacctcttgtgatccacctgcctcggcctcccaaagtgctgggattacaggcgtgagccaccctgcctggccgagtcctgttcttttatgggggaggtggttgttagggaaatcattactgagaatagggggcacatgaggtagtgtggggtctcaaaggatggttctagaagaagagtttgccagaaggccaaggaaaaaagacattcctgccaatggcaatacccgagaaggcaaggagtccccaaacagcatttggtatgacttaagtgtgaggaggggggcttgttagacatgcctggagagaaggaagcagaggacagattgtggctgtgtttgtttgcagggcccaggagcttttttcctgttggaattggggagcatctgcagtcatttaccacatgccagctttgtgactcaattaagtatcttttacaaaagtgactggctccactcccccgcacaggactcaacagatgttgacttctcatccccgagttctttcaggtactggagtgcagtggtgcgatcttggcttactgcaacctctacctcctgggttcaagtgattctcctgcctcagcctcctgagtagctgggattacaggcgcctgccaccacgcccggctaatttttgtatttttagtagagacggggtttcaccatgttggccagactggtggaactcctgggcatcaagatgatccagctgccgggccgggcatggtgactcacgcctgtaatcccagcactttgggaggccgaagcgggcaggtcacaaggtcaggagatcgagactgaggcaacagagcgagactctgtatcaaacaaaaaaaaaaaatgatccagcagctgcctcagcctcccaaagcgctgggattacaggcatgagccaccgcacccggcctccatagagcctttaatgcttgtgttcggtacttttgcttgtcactttgtagatatctcatccaattcaatctcccttatttttatttatttatttatttatttattttgagacagaatctcactctgtcgcctaggctggaatacagtggcacgatcactgcatttgaactcctgggctcaagcaattttccctcctcagcctccgaatagctgggaccacaggcgcacaccaccatgcccagctaattaaagttttctgtagagatggggtgtcactatgttacccaggctggtctcgaactcctgagctcaagcaatcctcccatctcagcctaccaaaatgctgggatcacaggcatgagccaccgcccccagttctcaacctctctttaagaaaaccaaggctgggccggacacagtggctcacgcctataatcccagcactttgggaggccaaggcaggcagatcacttgaggtgaggagttggagacaagcctggcccacatggtgaaaccccatctctactaaaaaaacaaaaaaattggggccaggtgccatggctcacgcctgtaatcctagcactttgggaggccgaggcgggtggatcacaaggtcaggagattgagaccattctggctaatgtggtgaaaccccacatctactaaaaatacaaaaaaaaattagccgggcatggtggcgggcgcctgtagtcccagctacttgggaggctgaggcaggagaatggcgtgaacccgggaggcagagcttgcagtgagctgagatcacgccactgcactccagcctgggtgacagagcgagactccatctgaaaaaaaaaaaaaaaattagctggatatggtggtgcacgcccatgatcccagctacttggaaggctgaggcacaagaattgcttgaacctgggaggcagaggctacagtgagcggagatcacgccactgcactccagcctgggcgacagagcaagactctgtctccaaaaaaaagaaagaaagaaaagaaaaaaaaaaccaaggtccagagcaattcactaacttacccaaagcagggccgctagagatggttgtgcacattactccctacatagggatgtctggccaaggatccacactccactggccgtgctgtgtacccgcccagcagcatcacccaacccagagagtgcgccttttccactctacatgaaggtgctctgtggacttactgtaaacagcctcctcagtagtcagtcagtagtagagacagaatccaaacccaggtctgattccaaagcctctgttttgtttctgttttctgtttgtttttttttgagacagggtcttgctctgtcactcaggatggaatgcagtagtgttgtgatcatagcttactgcagcctcgaactcctgggctcaaatgatccaaagcattgggattacaggcatgagccaccatacccagccagccaaagcctctgtttttgcccatatcacactcattctcctccagaagacaagggccatatctggttaatctcctgctgttccactcaatgcctggctcatcataggtgggcagtaaatgcttatcagtgagtaactggagaacaacatggcccttccttataggccaaaaagcaaatggatttccacctgacaaatcttcgggatccaagaagcagaaacaatatcagcggattcggaaggagaagcctcaacaacacaacttcacccaccgcctcctggctgcagctctgaaggtacgtggggtacctggcacagcgtgcaccctgagactcagccccacaggcttttcctctggagtattccatgcatgttacaggctctcctgcctctgatcagaatcagcgggggtgcttaattctgtcccctctcatcgcagcccaatctcagcttgctgttaatccaggccacagggccccatctccccggctccaggtttggcttccccatctcccccaggagctcctattgacacttcctgccacccttcccctagagccacagcgggaacatatcttgcatggactttagcagcaatggcaaatacctggctacctgtgcagatgatcgcaccatccgcatctggagcaccaaggacttcctgcagcgagagcaccgcagcatgagagccaacgtggagctggaccacgccaccctggtgcgcttcagccctgactgcaggtgggacaagacggagcctcaggtttgcctgcagaggcctagtcccaggctttggccttcccatatctgctttgaggtagtgaggagggacctggacccagggcctcccttggggtgccagaaagagcatccacatagtttgcgcgctgcctggggctccctggagatctgggctgctatacagcaaggaaacagggggaggtctcttcctacctggaaataccttggcctggcttccagatgagccttagtttctaaaccctagagagaaactaaaggagccaaagctatcagaatcttaccttttgaggagttttatgagatttggaaccaggggcttaagttttaaggctagactgtggggcatgaggagagatcttgacttccccgagaacccagcacaggacctggaacacagagcctctttgtccagtgagagcgtgacttgtctgctgcctgtctctagagccttcatcgtctggctggccaacggggacaccctccgtgtcttcaagatgaccaagcgggaggatgggggctacaccttcacagccaccccagaggacttccctaaaaagcacaaggcgcctgtcatcgacattggcattgctaacacaggtaagaggcattcagagggtggcgcctgcccaaagcatgaaggaaagatccagttctatttcctcaatgagttaatgctgcctgaaagttctgctcaacctgagaggaacaaggggtccctggctctgaacagcctggctctgtgctcccctggagtccctgggccacaccaggtccctagggaaggtggggaagggccacagtcttcagcagagtccttatctgtagtgacccttggcctgggaggagacatgtatacttcgggcagcagaggccttgtaagtgtctttggagagtgacagttggtcaggtcactgcccgtgacccacatcactcccttcccgctcagggaagtttatcatgactgcctccagtgacaccactgtcctcatctggagcctgaagggtcaagtgctgtctaccatcaacaccaaccagatgaacaacacacacgctgctgtatctccctgtggcaggtgggcaaggaggggtattggcgtctgggaccacgagaggctggggctggggagcaggcacagaacagagagccagcttcatcgcgtgggaagagcatacggggtggggtcaggaacccgagcttcaagtctcagctctccccacttgcagtagtgggatttcatgcaggtcgccccatgtccttagtcgctatttcttcatcttcagtgtttttgttttttagaaaattagtctcactctgtcacccaggctggagcacagtggtgcgatcatagctcactgcagcctcaaactcctgggttgtagctattctcccagctcagcctcctgagtagtcaggactataggcatgtgccactgtactcagctaatttttgttttttgtttgtttgtttgttgagacggtttcaccctcgcccaggcaggagtgcagtggcgcaatcacagctcactgtagccttgacttcccaggctcagaccatcctcccaccttagcctcccgagtagctgggactacaggcgtgcactaccacacctggctaatttttgtattttttgttgagatggggtcttactatgttgcccaggctggtcctgaactcctggcctcaagtgatcctcttgcctcgacctcccaaagtggtagaattacaggcgtgagccactgtgccaagccacctttgggcggggatgttacatatcttagaacaaggctagaagataaactgaggtcacatacataaaagaacttttttgttgtggttgtttgtttgttttttgagatggagtttcgctcttgttgcttaggttggagtgcaatggcaggatcttggctcaccacaacctccgtctcccgggttcaagcgattctcctgcctcagcctcccccaagtagctgggattacaggcatgcaccaccatgcccagctaattttttatttttagtagaggtgaggtttctccatgttggtcaggctggtctcaaactgtcggaccttaggtgagctgcccgcctgggcctcccaaagtgctgggattacaggtatgagccaccacacccggcctttttttttttttttttctgagacagtctcactctgttgcccaggctggagtgcagtggtgcaatctcaatctcagctcactgcaacctccacctaccaggttcaagtgattctcccacctcagccttcccagtaggtgggactacaggcatgcgccaccacgcctggctaattttgtatttttagtagagatgaggtttcaccatgttggccaggctggtctcgaactcctgacctcaggtgatccacccacctcggcctcccaaagtgctgggatgacaggcgtgagccaccgcgcccggccaaaataactctttaaaggtttatattatccagatatgaggattatcaactttctcaggaaagagattgaggggttttacaggaacaacatgctccgaaaatgaagttttaaaggcttctgggttgtatggcagatttgtagcctcgtgtggcttcaccccagatgtgaaggtttgggaagtctgctttggaaagaagggggagttccaggaggtggtgcgagccttcgaactaaagggccactccgcggctgtgcactcgtttgctttctccaacgactcacggaggtgagtgaatccgctctgatgtctgaccagtggctcttggcccctcttgacaaccagggtccttctgtctgtttgtgccatggctctgaagagggtggggtgcctggccctcggcaggaagctgacttagcttcctagctggagctgctcaagttgggccagtgcttaccctgccagggtgtgttggggcttgagctgtgattttctgtgttgcaggatggcttctgtctccaaggatggtacatggaaactgtgggacacagatgtggaatacaagaagaagcaggacccctacttgctgaagacaggccgctttgaagaggcggcgggtgccgcgccgtgccgcctggccctctcccccaacgcccaggtcttggccttggccagtggcagtagtattcatctctacaatacccggcggggcgagaaggaggagtgctttgagcgggtccatggcgagtgtatcgccaacttgtcctttgacatcactggccgctttctggcctcctgtggggaccgggcggtgcggctgtttcacaacactcctggccaccgagccatggtggaggagatgcagggccacctgaagcgggcctccaacgagagcacccgccagaggctgcagcagcagctgacccaggcccaagagaccctgaagagcctgggtgccctgaagaagtgactctgggagggcccggcgcagaggattgaggaggagggatctggcctcctcatggcactgctgccatctttcctcccaggtggaagcctttcagaaggagtctcctggttttcttactggtggccctgcttcttcccattgaaactactcttgtctacttaggtctctctcttcttgctggctgtgactcctccctgactagtggccaaggtgcttttcttcctcccaggcccagtgggtggaatctgtccccacctggcactgaggagaatggtagagaggagaggagagagagagagaatgtgatttttggccttgtggcagcacatcctcacacccaaagaagtttgtaaatgttccagaacaacctagagaacacctgagtactaagcagcagttttgcaaggatgggagactgggatagcttcccatcacagaactgtgttccatcaaaaagacactaagggatttccttctgggcctcagttctatttgtaagatggagaataatcctctctgtgaactccttgcaaagatgatatgaggctaagagaatatcaagtccccaggtctggaagaaaagtagaaaagagtagtactattgtccaatgtcatgaaagtggtaaaagtgggaaccagtgtgctttgaaaccaaattagaaacacattccttgggaaggcaaagttttctgggacttgatcatacattttatatggttgggacttctctcttcgggagatgatatcttgtttaaggagacctcttttcagttcatcaagttcatcagatatttgagtgcccactctgtgcccaaataaatatgagctggggattaaatacgaataa

SEQ ID NO: 14461 - DNA, 2358 bp, Homo sapiens
agagacggggacccgccttgccgggttaggcgcacctcctggggcgggactggctccaacctgggccccttactgcggctttctctgtggccgaggccaggccgtccccggggtggccaggagagcaccgtaaactcttcagcctgctccgtggccgcgatctcggaaaaagcaccaattctgtgatgtgcagcagcatttactgggcatctatgaccctgtgataggctttggggtctttttctgtaaggagtccagtaaaggagaagtacatctgtattatgaacacctaaatatgccaaaaagcaaatggatttccacctgacaaatcttcgggatccaagaagcagaaacaatatcagcggattcggaaggagaagcctcaacaacacaacttcacccaccgcctcctggctgcagctctgaagagccacagcgggaacatatcttgcatggactttagcagcaatggcaaatacctggctacctgtgcagatgatcgcaccatccgcatctggagcaccaaggacttcctgcagcgagagcaccgcagcatgagagccaacgtggagctggaccacgccaccctggtgcgcttcagccctgactgcagagccttcatcgtctggctggccaacggggacaccctccgtgtcttcaagatgaccaagcgggaggatgggggctacaccttcacagccaccccagaggacttccctaaaaagcacaaggcgcctgtcatcgacattggcattgctaacacagggaagtttatcatgactgcctccagtgacaccactgtcctcatctggagcctgaagggtcaagtgctgtctaccatcaacaccaaccagatgaacaacacacacgctgctgtatctccctgtggcagatttgtagcctcgtgtggcttcaccccagatgtgaaggtttgggaagtctgctttggaaagaagggggagttccaggaggtggtgcgagccttcgaactaaagggccactccgcggctgtgcactcgtttgctttctccaacgactcacggaggatggcttctgtctccaaggatggtacatggaaactgtgggacacagatgtggaatacaagaagaagcaggacccctacttgctgaagacaggccgctttgaagaggcggcgggtgccgcgccgtgccgcctggccctctcccccaacgcccaggtcttggccttggccagtggcagtagtattcatctctacaatacccggcggggcgagaaggaggagtgctttgagcgggtccatggcgagtgtatcgccaacttgtcctttgacatcactggccgctttctggcctcctgtggggaccgggcggtgcggctgtttcacaacactcctggccaccgagccatggtggaggagatgcagggccacctgaagcgggcctccaacgagagcacccgccagaggctgcagcagcagctgacccaggcccaagagaccctgaagagcctgggtgccctgaagaagtgactctgggagggcccggcgcagaggattgaggaggagggatctggcctcctcatggcactgctgccatctttcctcccaggtggaagcctttcagaaggagtctcctggttttcttactggtggccctgcttcttcccattgaaactactcttgtctacttaggtctctctcttcttgctggctgtgactcctccctgactagtggccaaggtgcttttcttcctcccaggcccagtgggtggaatctgtccccacctggcactgaggagaatggtagagaggagaggagagagagagagaatgtgatttttggccttgtggcagcacatcctcacacccaaagaagtttgtaaatgttccagaacaacctagagaacacctgagtactaagcagcagttttgcaaggatgggagactgggatagcttcccatcacagaactgtgttccatcaaaaagacactaagggatttccttctgggcctcagttctatttgtaagatggagaataatcctctctgtgaactccttgcaaagatgatatgaggctaagagaatatcaagtccccaggtctggaagaaaagtagaaaagagtagtactattgtccaatgtcatgaaagtggtaaaagtgggaaccagtgtgctttgaaaccaaattagaaacacattccttgggaaggcaaagttttctgggacttgatcatacattttatatggttgggacttctctcttcgggagatgatatcttgtttaaggagacctcttttcagttcatcaagttcatcagatatttgagtgcccactctgtgcccaaataaatatgagctggggattaaatacgaataa

SEQ ID NO: 14462 - DNA, 4947 bp, Homo sapiens
ggtttgggcccgcggctggtggggcccggcgactccatgggcctcagtttctcctctggtaacgtgagcttcgcttccagagacggggacccgccttgccgggttaggcgcacctcctggggcgggactggctccaacctgggccccttactgcggctttctctgtggccgaggccaggccgtccccggggtggccaggagagcaccgtaaactcttcagcctgctccgtggccgcgatctcggaaaaagcaccaattctgtgatgtgcagcagcatttactgggcatctatgaccctgtgataggctttggggtctttttctgtaaggagtccagtaaaggagaagtacatctgtattatgaacacctaaatatgtaagtgaaaaacacggtgaaataagtttcactgaggccaggcgaagtggctcacgcctgtattcccagcactttgggaggccgaggcagggagatcgcttgagcccaggagtttgggaccagcctgagcaacatagcaagaccccatctctacgcaaaattagctgggtgtggttgtgcacgcccctgtagtcccagctccatgggaggccgaggcaggagggtgtcgtgagtccaggaattcaaggctgcagtgagttgtgatagatcgcgccactgtacttcagcctgggtgacggcaagagcctgtctctgaaaagtttcatagaagaggttagtactagaaatgggaaacaccagagagtcagtgggcagccctgctctttttatttatttttcagacagagtttcgctcttcttgcccaggctggagtgcagtggcacaatcttggctcgttgcaacttccgcctgccaggttcaagcgattcttctgcctctgcctcccgagtagctgggactacaggcacacaccaccacgcctggctaatttttgtatatttagtagacggggtttcgccacgttggtcaggctggtctcgaacgcctgatctcaggtgatccactcgtcctggcctccaaaagtgctgagattacaggcgtgaaccactgtgcccggccagccctgcattttttttttttttttttttgcagggggacggagttttgctctgtcgcccaatctggagtctagtggcgggatctcggctcactgcaagctccgcctctgggttcacgccattctcctgcctcagcctcctgagtagctgggactacaggcgtccgacaccacacccggctaattttttgtattttttgagtagagacggggtttcactgtgttagccaggatggtctcaatctcctaacctcttgtgatccacctgcctcggcctcccaaagtgctgggattacaggcgtgagccaccctgcctggccgagtcctgttcttttatgggggaggtggttgttagggaaatcattactgagaatagggggcacatgaggtagtgtggggtctcaaaggatggttctagaagaagagtttgccagaaggccaaggaaaaaagacattcctgccaatggcaatacccgagaaggcaaggagtccccaaacagcatttggtatgacttaagtgtgaggaggggggcttgttagacatgcctggagagaaggaagcagaggacagattgtggctgtgtttgtttgcagggcccaggagcttttttcctgttggaattggggagcatctgcagtcatttaccacatgccagctttgtgactcaattaagtatcttttacaaaagtgactggctccactcccccgcacaggactcaacagatgttgacttctcatccccgagttctttcaggtactggagtgcagtggtgcgatcttggcttactgcaacctctacctcctgggttcaagtgattctcctgcctcagcctcctgagtagctgggattacaggcgcctgccaccacgcccggctaatttttgtatttttagtagagacggggtttcaccatgttggccagactggtggaactcctgggcatcaagatgatccagctgccgggccgggcatggtgactcacgcctgtaatcccagcactttgggaggccgaagcgggcaggtcacaaggtcaggagatcgagactgaggcaacagagcgagactctgtatcaaacaaaaaaaaaaaatgatccagcagctgcctcagcctcccaaagcgctgggattacaggcatgagccaccgcacccggcctccatagagcctttaatgcttgtgttcggtacttttgcttgtcactttgtagatatctcatccaattcaatctcccttatttttatttatttatttatttatttattttgagacagaatctcactctgtcgcctaggctggaatacagtggcacgatcactgcatttgaactcctgggctcaagcaattttccctcctcagcctccgaatagctgggaccacaggcgcacaccaccatgcccagctaattaaagttttctgtagagatggggtgtcactatgttacccaggctggtctcgaactcctgagctcaagcaatcctcccatctcagcctaccaaaatgctgggatcacaggcatgagccaccgcccccagttctcaacctctctttaagaaaaccaaggctgggccggacacagtggctcacgcctataatcccagcactttgggaggccaaggcaggcagatcacttgaggtgaggagttggagacaagcctggcccacatggtgaaaccccatctctactaaaaaaacaaaaaaattggggccaggtgccatggctcacgcctgtaatcctagcactttgggaggccgaggcgggtggatcacaaggtcaggagattgagaccattctggctaatgtggtgaaaccccacatctactaaaaatacaaaaaaaaattagccgggcatggtggcgggcgcctgtagtcccagctacttgggaggctgaggcaggagaatggcgtgaacccgggaggcagagcttgcagtgagctgagatcacgccactgcactccagcctgggtgacagagcgagactccatctgaaaaaaaaaaaaaaaattagctggatatggtggtgcacgcccatgatcccagctacttggaaggctgaggcacaagaattgcttgaacctgggaggcagaggctacagtgagcggagatcacgccactgcactccagcctgggcgacagagcaagactctgtctccaaaaaaaagaaagaaagaaaagaaaaaaaaaaccaaggtccagagcaattcactaacttacccaaagcagggccgctagagatggttgtgcacattactccctacatagggatgtctggccaaggatccacactccactggccgtgctgtgtacccgcccagcagcatcacccaacccagagagtgcgccttttccactctacatgaaggtgctctgtggacttactgtaaacagcctcctcagtagtcagtcagtagtagagacagaatccaaacccaggtctgattccaaagcctctgttttgtttctgttttctgtttgtttttttttgagacagggtcttgctctgtcactcaggatggaatgcagtagtgttgtgatcatagcttactgcagcctcgaactcctgggctcaaatgatccaaagcattgggattacaggcatgagccaccatacccagccagccaaagcctctgtttttgcccatatcacactcattctcctccagaagacaagggccatatctggttaatctcctgctgttccactcaatgcctggctcatcataggtgggcagtaaatgcttatcagtgagtaactggagaacaacatggcccttccttataggccaaaaagcaaatggatttccacctgacaaatcttcgggatccaagaagcagaaacaatatcagcggattcggaaggagaagcctcaacaacacaacttcacccaccgcctcctggctgcagctctgaaggtacgtggggtacctggcacagcgtgcaccctgagactcagccccacaggcttttcctctggagtattccatgcatgttacaggctctcctgcctctgatcagaatcagcgggggtgcttaattctgtcccctctcatcgcagcccaatctcagcttgctgttaatccaggccacagggccccatctccccggctccaggtttggcttccccatctcccccaggagctcctattgacacttcctgccacccttcccctagagccacagcgggaacatatcttgcatggactttagcagcaatggcaaatacctggctacctgtgcagatgatcgcaccatccgcatctggagcaccaaggacttcctgcagcgagagcaccgcagcatgagagccaacgtggagctggaccacgccaccctggtgcgcttcagccctgactgcaggtgggacaagacggagcctcaggtttgcctgcagaggcctagtcccaggctttggccttcccatatctgctttgaggtagtgaggagggacctggacccagggcctcccttggggtgccagaaagagcatccacatagtttgcgcgctgcctggggctccctggagatctgggctgctatacagcaaggaaacagggggaggtctcttcctacctggaaataccttggcctggcttccagatgagccttagtttctaaaccctagagagaaactaaaggagccaaagctatcagaatcttaccttttgaggagttttatgagatttggaaccaggggcttaagttttaaggctagactgtggggcatgaggagagatcttgacttccccgagaacccagcacaggacctggaacacagagcctctttgtccagtgagagcgtgacttgtctgctgcctgtctctagagccttcatcgtctggctggccaacggggacaccctccgtgtcttcaagatgaccaagcgggaggatgggg

SEQ ID NO: 14463 - DNA, 762 bp, Homo sapiens
ggtttgggcccgcggctggtggggcccggcgactccatgggcctcagtttctcctctggtaacgtgagcttcgcttccagagacggggacccgccttgccgggttaggcgcacctcctggggcgggactggctccaacctgggccccttactgcggctttctctgtggccgaggccaggccgtccccggggtggccaggagagcaccgtaaactcttcagcctgctccgtggccgcgatctcggaaaaagcaccaattctgtgatgtgcagcagcatttactgggcatctatgaccctgtgataggctttggggtctttttctgtaaggagtccagtaaaggagaagtacatctgtattatgaacacctaaatatgccaaaaagcaaatggatttccacctgacaaatcttcgggatccaagaagcagaaacaatatcagcggattcggaaggagaagcctcaacaacacaacttcacccaccgcctcctggctgcagctctgaagagccacagcgggaacatatcttgcatggactttagcagcaatggcaaatacctggctacctgtgcagatgatcgcaccatccgcatctggagcaccaaggacttcctgcagcgagagcaccgcagcatgagagccaacgtggagctggaccacgccaccctggtgcgcttcagccctgactgcagagccttcatcgtctggctggccaacggggacaccctccgtgtcttcaagatgaccaagcgggaggatgggg

SEQ ID NO: 14464 - DNA, 3873 bp, Homo sapiens
gactccatgggcctcagtttctcctctggtaacgtgagcttcgcttccagagacggggacccgccttgccgggttaggcgcacctcctggggcgggactggctccaacctgggccccttactgcggctttctctgtggccgaggccaggccgtccccggggtggccaggagagcaccgtaaactcttcagcctgctccgtggccgcgatctcggaaaaagcaccaattctgtgatgtgcagcagcatttactgggcatctatgaccctgtgataggctttggggtctttttctgtaaggagtccagtaaaggagaagtacatctgtattatgaacacctaaatatgtaagtgaaaaacacggtgaaataagtttcactgaggccaggcgaagtggctcacgcctgtattcccagcactttgggaggccgaggcagggagatcgcttgagcccaggagtttgggaccagcctgagcaacatagcaagaccccatctctacgcaaaattagctgggtgtggttgtgcacgcccctgtagtcccagctccatgggaggccgaggcaggagggtgtcgtgagtccaggaattcaaggctgcagtgagttgtgatagatcgcgccactgtacttcagcctgggtgacggcaagagcctgtctctgaaaagtttcatagaagaggttagtactagaaatgggaaacaccagagagtcagtgggcagccctgctctttttatttatttttcagacagagtttcgctcttcttgcccaggctggagtgcagtggcacaatcttggctcgttgcaacttccgcctgccaggttcaagcgattcttctgcctctgcctcccgagtagctgggactacaggcacacaccaccacgcctggctaatttttgtatatttagtagacggggtttcgccacgttggtcaggctggtctcgaacgcctgatctcaggtgatccactcgtcctggcctccaaaagtgctgagattacaggcgtgaaccactgtgcccggccagccctgcattttttttttttttttttttgcagggggacggagttttgctctgtcgcccaatctggagtctagtggcgggatctcggctcactgcaagctccgcctctgggttcacgccattctcctgcctcagcctcctgagtagctgggactacaggcgtccgacaccacacccggctaattttttgtattttttgagtagagacggggtttcactgtgttagccaggatggtctcaatctcctaacctcttgtgatccacctgcctcggcctcccaaagtgctgggattacaggcgtgagccaccctgcctggccgagtcctgttcttttatgggggaggtggttgttagggaaatcattactgagaatagggggcacatgaggtagtgtggggtctcaaaggatggttctagaagaagagtttgccagaaggccaaggaaaaaagacattcctgccaatggcaatacccgagaaggcaaggagtccccaaacagcatttggtatgacttaagtgtgaggaggggggcttgttagacatgcctggagagaaggaagcagaggacagattgtggctgtgtttgtttgcagggcccaggagcttttttcctgttggaattggggagcatctgcagtcatttaccacatgccagctttgtgactcaattaagtatcttttacaaaagtgactggctccactcccccgcacaggactcaacagatgttgacttctcatccccgagttctttcaggtactggagtgcagtggtgcgatcttggcttactgcaacctctacctcctgggttcaagtgattctcctgcctcagcctcctgagtagctgggattacaggcgcctgccaccacgcccggctaatttttgtatttttagtagagacggggtttcaccatgttggccagactggtggaactcctgggcatcaagatgatccagctgccgggccgggcatggtgactcacgcctgtaatcccagcactttgggaggccgaagcgggcaggtcacaaggtcaggagatcgagactgaggcaacagagcgagactctgtatcaaacaaaaaaaaaaaatgatccagcagctgcctcagcctcccaaagcgctgggattacaggcatgagccaccgcacccggcctccatagagcctttaatgcttgtgttcggtacttttgcttgtcactttgtagatatctcatccaattcaatctcccttatttttatttatttatttatttatttattttgagacagaatctcactctgtcgcctaggctggaatacagtggcacgatcactgcatttgaactcctgggctcaagcaattttccctcctcagcctccgaatagctgggaccacaggcgcacaccaccatgcccagctaattaaagttttctgtagagatggggtgtcactatgttacccaggctggtctcgaactcctgagctcaagcaatcctcccatctcagcctaccaaaatgctgggatcacaggcatgagccaccgcccccagttctcaacctctctttaagaaaaccaaggctgggccggacacagtggctcacgcctataatcccagcactttgggaggccaaggcaggcagatcacttgaggtgaggagttggagacaagcctggcccacatggtgaaaccccatctctactaaaaaaacaaaaaaattggggccaggtgccatggctcacgcctgtaatcctagcactttgggaggccgaggcgggtggatcacaaggtcaggagattgagaccattctggctaatgtggtgaaaccccacatctactaaaaatacaaaaaaaaattagccgggcatggtggcgggcgcctgtagtcccagctacttgggaggctgaggcaggagaatggcgtgaacccgggaggcagagcttgcagtgagctgagatcacgccactgcactccagcctgggtgacagagcgagactccatctgaaaaaaaaaaaaaaaattagctggatatggtggtgcacgcccatgatcccagctacttggaaggctgaggcacaagaattgcttgaacctgggaggcagaggctacagtgagcggagatcacgccactgcactccagcctgggcgacagagcaagactctgtctccaaaaaaaagaaagaaagaaaagaaaaaaaaaaccaaggtccagagcaattcactaacttacccaaagcagggccgctagagatggttgtgcacattactccctacatagggatgtctggccaaggatccacactccactggccgtgctgtgtacccgcccagcagcatcacccaacccagagagtgcgccttttccactctacatgaaggtgctctgtggacttactgtaaacagcctcctcagtagtcagtcagtagtagagacagaatccaaacccaggtctgattccaaagcctctgttttgtttctgttttctgtttgtttttttttgagacagggtcttgctctgtcactcaggatggaatgcagtagtgttgtgatcatagcttactgcagcctcgaactcctgggctcaaatgatccaaagcattgggattacaggcatgagccaccatacccagccagccaaagcctctgtttttgcccatatcacactcattctcctccagaagacaagggccatatctggttaatctcctgctgttccactcaatgcctggctcatcataggtgggcagtaaatgcttatcagtgagtaactggagaacaacatggcccttccttataggccaaaaagcaaatggatttccacctgacaaatcttcgggatccaagaagcagaaacaatatcagcgga

SEQ ID NO: 14465 - DNA, 575 bp, Homo sapiens
gactccatgggcctcagtttctcctctggtaacgtgagcttcgcttccagagacggggacccgccttgccgggttaggcgcacctcctggggcgggactggctccaacctgggccccttactgcggctttctctgtggccgaggccaggccgtccccggggtggccaggagagcaccgtaaactcttcagcctgctccgtggccgcgatctcggaaaaagcaccaattctgtgatgtgcagcagcatttactgggcatctatgaccctgtgataggctttggggtctttttctgtaaggagtccagtaaaggagaagtacatctgtattatgaacacctaaatatggcccaggagcttttttcctgttggaattggggagcatctgcagtcatttaccacatgccagctttgtgactcaattaagtatcttttacaaaagtgactggctccactcccccgcacaggactcaacagatgttgacttctcatccccgagttctttcaggccaaaaagcaaatggatttccacctgacaaatcttcgggatccaagaagcagaaacaatatcagcgga

SEQ ID NO: 14466 - DNA, 2870 bp, Homo sapiens
tggagagaaggaagcagaggacagattgtggctgtgtttgtttgcagggcccaggagcttttttcctgttggaattggggagcatctgcagtcatttaccacatgccagctttgtgactcaattaagtatcttttacaaaagtgactggctccactcccccgcacaggactcaacagatgttgacttctcatccccgagttctttcaggtactggagtgcagtggtgcgatcttggcttactgcaacctctacctcctgggttcaagtgattctcctgcctcagcctcctgagtagctgggattacaggcgcctgccaccacgcccggctaatttttgtatttttagtagagacggggtttcaccatgttggccagactggtggaactcctgggcatcaagatgatccagctgccgggccgggcatggtgactcacgcctgtaatcccagcactttgggaggccgaagcgggcaggtcacaaggtcaggagatcgagactgaggcaacagagcgagactctgtatcaaacaaaaaaaaaaaatgatccagcagctgcctcagcctcccaaagcgctgggattacaggcatgagccaccgcacccggcctccatagagcctttaatgcttgtgttcggtacttttgcttgtcactttgtagatatctcatccaattcaatctcccttatttttatttatttatttatttatttattttgagacagaatctcactctgtcgcctaggctggaatacagtggcacgatcactgcatttgaactcctgggctcaagcaattttccctcctcagcctccgaatagctgggaccacaggcgcacaccaccatgcccagctaattaaagttttctgtagagatggggtgtcactatgttacccaggctggtctcgaactcctgagctcaagcaatcctcccatctcagcctaccaaaatgctgggatcacaggcatgagccaccgcccccagttctcaacctctctttaagaaaaccaaggctgggccggacacagtggctcacgcctataatcccagcactttgggaggccaaggcaggcagatcacttgaggtgaggagttggagacaagcctggcccacatggtgaaaccccatctctactaaaaaaacaaaaaaattggggccaggtgccatggctcacgcctgtaatcctagcactttgggaggccgaggcgggtggatcacaaggtcaggagattgagaccattctggctaatgtggtgaaaccccacatctactaaaaatacaaaaaaaaattagccgggcatggtggcgggcgcctgtagtcccagctacttgggaggctgaggcaggagaatggcgtgaacccgggaggcagagcttgcagtgagctgagatcacgccactgcactccagcctgggtgacagagcgagactccatctgaaaaaaaaaaaaaaaattagctggatatggtggtgcacgcccatgatcccagctacttggaaggctgaggcacaagaattgcttgaacctgggaggcagaggctacagtgagcggagatcacgccactgcactccagcctgggcgacagagcaagactctgtctccaaaaaaaagaaagaaagaaaagaaaaaaaaaaccaaggtccagagcaattcactaacttacccaaagcagggccgctagagatggttgtgcacattactccctacatagggatgtctggccaaggatccacactccactggccgtgctgtgtacccgcccagcagcatcacccaacccagagagtgcgccttttccactctacatgaaggtgctctgtggacttactgtaaacagcctcctcagtagtcagtcagtagtagagacagaatccaaacccaggtctgattccaaagcctctgttttgtttctgttttctgtttgtttttttttgagacagggtcttgctctgtcactcaggatggaatgcagtagtgttgtgatcatagcttactgcagcctcgaactcctgggctcaaatgatccaaagcattgggattacaggcatgagccaccatacccagccagccaaagcctctgtttttgcccatatcacactcattctcctccagaagacaagggccatatctggttaatctcctgctgttccactcaatgcctggctcatcataggtgggcagtaaatgcttatcagtgagtaactggagaacaacatggcccttccttataggccaaaaagcaaatggatttccacctgacaaatcttcgggatccaagaagcagaaacaatatcagcggattcggaaggagaagcctcaacaacacaacttcacccaccgcctcctggctgcagctctgaaggtacgtggggtacctggcacagcgtgcaccctgagactcagccccacaggcttttcctctggagtattccatgcatgttacaggctctcctgcctctgatcagaatcagcgggggtgcttaattctgtcccctctcatcgcagcccaatctcagcttgctgttaatccaggccacagggccccatctccccggctccaggtttggcttccccatctcccccaggagctcctattgacacttcctgccacccttcccctagagccacagcgggaacatatcttgcatggactttagcagcaatggcaaatacctggctacctgtgcagatgatcgcaccatccgcatctggagcaccaaggacttcctgcagcgagagcaccgcagcatgagagccaacgtggagctggaccacgccaccctggtgcgcttcagccctgactgcaggtgggacaagacggagcctcaggtttgcctgcagaggcctagtcccaggctttggcctt

SEQ ID NO: 14467 - DNA, 583 bp, Homo sapiens
tggagagaaggaagcagaggacagattgtggctgtgtttgtttgcagggcccaggagcttttttcctgttggaattggggagcatctgcagtcatttaccacatgccagctttgtgactcaattaagtatcttttacaaaagtgactggctccactcccccgcacaggactcaacagatgttgacttctcatccccgagttctttcaggccaaaaagcaaatggatttccacctgacaaatcttcgggatccaagaagcagaaacaatatcagcggattcggaaggagaagcctcaacaacacaacttcacccaccgcctcctggctgcagctctgaagagccacagcgggaacatatcttgcatggactttagcagcaatggcaaatacctggctacctgtgcagatgatcgcaccatccgcatctggagcaccaaggacttcctgcagcgagagcaccgcagcatgagagccaacgtggagctggaccacgccaccctggtgcgcttcagccctgactgcaggtgggacaagacggagcctcaggtttgcctgcagaggcctagtcccaggctttggcctt

SEQ ID NO: 14468 - DNA, 5079 bp, Homo sapiens
gtaagtggggccgggtcgggtgggggcggcccgcggtgtcccggctcccggcctcctcgtggtccgacctgcggtttgggcccgcggctggtggggcccggcgactccatgggcctcagtttctcctctggtaacgtgagcttcgcttccagagacggggacccgccttgccgggttaggcgcacctcctggggcgggactggctccaacctgggccccttactgcggctttctctgtggccgaggccaggccgtccccggggtggccaggagagcaccgtaaactcttcagcctgctccgtggccgcgatctcggaaaaagcaccaattctgtgatgtgcagcagcatttactgggcatctatgaccctgtgataggctttggggtctttttctgtaaggagtccagtaaaggagaagtacatctgtattatgaacacctaaatatgtaagtgaaaaacacggtgaaataagtttcactgaggccaggcgaagtggctcacgcctgtattcccagcactttgggaggccgaggcagggagatcgcttgagcccaggagtttgggaccagcctgagcaacatagcaagaccccatctctacgcaaaattagctgggtgtggttgtgcacgcccctgtagtcccagctccatgggaggccgaggcaggagggtgtcgtgagtccaggaattcaaggctgcagtgagttgtgatagatcgcgccactgtacttcagcctgggtgacggcaagagcctgtctctgaaaagtttcatagaagaggttagtactagaaatgggaaacaccagagagtcagtgggcagccctgctctttttatttatttttcagacagagtttcgctcttcttgcccaggctggagtgcagtggcacaatcttggctcgttgcaacttccgcctgccaggttcaagcgattcttctgcctctgcctcccgagtagctgggactacaggcacacaccaccacgcctggctaatttttgtatatttagtagacggggtttcgccacgttggtcaggctggtctcgaacgcctgatctcaggtgatccactcgtcctggcctccaaaagtgctgagattacaggcgtgaaccactgtgcccggccagccctgcattttttttttttttttttttgcagggggacggagttttgctctgtcgcccaatctggagtctagtggcgggatctcggctcactgcaagctccgcctctgggttcacgccattctcctgcctcagcctcctgagtagctgggactacaggcgtccgacaccacacccggctaattttttgtattttttgagtagagacggggtttcactgtgttagccaggatggtctcaatctcctaacctcttgtgatccacctgcctcggcctcccaaagtgctgggattacaggcgtgagccaccctgcctggccgagtcctgttcttttatgggggaggtggttgttagggaaatcattactgagaatagggggcacatgaggtagtgtggggtctcaaaggatggttctagaagaagagtttgccagaaggccaaggaaaaaagacattcctgccaatggcaatacccgagaaggcaaggagtccccaaacagcatttggtatgacttaagtgtgaggaggggggcttgttagacatgcctggagagaaggaagcagaggacagattgtggctgtgtttgtttgcagggcccaggagcttttttcctgttggaattggggagcatctgcagtcatttaccacatgccagctttgtgactcaattaagtatcttttacaaaagtgactggctccactcccccgcacaggactcaacagatgttgacttctcatccccgagttctttcaggtactggagtgcagtggtgcgatcttggcttactgcaacctctacctcctgggttcaagtgattctcctgcctcagcctcctgagtagctgggattacaggcgcctgccaccacgcccggctaatttttgtatttttagtagagacggggtttcaccatgttggccagactggtggaactcctgggcatcaagatgatccagctgccgggccgggcatggtgactcacgcctgtaatcccagcactttgggaggccgaagcgggcaggtcacaaggtcaggagatcgagactgaggcaacagagcgagactctgtatcaaacaaaaaaaaaaaatgatccagcagctgcctcagcctcccaaagcgctgggattacaggcatgagccaccgcacccggcctccatagagcctttaatgcttgtgttcggtacttttgcttgtcactttgtagatatctcatccaattcaatctcccttatttttatttatttatttatttatttattttgagacagaatctcactctgtcgcctaggctggaatacagtggcacgatcactgcatttgaactcctgggctcaagcaattttccctcctcagcctccgaatagctgggaccacaggcgcacaccaccatgcccagctaattaaagttttctgtagagatggggtgtcactatgttacccaggctggtctcgaactcctgagctcaagcaatcctcccatctcagcctaccaaaatgctgggatcacaggcatgagccaccgcccccagttctcaacctctctttaagaaaaccaaggctgggccggacacagtggctcacgcctataatcccagcactttgggaggccaaggcaggcagatcacttgaggtgaggagttggagacaagcctggcccacatggtgaaaccccatctctactaaaaaaacaaaaaaattggggccaggtgccatggctcacgcctgtaatcctagcactttgggaggccgaggcgggtggatcacaaggtcaggagattgagaccattctggctaatgtggtgaaaccccacatctactaaaaatacaaaaaaaaattagccgggcatggtggcgggcgcctgtagtcccagctacttgggaggctgaggcaggagaatggcgtgaacccgggaggcagagcttgcagtgagctgagatcacgccactgcactccagcctgggtgacagagcgagactccatctgaaaaaaaaaaaaaaaattagctggatatggtggtgcacgcccatgatcccagctacttggaaggctgaggcacaagaattgcttgaacctgggaggcagaggctacagtgagcggagatcacgccactgcactccagcctgggcgacagagcaagactctgtctccaaaaaaaagaaagaaagaaaagaaaaaaaaaaccaaggtccagagcaattcactaacttacccaaagcagggccgctagagatggttgtgcacattactccctacatagggatgtctggccaaggatccacactccactggccgtgctgtgtacccgcccagcagcatcacccaacccagagagtgcgccttttccactctacatgaaggtgctctgtggacttactgtaaacagcctcctcagtagtcagtcagtagtagagacagaatccaaacccaggtctgattccaaagcctctgttttgtttctgttttctgtttgtttttttttgagacagggtcttgctctgtcactcaggatggaatgcagtagtgttgtgatcatagcttactgcagcctcgaactcctgggctcaaatgatccaaagcattgggattacaggcatgagccaccatacccagccagccaaagcctctgtttttgcccatatcacactcattctcctccagaagacaagggccatatctggttaatctcctgctgttccactcaatgcctggctcatcataggtgggcagtaaatgcttatcagtgagtaactggagaacaacatggcccttccttataggccaaaaagcaaatggatttccacctgacaaatcttcgggatccaagaagcagaaacaatatcagcggattcggaaggagaagcctcaacaacacaacttcacccaccgcctcctggctgcagctctgaaggtacgtggggtacctggcacagcgtgcaccctgagactcagccccacaggcttttcctctggagtattccatgcatgttacaggctctcctgcctctgatcagaatcagcgggggtgcttaattctgtcccctctcatcgcagcccaatctcagcttgctgttaatccaggccacagggccccatctccccggctccaggtttggcttccccatctcccccaggagctcctattgacacttcctgccacccttcccctagagccacagcgggaacatatcttgcatggactttagcagcaatggcaaatacctggctacctgtgcagatgatcgcaccatccgcatctggagcaccaaggacttcctgcagcgagagcaccgcagcatgagagccaacgtggagctggaccacgccaccctggtgcgcttcagccctgactgcaggtgggacaagacggagcctcaggtttgcctgcagaggcctagtcccaggctttggccttcccatatctgctttgaggtagtgaggagggacctggacccagggcctcccttggggtgccagaaagagcatccacatagtttgcgcgctgcctggggctccctggagatctgggctgctatacagcaaggaaacagggggaggtctcttcctacctggaaataccttggcctggcttccagatgagccttagtttctaaaccctagagagaaactaaaggagccaaagctatcagaatcttaccttttgaggagttttatgagatttggaaccaggggcttaagttttaaggctagactgtggggcatgaggagagatcttgacttccccgagaacccagcacaggacctggaacacagagcctctttgtccagtgagagcgtgacttgtctgctgcctgtctctagagccttcatcgtctggctggccaacggggacaccctccgtgtcttcaagatgaccaagcgggaggatgggggctacaccttcacagccaccccagaggacttccctaaaaagcacaaggcgcctgtcatcg

SEQ ID NO: 14469 - DNA, 559 bp, Homo sapiens
gtaagtggggccgggtcgggtgggggcggcccgcggtgtcccggctcccggcctcctcgtggtccgacctgcggtttgggcccgcggctggtggggcccggcgactccatgggcctcagtttctcctctggtaacgccaaaaagcaaatggatttccacctgacaaatcttcgggatccaagaagcagaaacaatatcagcggattcggaaggagaagcctcaacaacacaacttcacccaccgcctcctggctgcagctctgaagagccacagcgggaacatatcttgcatggactttagcagcaatggcaaatacctggctacctgtgcagatgatcgcaccatccgcatctggagcaccaaggacttcctgcagcgagagcaccgcagcatgagagccaacgtggagctggaccacgccaccctgagccttcatcgtctggctggccaacggggacaccctccgtgtcttcaagatgaccaagcgggaggatgggggctacaccttcacagccaccccagaggacttccctaaaaagcacaaggcgcctgtcatcg

SEQ ID NO: 14470 - DNA, 5449 bp, Homo sapiens
ccaggccccgcccctcgagcgccacaacagccgggccccaccccttgaggtgctttaacggccaggccccgccctgaaggcgttgtaacaaccaggctccgcccccaggcgctctaacggccaggcccagccgcttgaggctccccaacggccaggccgcgcccccgcgtgcgtgcgcggcccggcagagccgtgcgggcgcccgcgtactcactagctgaggtggcagtggttccaccaacatggagctctcgcagatgtcggagctcatggggctgtcggtgttgcttgggctgctggccctgatggcgacggcggcggtagcgcgggggtggctgcgcgcgggggaggagaggagcggccggcccgcctgtaagtggggccgggtcgggtgggggcggcccgcggtgtcccggctcccggcctcctcgtggtccgacctgcggtttgggcccgcggctggtggggcccggcgactccatgggcctcagtttctcctctggtaacgtgagcttcgcttccagagacggggacccgccttgccgggttaggcgcacctcctggggcgggactggctccaacctgggccccttactgcggctttctctgtggccgaggccaggccgtccccggggtggccaggagagcaccgtaaactcttcagcctgctccgtggccgcgatctcggaaaaagcaccaattctgtgatgtgcagcagcatttactgggcatctatgaccctgtgataggctttggggtctttttctgtaaggagtccagtaaaggagaagtacatctgtattatgaacacctaaatatgtaagtgaaaaacacggtgaaataagtttcactgaggccaggcgaagtggctcacgcctgtattcccagcactttgggaggccgaggcagggagatcgcttgagcccaggagtttgggaccagcctgagcaacatagcaagaccccatctctacgcaaaattagctgggtgtggttgtgcacgcccctgtagtcccagctccatgggaggccgaggcaggagggtgtcgtgagtccaggaattcaaggctgcagtgagttgtgatagatcgcgccactgtacttcagcctgggtgacggcaagagcctgtctctgaaaagtttcatagaagaggttagtactagaaatgggaaacaccagagagtcagtgggcagccctgctctttttatttatttttcagacagagtttcgctcttcttgcccaggctggagtgcagtggcacaatcttggctcgttgcaacttccgcctgccaggttcaagcgattcttctgcctctgcctcccgagtagctgggactacaggcacacaccaccacgcctggctaatttttgtatatttagtagacggggtttcgccacgttggtcaggctggtctcgaacgcctgatctcaggtgatccactcgtcctggcctccaaaagtgctgagattacaggcgtgaaccactgtgcccggccagccctgcattttttttttttttttttttgcagggggacggagttttgctctgtcgcccaatctggagtctagtggcgggatctcggctcactgcaagctccgcctctgggttcacgccattctcctgcctcagcctcctgagtagctgggactacaggcgtccgacaccacacccggctaattttttgtattttttgagtagagacggggtttcactgtgttagccaggatggtctcaatctcctaacctcttgtgatccacctgcctcggcctcccaaagtgctgggattacaggcgtgagccaccctgcctggccgagtcctgttcttttatgggggaggtggttgttagggaaatcattactgagaatagggggcacatgaggtagtgtggggtctcaaaggatggttctagaagaagagtttgccagaaggccaaggaaaaaagacattcctgccaatggcaatacccgagaaggcaaggagtccccaaacagcatttggtatgacttaagtgtgaggaggggggcttgttagacatgcctggagagaaggaagcagaggacagattgtggctgtgtttgtttgcagggcccaggagcttttttcctgttggaattggggagcatctgcagtcatttaccacatgccagctttgtgactcaattaagtatcttttacaaaagtgactggctccactcccccgcacaggactcaacagatgttgacttctcatccccgagttctttcaggtactggagtgcagtggtgcgatcttggcttactgcaacctctacctcctgggttcaagtgattctcctgcctcagcctcctgagtagctgggattacaggcgcctgccaccacgcccggctaatttttgtatttttagtagagacggggtttcaccatgttggccagactggtggaactcctgggcatcaagatgatccagctgccgggccgggcatggtgactcacgcctgtaatcccagcactttgggaggccgaagcgggcaggtcacaaggtcaggagatcgagactgaggcaacagagcgagactctgtatcaaacaaaaaaaaaaaatgatccagcagctgcctcagcctcccaaagcgctgggattacaggcatgagccaccgcacccggcctccatagagcctttaatgcttgtgttcggtacttttgcttgtcactttgtagatatctcatccaattcaatctcccttatttttatttatttatttatttatttattttgagacagaatctcactctgtcgcctaggctggaatacagtggcacgatcactgcatttgaactcctgggctcaagcaattttccctcctcagcctccgaatagctgggaccacaggcgcacaccaccatgcccagctaattaaagttttctgtagagatggggtgtcactatgttacccaggctggtctcgaactcctgagctcaagcaatcctcccatctcagcctaccaaaatgctgggatcacaggcatgagccaccgcccccagttctcaacctctctttaagaaaaccaaggctgggccggacacagtggctcacgcctataatcccagcactttgggaggccaaggcaggcagatcacttgaggtgaggagttggagacaagcctggcccacatggtgaaaccccatctctactaaaaaaacaaaaaaattggggccaggtgccatggctcacgcctgtaatcctagcactttgggaggccgaggcgggtggatcacaaggtcaggagattgagaccattctggctaatgtggtgaaaccccacatctactaaaaatacaaaaaaaaattagccgggcatggtggcgggcgcctgtagtcccagctacttgggaggctgaggcaggagaatggcgtgaacccgggaggcagagcttgcagtgagctgagatcacgccactgcactccagcctgggtgacagagcgagactccatctgaaaaaaaaaaaaaaaattagctggatatggtggtgcacgcccatgatcccagctacttggaaggctgaggcacaagaattgcttgaacctgggaggcagaggctacagtgagcggagatcacgccactgcactccagcctgggcgacagagcaagactctgtctccaaaaaaaagaaagaaagaaaagaaaaaaaaaaccaaggtccagagcaattcactaacttacccaaagcagggccgctagagatggttgtgcacattactccctacatagggatgtctggccaaggatccacactccactggccgtgctgtgtacccgcccagcagcatcacccaacccagagagtgcgccttttccactctacatgaaggtgctctgtggacttactgtaaacagcctcctcagtagtcagtcagtagtagagacagaatccaaacccaggtctgattccaaagcctctgttttgtttctgttttctgtttgtttttttttgagacagggtcttgctctgtcactcaggatggaatgcagtagtgttgtgatcatagcttactgcagcctcgaactcctgggctcaaatgatccaaagcattgggattacaggcatgagccaccatacccagccagccaaagcctctgtttttgcccatatcacactcattctcctccagaagacaagggccatatctggttaatctcctgctgttccactcaatgcctggctcatcataggtgggcagtaaatgcttatcagtgagtaactggagaacaacatggcccttccttataggccaaaaagcaaatggatttccacctgacaaatcttcgggatccaagaagcagaaacaatatcagcggattcggaaggagaagcctcaacaacacaacttcacccaccgcctcctggctgcagctctgaaggtacgtggggtacctggcacagcgtgcaccctgagactcagccccacaggcttttcctctggagtattccatgcatgttacaggctctcctgcctctgatcagaatcagcgggggtgcttaattctgtcccctctcatcgcagcccaatctcagcttgctgttaatccaggccacagggccccatctccccggctccaggtttggcttccccatctcccccaggagctcctattgacacttcctgccacccttcccctagagccacagcgggaacatatcttgcatggactttagcagcaatggcaaatacctggctacctgtgcagatgatcgcaccatccgcatctggagcaccaaggacttcctgcagcgagagcaccgcagcatgagagccaacgtggagctggaccacgccaccctggtgcgcttcagccctgactgcaggtgggacaagacggagcctcaggtttgcctgcagaggcctagtcccaggctttggccttcccatatctgctttgaggtagtgaggagggacctggacccagggcctcccttggggtgccagaaagagcatccacatagtttgcgcgctgcctggggctccctggagatctgggctgctatacagcaaggaaacagggggaggtctcttcctacctggaaataccttggcctggcttccagatgagccttagtttctaaaccctagagagaaactaaaggagccaaagctatcagaatcttaccttttgaggagttttatgagatttggaaccaggggcttaagttttaaggctagactgtggggcatgaggagagatcttgacttccccgagaacccagcacaggacctggaacacagagcctctttgtccagtgagagcgtgacttgtctgctgcctgtctctagagccttcatcgtctggctggccaacggggacaccctccgtgtcttcaagatgaccaagcgggaggatgggggctacaccttcacagccaccccagaggacttccctaaaaagcacaaggcgcctgtcat

SEQ ID NO: 14471 - DNA, 494 bp, Homo sapiens
ccaggccccgcccctcgagcgccacaacagccgggccccaccccttgaggccaaaaagcaaatggatttccacctgacaaatcttcgggatccaagaagcagaaacaatatcagcggattcggaaggagaagcctcaacaacacaacttcacccaccgcctcctggctgcagctctgaagagccacagcgggaacatatcttgcatggactttagcagcaatggcaaatacctggctacctgtgcagatgatcgcaccatccgcatctggagcaccaaggacttcctgcagcgagagcaccgcagcatgagagccaacgtggagctggaccacgccaccctggtgcgcttcagccctgactgcagagccttcatcgtctggctggccaacggggacaccctccgtgtcttcaagatgaccaagcgggaggatgggggctacaccttcacagccaccccagaggacttccctaaaaagcacaaggcgcctgtcat

SEQ ID NO: 14472 - DNA, 924 bp, Homo sapiens
ggaacaacatgctccgaaaatgaagttttaaaggcttctgggttgtatggcagatttgtagcctcgtgtggcttcaccccagatgtgaaggtttgggaagtctgctttggaaagaagggggagttccaggaggtggtgcgagccttcgaactaaagggccactccgcggctgtgcactcgtttgctttctccaacgactcacggaggtgagtgaatccgctctgatgtctgaccagtggctcttggcccctcttgacaaccagggtccttctgtctgtttgtgccatggctctgaagagggtggggtgcctggccctcggcaggaagctgacttagcttcctagctggagctgctcaagttgggccagtgcttaccctgccagggtgtgttggggcttgagctgtgattttctgtgttgcaggatggcttctgtctccaaggatggtacatggaaactgtgggacacagatgtggaatacaagaagaagcaggacccctacttgctgaagacaggccgctttgaagaggcggcgggtgccgcgccgtgccgcctggccctctcccccaacgcccaggtcttggccttggccagtggcagtagtattcatctctacaatacccggcggggcgagaaggaggagtgctttgagcgggtccatggcgagtgtatcgccaacttgtcctttgacatcactggccgctttctggcctcctgtggggaccgggcggtgcggctgtttcacaacactcctggccaccgagccatggtggaggagatgcagggccacctgaagcgggcctccaacgagagcacccgccagaggctgcagcagcagctgacccaggcccaagagaccctgaagagcctgggtgccctgaagaagtgactctgggagggcccggcgcagaggattgaggaggag

SEQ ID NO: 14473 - DNA, 708 bp, Homo sapiens
ggaacaacatgctccgaaaatgaagttttaaaggcttctgggttgtatggcagatttgtagcctcgtgtggcttcaccccagatgtgaaggtttgggaagtctgctttggaaagaagggggagttccaggaggtggtgcgagccttcgaactaaagggccactccgcggctgtgcactcgtttgctttctccaacgactcacggaggatggcttctgtctccaaggatggtacatggaaactgtgggacacagatgtggaatacaagaagaagcaggacccctacttgctgaagacaggccgctttgaagaggcggcgggtgccgcgccgtgccgcctggccctctcccccaacgcccaggtcttggccttggccagtggcagtagtattcatctctacaatacccggcggggcgagaaggaggagtgctttgagcgggtccatggcgagtgtatcgccaacttgtcctttgacatcactggccgctttctggcctcctgtggggaccgggcggtgcggctgtttcacaacactcctggccaccgagccatggtggaggagatgcagggccacctgaagcgggcctccaacgagagcacccgccagaggctgcagcagcagctgacccaggcccaagagaccctgaagagcctgggtgccctgaagaagtgactctgggagggcccggcgcagaggattgaggaggag

SEQ ID NO: 14474 - DNA, 1351 bp, Homo sapiens
attgctaacacaggtaagaggcattcagagggtggcgcctgcccaaagcatgaaggaaagatccagttctatttcctcaatgagttaatgctgcctgaaagttctgctcaacctgagaggaacaaggggtccctggctctgaacagcctggctctgtgctcccctggagtccctgggccacaccaggtccctagggaaggtggggaagggccacagtcttcagcagagtccttatctgtagtgacccttggcctgggaggagacatgtatacttcgggcagcagaggccttgtaagtgtctttggagagtgacagttggtcaggtcactgcccgtgacccacatcactcccttcccgctcagggaagtttatcatgactgcctccagtgacaccactgtcctcatctggagcctgaagggtcaagtgctgtctaccatcaacaccaaccagatgaacaacacacacgctgctgtatctccctgtggcaggtgggcaaggaggggtattggcgtctgggaccacgagaggctggggctggggagcaggcacagaacagagagccagcttcatcgcgtgggaagagcatacggggtggggtcaggaacccgagcttcaagtctcagctctccccacttgcagtagtgggatttcatgcaggtcgccccatgtccttagtcgctatttcttcatcttcagtgtttttgttttttagaaaattagtctcactctgtcacccaggctggagcacagtggtgcgatcatagctcactgcagcctcaaactcctgggttgtagctattctcccagctcagcctcctgagtagtcaggactataggcatgtgccactgtactcagctaatttttgttttttgtttgtttgtttgttgagacggtttcaccctcgcccaggcaggagtgcagtggcgcaatcacagctcactgtagccttgacttcccaggctcagaccatcctcccaccttagcctcccgagtagctgggactacaggcgtgcactaccacacctggctaatttttgtattttttgttgagatggggtcttactatgttgcccaggctggtcctgaactcctggcctcaagtgatcctcttgcctcgacctcccaaagtggtagaattacaggcgtgagccactgtgccaagccacctttgggcggggatgttacatatcttagaacaaggctagaagataaactgaggtcacatacataaaagaacttttttgttgtggttgtttgtttgttttttgagatggagtttcgctcttgttgcttaggttggagtgcaatggcaggatcttggctcaccacaacctccgtctcccgggttc

SEQ ID NO: 14475 - DNA, 543 bp, Homo sapiens
attgctaacacaggtaagaggcattcagagggtggcgcctgcccaaagcatgaaggaaagatccagttctatttcctcaatgagttaatgctgcctgaaagttctgctcaacctgagaggaacaaggggtccctggctctgaacagcctggctctgtgctcccctggagtccctgggccacaccaggtccctagggaaggtggggaagggccacagtcttcagcagagtccttatctgtagtgacccttggcctgggaggagacatgtatacttcgggcagcagaggccttgtaagtgtctttggagagtgacagttggtcaggtcactgcccgtgacccacatcactcccttcccgctcagggaagtttatcatgactgcctccagtgacaccactgtcctcatctggagcctgaagggtcaagtgctgtctaccatcaacaccaaccagatgaacaacacacacgctgctgtatctccctgtggcaggttggagtgcaatggcaggatcttggctcaccacaacctccgtctcccgggttc

SEQ ID NO: 14476 - DNA, 4745 bp, Homo sapiens
agctgaggtggcagtggttccaccaacatggagctctcgcagatgtcggagctcatggggctgtcggtgttgcttgggctgctggccctgatggcgacggcggcggtagcgcgggggtggctgcgcgcgggggaggagaggagcggccggcccgcctgtaagtggggccgggtcgggtgggggcggcccgcggtgtcccggctcccggcctcctcgtggtccgacctgcggtttgggcccgcggctggtggggcccggcgactccatgggcctcagtttctcctctggtaacgtgagcttcgcttccagagacggggacccgccttgccgggttaggcgcacctcctggggcgggactggctccaacctgggccccttactgcggctttctctgtggccgaggccaggccgtccccggggtggccaggagagcaccgtaaactcttcagcctgctccgtggccgcgatctcggaaaaagcaccaattctgtgatgtgcagcagcatttactgggcatctatgaccctgtgataggctttggggtctttttctgtaaggagtccagtaaaggagaagtacatctgtattatgaacacctaaatatgtaagtgaaaaacacggtgaaataagtttcactgaggccaggcgaagtggctcacgcctgtattcccagcactttgggaggccgaggcagggagatcgcttgagcccaggagtttgggaccagcctgagcaacatagcaagaccccatctctacgcaaaattagctgggtgtggttgtgcacgcccctgtagtcccagctccatgggaggccgaggcaggagggtgtcgtgagtccaggaattcaaggctgcagtgagttgtgatagatcgcgccactgtacttcagcctgggtgacggcaagagcctgtctctgaaaagtttcatagaagaggttagtactagaaatgggaaacaccagagagtcagtgggcagccctgctctttttatttatttttcagacagagtttcgctcttcttgcccaggctggagtgcagtggcacaatcttggctcgttgcaacttccgcctgccaggttcaagcgattcttctgcctctgcctcccgagtagctgggactacaggcacacaccaccacgcctggctaatttttgtatatttagtagacggggtttcgccacgttggtcaggctggtctcgaacgcctgatctcaggtgatccactcgtcctggcctccaaaagtgctgagattacaggcgtgaaccactgtgcccggccagccctgcattttttttttttttttttttgcagggggacggagttttgctctgtcgcccaatctggagtctagtggcgggatctcggctcactgcaagctccgcctctgggttcacgccattctcctgcctcagcctcctgagtagctgggactacaggcgtccgacaccacacccggctaattttttgtattttttgagtagagacggggtttcactgtgttagccaggatggtctcaatctcctaacctcttgtgatccacctgcctcggcctcccaaagtgctgggattacaggcgtgagccaccctgcctggccgagtcctgttcttttatgggggaggtggttgttagggaaatcattactgagaatagggggcacatgaggtagtgtggggtctcaaaggatggttctagaagaagagtttgccagaaggccaaggaaaaaagacattcctgccaatggcaatacccgagaaggcaaggagtccccaaacagcatttggtatgacttaagtgtgaggaggggggcttgttagacatgcctggagagaaggaagcagaggacagattgtggctgtgtttgtttgcagggcccaggagcttttttcctgttggaattggggagcatctgcagtcatttaccacatgccagctttgtgactcaattaagtatcttttacaaaagtgactggctccactcccccgcacaggactcaacagatgttgacttctcatccccgagttctttcaggtactggagtgcagtggtgcgatcttggcttactgcaacctctacctcctgggttcaagtgattctcctgcctcagcctcctgagtagctgggattacaggcgcctgccaccacgcccggctaatttttgtatttttagtagagacggggtttcaccatgttggccagactggtggaactcctgggcatcaagatgatccagctgccgggccgggcatggtgactcacgcctgtaatcccagcactttgggaggccgaagcgggcaggtcacaaggtcaggagatcgagactgaggcaacagagcgagactctgtatcaaacaaaaaaaaaaaatgatccagcagctgcctcagcctcccaaagcgctgggattacaggcatgagccaccgcacccggcctccatagagcctttaatgcttgtgttcggtacttttgcttgtcactttgtagatatctcatccaattcaatctcccttatttttatttatttatttatttatttattttgagacagaatctcactctgtcgcctaggctggaatacagtggcacgatcactgcatttgaactcctgggctcaagcaattttccctcctcagcctccgaatagctgggaccacaggcgcacaccaccatgcccagctaattaaagttttctgtagagatggggtgtcactatgttacccaggctggtctcgaactcctgagctcaagcaatcctcccatctcagcctaccaaaatgctgggatcacaggcatgagccaccgcccccagttctcaacctctctttaagaaaaccaaggctgggccggacacagtggctcacgcctataatcccagcactttgggaggccaaggcaggcagatcacttgaggtgaggagttggagacaagcctggcccacatggtgaaaccccatctctactaaaaaaacaaaaaaattggggccaggtgccatggctcacgcctgtaatcctagcactttgggaggccgaggcgggtggatcacaaggtcaggagattgagaccattctggctaatgtggtgaaaccccacatctactaaaaatacaaaaaaaaattagccgggcatggtggcgggcgcctgtagtcccagctacttgggaggctgaggcaggagaatggcgtgaacccgggaggcagagcttgcagtgagctgagatcacgccactgcactccagcctgggtgacagagcgagactccatctgaaaaaaaaaaaaaaaattagctggatatggtggtgcacgcccatgatcccagctacttggaaggctgaggcacaagaattgcttgaacctgggaggcagaggctacagtgagcggagatcacgccactgcactccagcctgggcgacagagcaagactctgtctccaaaaaaaagaaagaaagaaaagaaaaaaaaaaccaaggtccagagcaattcactaacttacccaaagcagggccgctagagatggttgtgcacattactccctacatagggatgtctggccaaggatccacactccactggccgtgctgtgtacccgcccagcagcatcacccaacccagagagtgcgccttttccactctacatgaaggtgctctgtggacttactgtaaacagcctcctcagtagtcagtcagtagtagagacagaatccaaacccaggtctgattccaaagcctctgttttgtttctgttttctgtttgtttttttttgagacagggtcttgctctgtcactcaggatggaatgcagtagtgttgtgatcatagcttactgcagcctcgaactcctgggctcaaatgatccaaagcattgggattacaggcatgagccaccatacccagccagccaaagcctctgtttttgcccatatcacactcattctcctccagaagacaagggccatatctggttaatctcctgctgttccactcaatgcctggctcatcataggtgggcagtaaatgcttatcagtgagtaactggagaacaacatggcccttccttataggccaaaaagcaaatggatttccacctgacaaatcttcgggatccaagaagcagaaacaatatcagcggattcggaaggagaagcctcaacaacacaacttcacccaccgcctcctggctgcagctctgaaggtacgtggggtacctggcacagcgtgcaccctgagactcagccccacaggcttttcctctggagtattccatgcatgttacaggctctcctgcctctgatcagaatcagcgggggtgcttaattctgtcccctctcatcgcagcccaatctcagcttgctgttaatccaggccacagggccccatctccccggctccaggtttggcttccccatctcccccaggagctcctattgacacttcctgccacccttcccctagagccacagcgggaacatatcttgcatggactttagcagcaatggcaaatacctggctacctgtgcagatgatcgcaccatccgcatctggagcaccaaggacttcctgcagcgagagcaccgcagcatgagagccaacgtggagctggaccacgccaccctggtgcgcttcagccctgactgcaggtgggacaagacggagcctcaggtttgcctgcagaggcctagtcccaggctttggccttcccatatctgctttgaggtagtgaggagggacctggacccagggcct

SEQ ID NO: 14477 - DNA, 579 bp, Homo sapiens
agctgaggtggcagtggttccaccaacatggagctctcgcagatgtcggagctcatggggctgtcggtgttgcttgggctgctggccctgatggcgacggcggcggtagcgcgggggtggctgcgcgcgggggaggagaggagcggccggcccgcctgccaaaaagcaaatggatttccacctgacaaatcttcgggatccaagaagcagaaacaatatcagcggattcggaaggagaagcctcaacaacacaacttcacccaccgcctcctggctgcagctctgaagagccacagcgggaacatatcttgcatggactttagcagcaatggcaaatacctggctacctgtgcagatgatcgcaccatccgcatctggagcaccaaggacttcctgcagcgagagcaccgcagcatgagagccaacgtggagctggaccacgccaccctggtgcgcttcagccctgactgcaggtgggacaagacggagcctcaggtttgcctgcagaggcctagtcccaggctttggccttcccatatctgctttgaggtagtgaggagggacctggacccagggcct

SEQ ID NO: 14478 - DNA, 8896 bp, Homo sapiens
gttccaccaacatggagctctcgcagatgtcggagctcatggggctgtcggtgttgcttgggctgctggccctgatggcgacggcggcggtagcgcgggggtggctgcgcgcgggggaggagaggagcggccggcccgcctgtaagtggggccgggtcgggtgggggcggcccgcggtgtcccggctcccggcctcctcgtggtccgacctgcggtttgggcccgcggctggtggggcccggcgactccatgggcctcagtttctcctctggtaacgtgagcttcgcttccagagacggggacccgccttgccgggttaggcgcacctcctggggcgggactggctccaacctgggccccttactgcggctttctctgtggccgaggccaggccgtccccggggtggccaggagagcaccgtaaactcttcagcctgctccgtggccgcgatctcggaaaaagcaccaattctgtgatgtgcagcagcatttactgggcatctatgaccctgtgataggctttggggtctttttctgtaaggagtccagtaaaggagaagtacatctgtattatgaacacctaaatatgtaagtgaaaaacacggtgaaataagtttcactgaggccaggcgaagtggctcacgcctgtattcccagcactttgggaggccgaggcagggagatcgcttgagcccaggagtttgggaccagcctgagcaacatagcaagaccccatctctacgcaaaattagctgggtgtggttgtgcacgcccctgtagtcccagctccatgggaggccgaggcaggagggtgtcgtgagtccaggaattcaaggctgcagtgagttgtgatagatcgcgccactgtacttcagcctgggtgacggcaagagcctgtctctgaaaagtttcatagaagaggttagtactagaaatgggaaacaccagagagtcagtgggcagccctgctctttttatttatttttcagacagagtttcgctcttcttgcccaggctggagtgcagtggcacaatcttggctcgttgcaacttccgcctgccaggttcaagcgattcttctgcctctgcctcccgagtagctgggactacaggcacacaccaccacgcctggctaatttttgtatatttagtagacggggtttcgccacgttggtcaggctggtctcgaacgcctgatctcaggtgatccactcgtcctggcctccaaaagtgctgagattacaggcgtgaaccactgtgcccggccagccctgcattttttttttttttttttttgcagggggacggagttttgctctgtcgcccaatctggagtctagtggcgggatctcggctcactgcaagctccgcctctgggttcacgccattctcctgcctcagcctcctgagtagctgggactacaggcgtccgacaccacacccggctaattttttgtattttttgagtagagacggggtttcactgtgttagccaggatggtctcaatctcctaacctcttgtgatccacctgcctcggcctcccaaagtgctgggattacaggcgtgagccaccctgcctggccgagtcctgttcttttatgggggaggtggttgttagggaaatcattactgagaatagggggcacatgaggtagtgtggggtctcaaaggatggttctagaagaagagtttgccagaaggccaaggaaaaaagacattcctgccaatggcaatacccgagaaggcaaggagtccccaaacagcatttggtatgacttaagtgtgaggaggggggcttgttagacatgcctggagagaaggaagcagaggacagattgtggctgtgtttgtttgcagggcccaggagcttttttcctgttggaattggggagcatctgcagtcatttaccacatgccagctttgtgactcaattaagtatcttttacaaaagtgactggctccactcccccgcacaggactcaacagatgttgacttctcatccccgagttctttcaggtactggagtgcagtggtgcgatcttggcttactgcaacctctacctcctgggttcaagtgattctcctgcctcagcctcctgagtagctgggattacaggcgcctgccaccacgcccggctaatttttgtatttttagtagagacggggtttcaccatgttggccagactggtggaactcctgggcatcaagatgatccagctgccgggccgggcatggtgactcacgcctgtaatcccagcactttgggaggccgaagcgggcaggtcacaaggtcaggagatcgagactgaggcaacagagcgagactctgtatcaaacaaaaaaaaaaaatgatccagcagctgcctcagcctcccaaagcgctgggattacaggcatgagccaccgcacccggcctccatagagcctttaatgcttgtgttcggtacttttgcttgtcactttgtagatatctcatccaattcaatctcccttatttttatttatttatttatttatttattttgagacagaatctcactctgtcgcctaggctggaatacagtggcacgatcactgcatttgaactcctgggctcaagcaattttccctcctcagcctccgaatagctgggaccacaggcgcacaccaccatgcccagctaattaaagttttctgtagagatggggtgtcactatgttacccaggctggtctcgaactcctgagctcaagcaatcctcccatctcagcctaccaaaatgctgggatcacaggcatgagccaccgcccccagttctcaacctctctttaagaaaaccaaggctgggccggacacagtggctcacgcctataatcccagcactttgggaggccaaggcaggcagatcacttgaggtgaggagttggagacaagcctggcccacatggtgaaaccccatctctactaaaaaaacaaaaaaattggggccaggtgccatggctcacgcctgtaatcctagcactttgggaggccgaggcgggtggatcacaaggtcaggagattgagaccattctggctaatgtggtgaaaccccacatctactaaaaatacaaaaaaaaattagccgggcatggtggcgggcgcctgtagtcccagctacttgggaggctgaggcaggagaatggcgtgaacccgggaggcagagcttgcagtgagctgagatcacgccactgcactccagcctgggtgacagagcgagactccatctgaaaaaaaaaaaaaaaattagctggatatggtggtgcacgcccatgatcccagctacttggaaggctgaggcacaagaattgcttgaacctgggaggcagaggctacagtgagcggagatcacgccactgcactccagcctgggcgacagagcaagactctgtctccaaaaaaaagaaagaaagaaaagaaaaaaaaaaccaaggtccagagcaattcactaacttacccaaagcagggccgctagagatggttgtgcacattactccctacatagggatgtctggccaaggatccacactccactggccgtgctgtgtacccgcccagcagcatcacccaacccagagagtgcgccttttccactctacatgaaggtgctctgtggacttactgtaaacagcctcctcagtagtcagtcagtagtagagacagaatccaaacccaggtctgattccaaagcctctgttttgtttctgttttctgtttgtttttttttgagacagggtcttgctctgtcactcaggatggaatgcagtagtgttgtgatcatagcttactgcagcctcgaactcctgggctcaaatgatccaaagcattgggattacaggcatgagccaccatacccagccagccaaagcctctgtttttgcccatatcacactcattctcctccagaagacaagggccatatctggttaatctcctgctgttccactcaatgcctggctcatcataggtgggcagtaaatgcttatcagtgagtaactggagaacaacatggcccttccttataggccaaaaagcaaatggatttccacctgacaaatcttcgggatccaagaagcagaaacaatatcagcggattcggaaggagaagcctcaacaacacaacttcacccaccgcctcctggctgcagctctgaaggtacgtggggtacctggcacagcgtgcaccctgagactcagccccacaggcttttcctctggagtattccatgcatgttacaggctctcctgcctctgatcagaatcagcgggggtgcttaattctgtcccctctcatcgcagcccaatctcagcttgctgttaatccaggccacagggccccatctccccggctccaggtttggcttccccatctcccccaggagctcctattgacacttcctgccacccttcccctagagccacagcgggaacatatcttgcatggactttagcagcaatggcaaatacctggctacctgtgcagatgatcgcaccatccgcatctggagcaccaaggacttcctgcagcgagagcaccgcagcatgagagccaacgtggagctggaccacgccaccctggtgcgcttcagccctgactgcaggtgggacaagacggagcctcaggtttgcctgcagaggcctagtcccaggctttggccttcccatatctgctttgaggtagtgaggagggacctggacccagggcctcccttggggtgccagaaagagcatccacatagtttgcgcgctgcctggggctccctggagatctgggctgctatacagcaaggaaacagggggaggtctcttcctacctggaaataccttggcctggcttccagatgagccttagtttctaaaccctagagagaaactaaaggagccaaagctatcagaatcttaccttttgaggagttttatgagatttggaaccaggggcttaagttttaaggctagactgtggggcatgaggagagatcttgacttccccgagaacccagcacaggacctggaacacagagcctctttgtccagtgagagcgtgacttgtctgctgcctgtctctagagccttcatcgtctggctggccaacggggacaccctccgtgtcttcaagatgaccaagcgggaggatgggggctacaccttcacagccaccccagaggacttccctaaaaagcacaaggcgcctgtcatcgacattggcattgctaacacaggtaagaggcattcagagggtggcgcctgcccaaagcatgaaggaaagatccagttctatttcctcaatgagttaatgctgcctgaaagttctgctcaacctgagaggaacaaggggtccctggctctgaacagcctggctctgtgctcccctggagtccctgggccacaccaggtccctagggaaggtggggaagggccacagtcttcagcagagtccttatctgtagtgacccttggcctgggaggagacatgtatacttcgggcagcagaggccttgtaagtgtctttggagagtgacagttggtcaggtcactgcccgtgacccacatcactcccttcccgctcagggaagtttatcatgactgcctccagtgacaccactgtcctcatctggagcctgaagggtcaagtgctgtctaccatcaacaccaaccagatgaacaacacacacgctgctgtatctccctgtggcaggtgggcaaggaggggtattggcgtctgggaccacgagaggctggggctggggagcaggcacagaacagagagccagcttcatcgcgtgggaagagcatacggggtggggtcaggaacccgagcttcaagtctcagctctccccacttgcagtagtgggatttcatgcaggtcgccccatgtccttagtcgctatttcttcatcttcagtgtttttgttttttagaaaattagtctcactctgtcacccaggctggagcacagtggtgcgatcatagctcactgcagcctcaaactcctgggttgtagctattctcccagctcagcctcctgagtagtcaggactataggcatgtgccactgtactcagctaatttttgttttttgtttgtttgtttgttgagacggtttcaccctcgcccaggcaggagtgcagtggcgcaatcacagctcactgtagccttgacttcccaggctcagaccatcctcccaccttagcctcccgagtagctgggactacaggcgtgcactaccacacctggctaatttttgtattttttgttgagatggggtcttactatgttgcccaggctggtcctgaactcctggcctcaagtgatcctcttgcctcgacctcccaaagtggtagaattacaggcgtgagccactgtgccaagccacctttgggcggggatgttacatatcttagaacaaggctagaagataaactgaggtcacatacataaaagaacttttttgttgtggttgtttgtttgttttttgagatggagtttcgctcttgttgcttaggttggagtgcaatggcaggatcttggctcaccacaacctccgtctcccgggttcaagcgattctcctgcctcagcctcccccaagtagctgggattacaggcatgcaccaccatgcccagctaattttttatttttagtagaggtgaggtttctccatgttggtcaggctggtctcaaactgtcggaccttaggtgagctgcccgcctgggcctcccaaagtgctgggattacaggtatgagccaccacacccggcctttttttttttttttttctgagacagtctcactctgttgcccaggctggagtgcagtggtgcaatctcaatctcagctcactgcaacctccacctaccaggttcaagtgattctcccacctcagccttcccagtaggtgggactacaggcatgcgccaccacgcctggctaattttgtatttttagtagagatgaggtttcaccatgttggccaggctggtctcgaactcctgacctcaggtgatccacccacctcggcctcccaaagtgctgggatgacaggcgtgagccaccgcgcccggccaaaataactctttaaaggtttatattatccagatatgaggattatcaactttctcaggaaagagattgaggggttttacaggaacaacatgctccgaaaatgaagttttaaaggcttctgggttgtatggcagatttgtagcctcgtgtggcttcaccccagatgtgaaggtttgggaagtctgctttggaaagaagggggagttccaggaggtggtgcgagccttcgaactaaagggccactccgcggctgtgcactcgtttgctttctccaacgactcacggaggtgagtgaatccgctctgatgtctgaccagtggctcttggcccctcttgacaaccagggtccttctgtctgtttgtgccatggctctgaagagggtggggtgcctggccctcggcaggaagctgacttagcttcctagctggagctgctcaagttgggccagtgcttaccctgccagggtgtgttggggcttgagctgtgattttctgtgttgcaggatggcttctgtctccaaggatggtacatggaaactgtgggacacagatgtggaatacaagaagaagcaggacccctacttgctgaagacaggccgctttgaagaggcggcgggtgccgcgccgtgccgcctggccctctcccccaacgcccaggtcttggccttggccagtggcagtagtattcatctctacaatacccggcggggcgagaaggaggagtgctttgagcgggtccatggcgagtgtatcgccaacttgtcctttgacatcactggccgctttctggcctcctgtggggaccgggcggtgcggctgtttcacaacactcctggccaccgagccatggtggaggagatgcagggccacctgaagcgggcctccaacgagagcacccgccagaggctgcagcagcagctgacccaggcccaagagaccctgaagagcctgggtgccctgaagaagtgactctgggagggcccggcgcagaggattgaggaggagggatctggcctcctcatggcactgctgccatctttcctcccaggtggaagcctttcagaaggagtctcctggttttcttactggtggccctgcttcttcccattgaaactactcttgtctacttaggtctctctcttcttgctggctgtgactcctccctgactagtggccaaggtgcttttcttcctcccaggcccagtgggtggaatctgtccccacctggcactgaggagaatggtagagaggagaggagagagagagagaatgtgatttttggccttgtggcagcacatcctcacacccaaagaagtttgtaaatgttccagaacaacctagagaacacctgagtactaagcagcagttttgcaaggatgggagactgggatagcttcccatcacagaactgtgttccatcaaaaagacactaagggatttccttctgggcctcagttctatttgtaagatggagaataatcctctctgtgaactccttgcaaagatgatatgaggctaagagaatatcaagtccccaggtctggaagaaaagtagaaaagagtagtactattgtccaatgtcatgaaagtggtaaaagtgggaaccagtgtgctttgaaaccaaattagaaacacattccttgggaaggcaaagttttctgggacttgatcatacattttatatggttgggacttctctcttcgggagatgatatcttgtttaaggagacctcttttcagttcatcaagttcatcagatatttgagtgcccactctgtgcccaaataaatatgagctggggattaaatacg

SEQ ID NO: 14479 - DNA, 2165 bp, Homo sapiens
gttccaccaacatggagctctcgcagatgtcggagctcatggggctgtcggtgttgcttgggctgctggccctgatggcgacggcggcggtagcgcgggggtggctgcgcgcgggggaggagaggagcggccggcccgcctgccaaaaagcaaatggatttccacctgacaaatcttcgggatccaagaagcagaaacaatatcagcggattcggaaggagaagcctcaacaacacaacttcacccaccgcctcctggctgcagctctgaagagccacagcgggaacatatcttgcatggactttagcagcaatggcaaatacctggctacctgtgcagatgatcgcaccatccgcatctggagcaccaaggacttcctgcagcgagagcaccgcagcatgagagccaacgtggagctggaccacgccaccctggtgcgcttcagccctgactgcagagccttcatcgtctggctggccaacggggacaccctccgtgtcttcaagatgaccaagcgggaggatgggggctacaccttcacagccaccccagaggacttccctaaaaagcacaaggcgcctgtcatcgacattggcattgctaacacagggaagtttatcatgactgcctccagtgacaccactgtcctcatctggagcctgaagggtcaagtgctgtctaccatcaacaccaaccagatgaacaacacacacgctgctgtatctccctgtggcagatttgtagcctcgtgtggcttcaccccagatgtgaaggtttgggaagtctgctttggaaagaagggggagttccaggaggtggtgcgagccttcgaactaaagggccactccgcggctgtgcactcgtttgctttctccaacgactcacggaggatggcttctgtctccaaggatggtacatggaaactgtgggacacagatgtggaatacaagaagaagcaggacccctacttgctgaagacaggccgctttgaagaggcggcgggtgccgcgccgtgccgcctggccctctcccccaacgcccaggtcttggccttggccagtggcagtagtattcatctctacaatacccggcggggcgagaaggaggagtgctttgagcgggtccatggcgagtgtatcgccaacttgtcctttgacatcactggccgctttctggcctcctgtggggaccgggcggtgcggctgtttcacaacactcctggccaccgagccatggtggaggagatgcagggccacctgaagcgggcctccaacgagagcacccgccagaggctgcagcagcagctgacccaggcccaagtgactctgggagggcccggcgcagaggattgaggaggagggatctggcctcctcatggcactgctgccatctttcctcccaggtggaagcctttcagaaggagtctcctggttttcttactggtggccctgcttcttcccattgaaactactcttgtctacttaggtctctctcttcttgctggctgtgactcctccctgactagtggccaaggtgcttttcttcctcccaggcccagtgggtggaatctgtccccacctggcactgaggagaatggtagagaggagaggagagagagagagaatgtgatttttggccttgtggcagcacatcctcacacccaaagaagtttgtaaatgttccagaacaacctagagaacacctgagtactaagcagcagttttgcaaggatgggagactgggatagcttcccatcacagaactgtgttccatcaaaaagacactaagggatttccttctgggcctcagttctatttgtaagatggagaataatcctctctgtgaactccttgcaaagatgatatgaggctaagagaatatcaagtccccaggtctggaagaaaagtagaaaagagtagtactattgtccaatgtcatgaaagtggtaaaagtgggaaccagtgtgctttgaaaccaaattagaaacacattccttgggaaggcaaagttttctgggacttgatcatacattttatatggttgggacttctctcttcgggagatgatatcttgtttaaggagacctcttttcagttcatcaagttcatcagatatttgagtgcccactctgtgcccaaataaatatgagctggggattaaatacg

SEQ ID NO: 14480 - DNA, 3688 bp, Homo sapiens
gaggtgattcccaagccgcggggcggctccggtggtgcggggaaaccgaaagtgggcggcggccgcggcggggcccctggcggagacggcggcaggagctgggcccagagacgcggggacgggccgtgggcccccggaacgaggcaaagatgctggaaggagatctggtttcaaagatgctacgagctgttctgcagtctcataagaatggagtagcattaccccggctccaaggagagtacagatccttgactggagactggatccccttcaaacagctaggtttccctacactagaagcctatctgagaagtgtgccagcagtggtcaggatagagactagtagatctggagagattacctgctatgccatggcctgcacagaaactgcaagaattgctcagcttgtggctcgtcaaaggagttctaaaaggaaaaccgggcgtcaagttaattgtcagatgagagtgaagaaaaccatgccattttttctagaaggaaaaccaaaagcaaccctcagacaaccaggatttgcttcaaatttttctgttggcaaaaaacctaatccagcaccgttaagagacaaaggaaactctgttggagttaagcctgatgctgaaatgtctccttatatgctacacacaactcttggaaatgaagcattcaaagacattccagtgcaaaggcatgtgaccatgtccaccaacaacaggtttagcccaaaggcgtcccttcaaccacctttgcagatgcatctctcaagaacctctactaaggaaatgagtgataatttaaatcagactgttgaaaaacccaatgtcaagcctcctgcctcttacacttataaaatggatgaggttcaaaatcgcataaaggaaatactaaacaagcataacaatggcatttggatatctaagcttccacatttttacaaagagttatataaagaagaccttaatcaaggaattttacaacagtttgaacactggcctcatatttgcacggtggagaaaccttgcagtggtggccaagatttacttctttatccagctaagagaaagcagcttttgagaagtgaactggatactgagaaagtacctctatccccactacctggtcccaaacaaacaccaccgttgaaagggtgtccaacagttatggcaggagactttaaagaaaaagtggcagacctgctggtgaaatacacaagtggcctttgggccagtgcacttccgaaagcatttgaggaaatgtacaaagtgaaattccctgaggatgccttaaaaaatcttgcctcactttctgatgtatgcagcatagactacatttctggaaatccccagaaggccattctctatgctaaacttccattgcccactgacaaaatccaaaaggatgcagggcaagcacatggtgataatgatatcaaggctatggttgaacaagagtatttgcaggtagaagaaagcattgctgaaagtgctaatacctttatggaggacataacagttcctcctttaatgattccaactgaagcatcaccatctgtattggtggttgaactgagcaacacaaatgaagtggttatcaggtatgtgggcaaagactattctgctgctcaggaattaatggaagatgagatgaaggaatattacagtaagaatcctaagatcacaccagtccaggctgtgaatgttgggcagttgctggccgtaaatgccgaggaggacgcctggttacgggcacaggtcatctcaacagaagagaacaaaataaaggtatgctatgttgactatggttttagtgaaaatgttgaaaaaagcaaagcatacaaattaaacccgaagttttgttcactctcatttcaagctacaaaatgtaagcttgcaggcttggaagtcctaagcgatgaccctgatctagtgaaggtggttgaatctttaacttgtggaaagatctttgcagtggaaatacttgacaaagctgacattccacttgttgttctgtacgatacctcaggagaagatgatatcaatatcaatgccacctgcttgaaggctatatgtgacaagtcactagaggttcacctgcaggttgacgccatgtacacaaatgtcaaagtaactaatatttgctctgatgggacactctactgccaggtgccttgtaagggtctgaacaagctcagtgaccttctacgtaagatagaggactacttccattgcaagcacatgacctctgagtgctttgtttcattacccttctgtgggaaaatctgcctcttccattgcaaaggaaaatggttacgagtagagatcacaaatgttcacagcagccgggctcttgatgttcagttcctggactctggcactgtgacatctgtaaaagtgtcagagctcagggaaattccacctcggtttctacaagaaatgattgcaataccacctcaggccattaagtgctgtttagcagatcttccacaatctattggcatgtggacaccagatgcagtgctgtggttaagagattctgttttgaattgctcggactgtagcattaaggttacaaaagtggatgaaaccagagggatcgcacatgtttatttatttacccctaagaacttccctgaccctcatcgcagtattaatcgccagattacaaatgcagacttgtggaagcatcagaaggatgtgtttttgagtgccatatccagtggagctgactctcccaacagcaaaaatggcaacatgcccatgtcgggcaacactggagagaatttcagaaagaacctcacagatgtcatcaaaaagtccatggtggaccatacgagcgctttctccacagaggaactgccacctcctgtccacttatcaaagccaggggaacacatggatgtgtatgtgcctgtggcctgtcacccaggctacttcgtcatccagccttggcaggagatacataagttggaagttctgatggaagagatgattctatattacagcgtgtctgaagagcgccacatagcagtggagaaagaccaagtgtatgctgcaaaagtggaaaataagtggcacagggtgcttttaaaaggaatcctgaccaatggactggtatctgtgtatgagctggattatggcaaacacgaattagtcaacataagaaaagtacagcccctagtggacatgttccgaaagctgcccttccaagcagtcacagctcaacttgcaggagtgaagtgcaaccagtggtctgaggaggcttctatggtgtttcgaaatcatgtggagaagaaacctctggtggcactggtgcagacagtcattgaaaatgctaacccttgggaccggaaagtagtggtctacttagtggacacatcgttgccagacaccgatacctggattcatgattttatgtcagagtatctgatagagctttcaaaagttaattaatgactgcctctgaaaccttgacaactaattcagattttttagcaataacaaaatgtagtaggcttaaaaaaaatcttaactctgctacatggctctgactgctgtgggggattgaaaagaatatgcttatgtttgatgaaagatatttaacaagttttgttttaacagagttgacttttcaaagaaaattgtacttgaattattactataatattagaataaaaatgtttatcaatataaaa

SEQ ID NO: 14481 - DNA, 2605 bp, Homo sapiens
caaacaaatgtgcctggtacccacgaggtactcaggaaatgctgaatgaagcaacaggagtcagatttcctccaaatgacaattgatttttttttttttttaagttgagctagagggtagaccttgataaaagtcccaaccctgtctttgcaactttggtatcttatacagtctttctgagtccatttccccatctgtgaaatggggctgcaacacctgtcatgcagaagtattgtacggtgggaagtatatggagtgctgggggtaagccctggctcataaaggagtaaagacaatagtagttatataaatagagttaggaacatagcagatgctcaaaccaggaactgtgattgtcgttattagctgttgttgcttgctgtctatcttggtaccatttgatttgtaggaaaataatattaacattactcataactaggtattttaacatggtgtgttcacttttccatcatattttcttttcaggccattaagtgctgtttagcagatcttccacaatctattggcatgtggacaccagatgcagtgctgtggttaagagattctgttttgaattgctcggactgtagcattaaggttagctatcttgttgggcctgatacatttagaaagggagctggcagctgtcagggctcatttagtttttgtgaaggaattttatctcactgtaaaatggatgcttccacatccaacacattttttatattcagcaaattggctacatgtgtagctgtaagatattttatggtttaattcttatttaagaagttatcctgtctctccagtattatttttaaatccttcttataatttttcccattattaatgtagaagagatggttctccacttctgttttgcttcatgataagggattaagtccccaacagagggaccacagatctcttgataaatgtttctaaagatcatttaaataagtcctctatttcttttttattcacaaagtagaatagattataaacaaatcatttatttataattgtggttctcagcctctttttcctaaagtttatttaatctgccatacttatttcactagctcttgtttctttttctgtacttttgcatctttaaatcaaaaacattgctcatatatccaagaatacaaatttaagaagatagtttttctctgttaactgatggaaattgtatgactgttttatataaacatttaaaatgaaatgtccttgaaaaatatcttcatgaagacctctaaattattctagctagcagtgatttttctgtctttgtattcctctggggtttatagtgtacaattacatgcttaattatatactattccatattcttcagttgtcacatgataatactgttttctcagctactctttaagctcctaaagccagaatattggatggttactcaataaaagtactttttgttaatttttaaaactgtacttctgtattataaatttcaaaatgaatttgcagtcagtatttaattagtacttcagaggatgaatgtaatagaggcatcttgttgggaaaaaaaagaaattttaagtaaatcactgtagatgggttgccttgctgttatctccctctccgcagacctgtgttcctgcctttcatttctagccctatttggtaaaagataaatgtggctggaagtatcttatttttatcattcctaagataaaccagagttgctgatgagaatagccaacagtcacctagctccttgggacacacagcagtacagtcccaattattaatgtatgatatttccatacaaacacccctctggccgaaagagcaaagatggttaggtagtcagaggtctcctggacaaaaagtgtaaaactaattttgacccgttctgtggagcttgcttcctctttttctccccaggtccctctcctcccatgtaattggcgatggggaaaggggtgaggacatatactaggaccagacaaggaatttgaaagaggggtgcttacagatatggtggttgtcagagctttttccttcccttcccagtcttgaggacacaccagccttaagcagaacgctcataaatcattttgccatcattgtgattgttttttattattgatgctgggtgatgagtatatcagggttcatcatacttatcatttctactttaagtgtttcgaaatatcattaatttaaactattttaatcatgatatatagaatcctttctgtcaatgataatgaccttagcaagttataaagttttctcagactttttaaagattagtaaattttttatttccataaggctgcactgttccctagactattttgacttcagagcccattcattgccaagctgtgataatttatttttccttaaataaaatggattttagcaagggttttggcaaaatactgtgttttaatgattaaggttactataactgcctctcaaaatttaatgtgaacttgtatttcttatatcattttttgtgttttccaaaggttacaaaagtggatgaaaccagagggatcgcacatgtttatttatttacccctaagaacttccctgaccctcatcgcagtattaatcgccagattac

SEQ ID NO: 14482 - DNA, 695 bp, Homo sapiens
caaacaaatgtgcctggtacccacgaggtactcaggaaatgctgaatgaagcaacaggagtcagatttcctccaaatgacaattgatttttttttttttttaagttgagctagagggtagaccttgataaaagtcccaaccctgtctttgcaactttggtatcttatacagtctttctgagtccatttccccatctgtgaaatggggctgcaacacctgtcatgcagaagtattgtacggtgggaagtatatggagtgctgggggtaagccctggctcataaaggagtaaagacaatagtagttatataaatagagttaggaacatagcagatgctcaaaccaggaactgtgattgtcgttattagctgttgttgcttgctgtctatcttggtaccatttgatttgtaggaaaataatattaacattactcataactaggtattttaacatggtgtgttcacttttccatcatattttcttttcaggccattaagtgctgtttagcagatcttccacaatctattggcatgtggacaccagatgcagtgctgtggttaagagattctgttttgaattgctcggactgtagcattaaggttacaaaagtggatgaaaccagagggatcgcacatgtttatttatttacccctaagaacttccctgaccctcatcgcagtattaatcgccagattac

SEQ ID NO: 14483 - DNA, 8704 bp, Homo sapiens
acttgtggctctgccgctctagcccccggcggagccagctgctgctcttcggtgctggccccggtgccggccccgttgcccagggaacaggctcccggcagcccccgcggcccggagtccatcccgcctcctccggcccggcggggccgacgagtccggaggggctgccgcgggagcccccaggtttccctagatgacaaataaacattccttttcctgcgtgaagatagtctgtggaaaccttggccatggcatcgatatcagagcctgttacattcagagagttctgcccgttgtactatctcctcaatgccattccgacaaagatccagaagggtttccgctctatcgtggtctatctcacggccctcgacaccaacggggactacatcgcggtgggcagcagcatcggcatgctctatctgtactgccggcacctcaaccagatgaggaagtacaactttgaggggaagacggaatctatcactgtggtgaagctgctgagctgctttgatgacctggtggcagcaggcacagcctctggcagggttgcagtttttcaacttgtatcttcattgccagggagaaataaacagcttcggagatttgatgtcactggtattcacaaaaatagcattacagctctggcttggagccccaatggaatgaaattgttctctggagatgacaaaggcaaaattgtttattcttctctggatctagaccaggggctctgtaactcccagctggtgttggaggagccatcttccattgtgcagctggattatagccagaaagtgctgctggtctctactctgcaaagaagtctgctcttttacactgaagaaaagtctgtaaggcaaattggaacacaaccaaggaaaagtactgggaaatttggtgcttgttttataccaggactctgtaagcaaagtgatctaaccttgtatgcgtcacggcccgggctccggctatggaaggctgatgtccacgggactgttcaagccacgtttatcttaaaagatgcttttgccgggggagtcaagccttttgaactgcacccgcgtctggaatcccccaacagtggaagttgcagcttacctgagaggcacctggggcttgtttcatgtttctttcaagaaggctgggtgctgagttggaatgaatatagtatctatctcctagacacagtcaaccaggccacagttgctggtttggaaggatccggtgatattgtgtctgtttcgtgcacagaaaatgaaatatttttcttgaaaggagataggaacattataagaatttcaagcaggcctgaaggattaacatcaacagtgagagatggtctggagatgtctggatgctcagagcgtgtccacgtgcagcaagcggagaagctgccaggggccacagtttctgagacgaggctcagaggctcttccatggccagctccgtggccagcgagccaaggagcaggagcagctcgctcaactccaccgacagcggctccgggctcctgccccctgggctccaggccacccctgagctgggcaagggcagccagcccctgtcacagagattcaacgccatcagctcagaggactttgaccaggagcttgtcgtgaagcctatcaaagtgaaaaggaagaagaagaagaagaagacagaaggtggaagcaggagcacctgtcacagctccctggaatcgacaccctgctccgaatttcctggggacagtccccagtccttgaacacagacttgctgtcgatgacctcaagtgtcctgggcagtagcgtggatcagttaagtgcagagtctccagaccaggaaagcagcttcaatggtgaagtgaacggtgtcccacaggaaaatactgaccccgaaacgtttaatgtcctggaggtgtcaggatcaatgcctgattctctggctgaggaagatgacattagaactgaaatgccacactgtcaccatgcacatgggcgggagctgctcaatggagcgagggaagatgtgggaggcagtgatgtcacgggactcggagatgagccgtgtcctgcagatgatggaccaaatagcacacagttacccttccaagaacaggacagctctcctggggcgcatgatggggaagacatccaacccattggcccccaaagcactttttgtgaagtccccctcctgaactcactcactgtgccttccagcctcagctgggccccaagtgctgaacagtggctgcctgggaccagagctgatgaaggcagccccgtggagcccagccaagagcaggacatcctaaccagcatggaggcctctggccacctcagcacaaatctctggcatgctgtcactgatgatgacacaggtcagaaagaaatacccatttctgaacgtgtcttggggagtgtgggaggacagctgactccggtctctgccttggcagccagcactcacaagccctggcttgagcagcctccacgggatcagacattgacgtccagcgatgaggaggacatctatgcccacgggcttccttcttcatcctcagagacgagtgtgacagagctcggacctagttgctcccagcaggacctgagccggctgggtgcagaggacgccgggctgctcaagccagatcagtttgcagaaagctggatgggctactcgggtcccggctatggcatcctcagcttggtggtctccgagaagtatatctggtgcctggactacaaaggcggcctgttctgcagcgcgttgccgggcgccgggctgcgctggcagaagtttgaagatgctgtccagcaggtggcagtctcgccctcaggagcccttctctggaagattgaacagaaatctaaccgggcttttgcttgtgggaaagtcaccatcaaggggaagcggcactggtacgaagccctgccccaggcagtgtttgtggccctgagcgatgacacggcctggatcatcaggaccagtggggacctatacttgcagacaggtctgagcgtggatcgcccttgtgccagagccgtaaaggtggactgtccctacccgctgtcccagatcacagcccggaacaatgtggtgtgggcgctgacagagcagagggccctcctgtaccgggagggcgtgagcagcttctgtccggaaggcgagcagtggaagtgtgacattgtcagcgaaaggcaagctttagaacccgtctgcataacgctcggggatcagcagactctctgggccctggacatccatgggaacctgtggttcagaactggcattatttccaagaagccccaaggagatgacgaccattggtggcaagtgagcatcacggactatgtggtgtttgaccagtgcagcttatttcagacgataatccatgccactcactcggtggccacagcagcccaagcccccgtagaaaaggtggcagataagctgcgcatggcgttttggtcccagcagcttcagtgccagccaagccttctcggggtcaataacagcggtgtctggatctcctcgggcaagaatgaattccacgtcgctaagggaagtctcataggcacctactggaatcatgtggttccccgtgggacagcttctgctacaaaatgggcctttgtgttggcttctgcagctcccacgaaggaaggaagcttcctgtggctgtgccagagcagcaaggacctgtgcagcgtcagcgcccagagcgcacagtcgcggccctccacggtgcagctgcctcccgaagccgagatgcgcgcctatgccgcctgccaggatgcgctgtgggcgctggacagcctcggccaggtgttcatcaggacgctctccaagagctgccccacgggcatgcactggaccaggctggacctctcccagctaggagctgtaaaattgacaagcttggcatgtggaaatcagcacatctgggcctgtgattccaggggtggagtttacttccgtgtagggactcagcctctcaatcccagtctcatgcttccagcctggataatgattgagccacctgtccagcccgccggggtcagcttggtcagcgtccattccagccccaacgaccagatgctgtgggtgcttgacagcaggtggaacgtgcacgtgcggaccgggatcaccgaggagatgcctgtggggaccgcctgggagcatgtgccagggttgcaggcctgccagctggcgctgagcaccaggaccgtgtgggcccgctgtccaaacggagacctcgcccggcggtacggcgtcacagacaagaaccccgccggggactactggaagaaaattcccggcagcgtgtcgtgtttcacagtgactgcgtcagatgagctgtgggctgtgggcccgcccggctacctcctccaacggctgacaaagacgttcagccactcgcacggcacccagaagagcagccaggccgccatgccccaccctgaggacctggaggacgagtgggaggtcatctgaaggagccctggccgagtcacgcggaggggcccggcgtctgtggcgggcacaggggcttcagagtgactccctggtggacgcgctgcctcaacacttgtccagacacctctggccaggttggacccgcacacttactttcatctatgttggtttctgtctcgttccagaacccacagcctccacccgtggctggcgtgattgctgcagcagtggcgcctcctagctcaggacagtggcgactgcccggctgcatgcactccgattacccacgtgctgccgtcctggtctcatccacagatagctccagcttttgttggtgggagtggtctccggaggcctcccagaaccaagggtagccgggcagctggtttggcccagggcctccttccacattagtagccccagggccagatggagccaaaggtcagctctctgcagcgcgggatgtgctcggtgatggctttgtcccatcataggggggtgtccccccagagacaaagctgcagagcacattccatgccagacgctctggccaggaagctgaggccgggcttgagaggagagcgctggccatgccaggagagaacccacgcacatgcacaccacaacacacaacacacctcacctcacaccacagcacacctcaccacaccacaccgcactgcaccatacctcaccacatctcaccacaccacagcacacctcaccacacaacacaccacaccccacaccgcactgcaccgcaccgcaccgcaccgtacctcgccacatctcaccacaccacaccacaccacacctcactgcccacacacggcgcaggctgcccgcctcctggagagcacacttcagctgaaacagtaaagcctgatgggtgcaaatggaacctggatgtgtgcacgtgtgtcccaggtagggacggcacaggagggtgcatggggcgtgggggagctgagcaagggtcgctcacttagaaatgtctttggaatggtgtttaactaatgctgctggcggacatcctaaaaccagatgcatcctcagaggacgagtctactaattattgcctttgttgttgtattacaaatctgcataaaatacctcatttcaaatcaaatcttacaaatttagaagagagatatgttttccgaaaacagtggaagccctttgttccttcccgggtttgtcctgagcctgcactgtcctcgcctgcagcctcagaggggcaggcatccccgcacagacttgactggcagggcggtcacgggacctgcgggctggctccgagtggcagcccatgccttctgcggggtatgggttgacacttgacaggttgaaaccagtgcctctatggacggctgctgtggccccttcagacaatgggcagtgcccaccccgcccactggcatctgcgtgtgagggctaggccgccctgccacacatcccgccccctcccggaggcagcttcaggacaggacaccaggctggctgctttttttagcctgcccctggcccaggcccagtccttggtgtcagggagcccccaggccgcaggtggagggtgataaaatatgttctctgacaggacccagccagccacataggtggaggttttccatgtccaaatgaggtcaagatgccgaaatcccagatctgacttcacacttcccttttctagaaccttttgtaaaagttggtggcagcagaggcagccccaggccgggctgcatctctctgtgtctgttgtgccttgcccggcgcctcacggatggcaaagctctcctcacccatgggactgtagtgcaattaaacccgcgtctaggtgatgcttttaaagttgtagcttcgtgctttgtacagttttctttctggttttaatttttagttgtgctttgagtcagtgcaataaactagactttttccaaacctggccgagtgtggtgcctgagctgtgagaagtgtcctcagccgacactcacgagggcagtgcaagggagaacctgccagcccagccccaccacagggagagtgcgtcagcagacctgtcctggcctggctggtgttgaaatacacaccggtttgcccaagtggctgttatgggggaatggccgctccagagctggctgtaccccatggtagcctctgaggaggacgctgtggggtgaggtccagggctgcctcctcatggagctgtgtgtgagcaggcgttggaggggttcgagcccctggttctgtatcttcagccagcaaacgaaaccatatcgcaaaccagagctgctggaaaccagcacacgcaaaagatgacgcccagcacagcagcaggacacaccatgtgccaggaaatgacctcagcaagaaacctcaggccgtgtgaagagcagcaaagctttccagaaggcataaaaggaaacttgaataaaggaagatatgttccacattcctggatggaggactacacacattatggaaagacctcattctttccaaaggaatttataggtgtagcttgatttcagttcaaatccccactgggattgttttgttggggcaggcagggaggaataatgttagtacccacaaatgcccatgactgtgcccaatgtgcttctcaccagagccctgcaaggggaagtctcattagccccttgagactcagagaggttaggtaacttgctcaaggtcacacagcactgggactggaagccagctctgtagaactgcagacctgtgctgtttgatgcctcctcactgtcccgtcactcctgggaagaagaaacgggtgagaactgctaagtgatgacaggtggagccccagcaggggccactctattgaatggcatggcccagaccctcggagggccaggcaacaggctagcaaggcccacagggagggagcagaatggagagggcatctcagatgcgcttaaggagcggcgggggcggggcatggggggtgtcacaactaatgtggccactgcttcattctctgggcaaaataatattaaatggattaaagaatctaaaaccagtgggaaaactgtctgatttctggatggcaaaggctttctaaactcaaaagtgataggacaagctacagaggaaaataagtacatagatttgatttctccaaaatacagaaatgctgctgggcacagtgatgtgcagttatagtcccagctacttgggaggccaaggcaggaggattacttgagcccaggagtttgaggctgcaatgaactatgatcacaccactgcactccagcctcggcgacagagcaagaccttgtttctcaaaaataaataaatagaaggaaataaatgtaaaaatgctgcaaattaaaaacctcaaagaagggaaataattgcaacaaatgggaattgatgttgaatatttaccttaaaaacctatacaacaataagaggagtgcgcccttcagcagcatgtatacaaaaattgcaacgatacagagattagcatggcccctgcacaaggatgactcgcaaattcataaagctttccataaatatatttattaaaaaccaataggaggagcacttcgagtcgagtgtaagggcccttcacaaaagcagaaggaacactggcccaaacccccagcaccccggaagcagaggtgagatgggagcagcttgggagccccccattggcgccgccctactggggaagccggtccgtacgtaggccttgcatctcgccacctccacttctgtcctcaagaacaagtcctaggtcaagggaaacagcacagcctgtttataattaggaaacacttaaaacagcctggcatttgggaacagccatgttaacgtgagcaaattcctctcatgaaatagcctgcagctattaagaagcacgtgtgtgcaggaagcggaggcgcaggacctcaccgcgccagcgtgaagttcccgggcatggtcatgaaagcgtggttctgtaagaaatcagagggagaaagggagagaagggggagggagacaacccaaacgttggagggtatttgttgtaaacttcaaacttttggcaggtttgaaatttttcataactccggggaggagcaagaggggtgaaaagaaacaagttctctacttgtgatcagcagctggtcatagtggttgcctggagtatatgcctttttgtatcctttgaatttccagccatgtaaatgtattatttattccaaaaataaagcagatttacattttaaaaa

SEQ ID NO: 14484 - DNA, 7557 bp, Homo sapiens
agacatcttagtacagggctcccctgcagcagctctgggctcacgctgccgtgcgttcaccaggtttgcctcttcaggaacgtttgaggggttgtctccaaagaacgtgaattgcttcattggatgtcaattcgtagtgtaaatgggtgttcagtttgagtttttgttttctttattaattgcaatggtaagctctgatcgtatttttgtaagctagacaaaaagtttgaaaattgagggacttttttagggatattaatatactaactcttcataaaaataatacgtgtttctctttctcattgttgctttaaagcaaccgaactaacgaagacgggcctatggatatgttagatatattccaattatttggcttcctctttaggaattctgttttaatgagctctctgctgtgggtgaacagtctactccctgactctaaaaggaaagtccattcattctttcatgctgctgttaggccattgttagtgaactggagctggtgtttcctgaacgatgttctcctgagctggaagacctcccatatctgcatggaatcatttgcttgctttttctttctttctttcttttttttttttttttgagacagagtcttgctgtgttgcccaggctggagtgcagtggtacaatctcagctcactgcgagctccacctcccaggttcgcactattctcctgcctcagcctccccagtagctgggactacaggcacccgccaccacgcccagctaatttttttgtatttttttagtggacacggggtttcactgtggtagccaggatggtcttgatctcctgacctcatgatccgcccgcctcagcctcccaaaatgctgggattacaggtgagagccactacgcccggctttgcttgttttttcttaaggttgtgttggccacgtcggcacctacgccagtggggacacttttgccttgaagcagcctggtttactgtcaggacattggaatagaagtcagacgaagccgaagctgagtctgtggcttgggacctgtctgttctctgtaacttcactgtgtttcgggatgaatttcccttaattctccctggtctctgtcactgtttaaaatattagtttgttcagcgttgtttttcttgcttgctttcactgtttgtttgaaaaatatttttctttagagactggctaacaacccactccacaagctgtcattacacagttgtgtgttttaattcatttctcgttggtatcatttaccttcaggtttgtctccttagccttttagaactttggttctattcctgactatattagttacttgtattcccaggccccttggtccctcactgtgctagcgggaactctgtatctccatgagattcacctgctcagttgaggcgtccttcagggcccagtcccatgtccttggtgggcagcagagcccttgtgccgggggcaccacaggcagagatgctcgacaggccctctagtccagcccagctgacactcggtgatcactggtggccccttgccttgcctgcgtcggcctgctccaggcctccagctgcagcgctatcctgccttccctttcctctctcctcctccatctcttcatcaaagtcctcttcacagtgaaaacaggccaactcagtgcaagtgtgttccttctgtgcaccttttccattcagctcatccagaactgatccttctctttgaatccctaaaggactttttcagcctctcctagggcactagttgtgcttaggatgtttatttggagacttatcaaacctaataatgtcatcagtgtttctcctcccgtgtgaggagcgcctgtcatgtgcccagctctgtggccatgtggttgatctgcttccgtctgcagtctttagagcagccctgtaaggtggagatgatccccacggcccaggaggaaagtgaagcttggagacgggcggtgacatggagcctgaagctgcatagccactgggtggtggccaagggcccaaacctgggtctggtggcctctttccccacttggggggacagaacaggatgtgttttagaaatctttctcccctcaatgcccagcatgaagacttttgtatagaaatatattctagtatttattggacagtgaatagaatttttatttccataggagcccttctctggaagattgaacagaaatctaaccgggcttttgcttgtgggaaagtcaccatcaaggggaagcggcactggtacgaagccctgccccaggcagtgtttgtggccctgagcgatgacacggcctggatcatcaggaccagtggggacctatacttgcagacaggtaaccgcgggccacgcttagaggcctgccagctctgccgtcactgcctctgctgcaccctgctttgctagtaacatgcttaccacaatcgctatgattaagaggctaaatccattcgaattaagacacttctgggaagagagtatttgccatttggcatgtattagcagtttcctgcattgacacaaactcaacccaggacaaatttagggcaaaaatgaataggattatttggtgagatacagaaacagaatcttattctcctatggccaaccaccgcatatcacgtatcctacaatgttagatcttaagaggtaagaatacagaggaaggacataaaattcatttccccctttaagctaaagtttaagtggctgcattttttttttcagccatatcaaagcccggctcctatatacttacttacccgtgggccaggaaaaaaaaagaaataatttgctcttttttattttgagacggagtctcgctctcttgcccaggctggcatgcagtggtgccatcttgactcactgcaacctctgcctcctgggttcaagtgatcctcctgcctcagcttcctgatcacaggctgggattacaggtgcccatcaccacgcccagccaatttttttgtatttttagtagagatggagtttcactatgtcggccaggctggtcttgaacttctgacctcaagtgatctgcccgcctcagcctcccaaagtgctgggattacaggtgtgagccaccacaccaggccataatttgctctaaatagcagttcaggccaggtgtggtggctcatgcctgtaatcccaacactttgggaggcctagacgagcagatcacctgaggtcaggagttcaagaccaacctggccaacatggtgaaactctgtctctactaaaaaaaaaaaaaaaaatacaaaaaattagctgggcgtggtggcgcttgcctgtaatcccagctacttgggagcctgaggcacaagaatcacttgaacctgggaggcagagcttgcagtgagctgagatcgcgccactgcactctccagcctggtgacagggcgagactccgtctcaaaacaaaacaaaacaaaaatagcagttcagcaagtcacaggaagctgccctcagggaagtttttagctgatggaagggcacagtgggacttgcttattaaaaataagctgtaatgacagtcagtgtttactgtcagcagaatggggaaggatcttccaccagcaatgtgatttatcagtatctggaaggactgtggggcaggagttatcgtcagttgtccagaggccacgttggatttatgtaaagatcagtcttccaggcgtttaatgttgttgattccaggagaatgttgttgttgttgttttgagacggaatctcgctctgttgcccaggctggagtgtagtggcacaatctcggctcactgcaacctccacttcctgggttcaagcgattctcctacctcagcctcccgagtagctgggactacaggcacatgccaccatgtccagctcacttttgtatttttagtagaggcagggtttcactatgttggccagtctggtcttgaactcctgaccttgtgatccgcccgcctcagcctcccaaaatgctggcattataggcgtgagccaccggcctcaggagcatgttttaatcactgctgtgagtcgtcagctggggatgagtcttcaggttgaagctcttgcacagctggctctctcctagctgtgtaagaacctctggcctgggtgcacagccatgctggcttcataggccatatgctggcccaggtctctccagcctagttcctgtgtctttctttaaatgaaagtagctctgtcaaggcacatgcacatctaagctgccaggacatttgagctttggtcatggggaagacaggaggtgcttctggcctgggggtgaggagcgagtgacctctaaaccagtagtgccagaggaatcaccaggacagtgatttcacatgaggtggccccacccagacctgttggattaggtccaatccctctggagactgctcaggagtgtgtcgtgtaagaagtcctgccggtgattcccacctagtttagtggaaggaaatatcacccaaggactgcaatactataggtgcgtctgtgattagtcacggagcatatttgagtactgagacctaattgcaggcctaaggtcaaggaatacagggttgtaggcgacagttggtctgtctgctcccctgggaatagcctttgagctcatttagacatactttattgacagaacacaaggaggcaaggggagagccctggacagggagccagggaccctgagctttggcctgccactgccttgcagtttgacagacctcagatttcatctgggaaattcggggtttcattttattagtggaacctcgcacccagtcagagcagagaggagccgccgtgctggagctctctgcaggaacgactgcaggcctcaggtccctgccaactccagcagcgctgcagccctctgcctggaagagctgctctgccctgcagcctttgggcctccatctggccactctcctgctcttggcttttgtgttcttctcttagaacttcttaagctacattgggacaccagataattctgaattgttcagttttcaaagagtgtctaaaactgttttcagatagatgttacatttaggcagaatttaaccactttatgttgattaaacttgacaacaaaaaagcggccggacagggcagctcctgcctgtaatcccagcactttgggaggctgaggtgggaggatctcttgagcccaggagtttgagatcagcctgggcaacgtagaaaggccccgtctatatttttaattaattaattaattaaagtttttttttaaagcactcatcataaaagaatatagcaaaataccaaaaaaggaaaaataagccaataaccaagtcaaaatgaggtgtggagttctgactgtgtgtctttggggcttcttcccatcttcctggcaggtctgagcgtggatcgcccttgtgccagagccgtaaaggtggactgtccctacccgctgtcccagatcacagcccggaacaatgtggtgtgggcgctgacagagcagagggccctcctgtaccgggagggcgtgagcagcttctgtccggaaggcgagcagtggaagtgtgacattgtcaggtactggcgggccagagactcctttcacatcgtgcttgtcctacccttcgttcttgtccacttgacaccacaaggcaccatgaggccgttcctgggaggcagcacctgcagcctccatggctataggctaagcttgaatctctgcctaattctgaccggcaaactggacgttgagtcagagctcgctttttaaaaatgctgccgccctctgcgcagccctgagcatcacagcgtcatgagtctgtcatgacggtctctattcagaattgcccaccgtcaggtagttctggtttagtgtctgtgacggcttaggtccaaatatttttctttattttcatgctaatcgaagttgatctctgaactgtagcttttttttttttttttgatacaggttctcactctgtcacccaggctggggtgcagtgccacgatcacggctcactgcagccttgacctccgggctcaggtgatcctcctgcctcagcctcctgagtagctgggactacagatgcatgccaccatgcccagctaatttttgtattttttgtagagatgagttttgggttttcatcatgttgcccagactcatctcgaactcttgggctcaagcaattctcctgccttggcctcccaaagtgctgggattacagacatgagccactatgcctggcccgatctctgaactgtaatttattaagctatttttttttttaccattcaagatgttagttatagaattgccatcagatcattttactagtatggaagtattaatagtcctttgaaaaactagattaggatattcttggtttgaatttagcaagccaataaactttcagtgaatacctattaagagccagaatggtccaggtgtggtggctcacgcctgtaatcccaacactttggaaggccaaggcaggcggatcacgaggtcaagagttcgagaccagactgaccaacatagtgaaatcccgtctctattaaaaatacaaaaattaaccgggcatctcaggaggctgaggcaggagaatcacttgaacctgggaggcggaagttgcagagagctgagatcgcaccattgcactccagcctgggtgacagagcaagactccatctcaaaaaacagacagacaaaaaaaagcaacaacaacaaaaagccagaatggtgctaggggctgggtgcgccaagagggctgagactggccctgctctcatcagttccaagtctcatgggggccccgtgcatggatggacacccattagcacagatggccctaaacaggagtgtggagcatgcagcactgagggaaccatggactccatgcagagatcaggaaggcagcatgcagagtggaccaacagctaagccttgaagctgacgaggacttccccatatggaaggagggggagggcgtctccagcaaagagggcagtgtctgcctaggtccagctgcacagaatagcctggcacatcgggggagtttacagtcattcccttggtgagggagggagtagagagatggaggcgctcaggggccttggattggcgggggaaggagtagagagatggaggcactcaggggccttggattggcgggggaaggagtagagagatggaggcactcaggggccttggattggtaggggaaggagtagagagatggaggcgctcaggggccttggattccttttgtgcctactcgcttttttcttaggttattttctctcttaagagtgttcccagccattctgggtcatcagtgtgtctttcaaaagctgccacccacttgaaccatatctcttgcacagtaatttaactcagacccaaacttccttccctggcacctgctgatccgctccagggccacgtctcttctcccagccacgcctgccgggagaccctggatgtccgcagtccagacacactgggcactctgcctatgggtgctgacccccctgttctcctccttattttcagcgaaaggcaagctttagaacccgtctgc

SEQ ID NO: 14485 - DNA, 570 bp, Homo sapiens
agacatcttagtacagggctcccctgcagcagctctgggctcacgctgccgtgcgttcaccaggtttgcctcttcaggaacgtttgaggggttgtctccaaagaacgtgaattgcttcattggatgtcaattcgtagtgtaaatgggtgttcagtttgagtttttgttttctttattaattgcaatggagcccttctctggaagattgaacagaaatctaaccgggcttttgcttgtgggaaagtcaccatcaaggggaagcggcactggtacgaagccctgccccaggcagtgtttgtggccctgagcgatgacacggcctggatcatcaggaccagtggggacctatacttgcagacaggtctgagcgtggatcgcccttgtgccagagccgtaaaggtggactgtccctacccgctgtcccagatcacagcccggaacaatgtggtgtgggcgctgacagagcagagggccctcctgtaccgggagggcgtgagcagcttctgtccggaaggcgagcagtggaagtgtgacattgtcagcgaaaggcaagctttagaacccgtctgc

SEQ ID NO: 14486 - DNA, 4281 bp, Homo sapiens
cggcggggccgacgagtccggaggggctgccgcgggagcccccaggtttccctagatgacaaataaacattccttttcctgcgtgaagatagtctgtggaaaccttggccatggcatcgatatcagagcctgttacattcagagagttctgcccgttgtactatctcctcaatgccattccgacaaagatccagaagggtttccgctctatcgtggtctatctcacggccctcgacaccaacggggactacatcgcggtgggcagcagcatcggcatgctctatctgtactgccggcacctcaaccagatgaggaagtacaactttgaggggaagacggaatctatcactgtggtgaagctgctgagctgctttgatgacctggtggcagcaggcacagcctctggcagggttgcagtttttcaacttgtatcttcattgccagggagaaataaacagcttcggagatttgatgtcactggtattcacaaaaatagcattacagctctggcttggagccccaatggaatgaaattgttctctggagatgacaaaggcaaaattgtttattcttctctggatctagaccaggggctctgtaactcccagctggtgttggaggagccatcttccattgtgcagctggattatagccagaaagtgctgctggtctctactctgcaaagaagtctgctcttttacactgaagaaaagtctgtaaggcaaattggaacacaaccaaggaaaagtactgggaaatttggtgcttgttttataccaggactctgtaagcaaagtgatctaaccttgtatgcgtcacggcccgggctccggctatggaaggctgatgtccacgggactgttcaagccacgtttatcttaaaagatgcttttgccgggggagtcaagccttttgaactgcacccgcgtctggaatcccccaacagtggaagttgcagcttacctgagaggcacctggggcttgtttcatgtttctttcaagaaggctgggtgctgagttggaatgaatatagtatctatctcctagacacagtcaaccaggccacagttgctggtttggaaggatccggtgatattgtgtctgtttcgtgcacagaaaatgaaatatttttcttgaaaggagataggaacattataagaatttcaagcaggcctgaaggattaacatcaacagtgagagatggtctggagatgtctggatgctcagagcgtgtccacgtgcagcaagcggagaagctgccaggggccacagtttctgagacgaggctcagaggctcttccatggccagctccgtggccagcgagccaaggagcaggagcagctcgctcaactccaccgacagcggctccgggctcctgccccctgggctccaggccacccctgagctgggcaagggcagccagcccctgtcacagagattcaacgccatcagctcagaggactttgaccaggagcttgtcgtgaagcctatcaaagtgaaaaggaagaagaagaagaagaagacagaaggtggaagcaggagcacctgtcacagctccctggaatcgacaccctgctccgaatttcctggggacagtccccagtccttgaacacagacttgctgtcgatgacctcaagtgtcctgggcagtagcgtggatcagttaagtgcagagtctccagaccaggaaagcagcttcaatggtgaagtgaacggtgtcccacaggaaaatactgaccccgaaacgtttaatgtcctggaggtgtcaggatcaatgcctgattctctggctgaggaagatgacattagaactgaaatgccacactgtcaccatgcacatgggcgggagctgctcaatggagcgagggaagatgtgggaggcagtgatgtcacgggactcggagatgagccgtgtcctgcagatgatggaccaaatagcacacagttacccttccaagaacaggacagctctcctggggcgcatgatggggaagacatccaacccattggcccccaaagcactttttgtgaagtccccctcctgaactcactcactgtgccttccagcctcagctgggccccaagtgctgaacagtggctgcctgggaccagagctgatgaaggcagccccgtggagcccagccaagagcaggacatcctaaccagcatggaggcctctggccacctcagcacaaatctctggcatgctgtcactgatgatgacacaggtcagaaagaaatacccatttctgaacgtgtcttggggagtgtgggaggacagctgactccggtctctgccttggcagccagcactcacaagccctggcttgagcagcctccacgggatcagacattgacgtccagcgatgaggaggacatctatgcccacgggcttccttcttcatcctcagagacgagtgtgacagagctcggacctagttgctcccagcaggacctgagccggctgggtgcagaggacgccgggctgctcaagccagatcagtttgcagaaagctggatgggctactcgggtcccggctatggcatcctcagcttggtggtctccgagaagtatatctggtgcctggactacaaaggcggcctgttctgcagcgcgttgccgggcgccgggctgcgctggcagaagtttgaagatgctgtccagcaggtggcagtctcgccctcaggagcccttctctggaagattgaacagaaatctaaccgggcttttgcttgtgggaaagtcaccatcaaggggaagcggcactggtacgaagccctgccccaggcagtgtttgtggccctgagcgatgacacggcctggatcatcaggaccagtggggacctatacttgcagacaggtctgagcgtggatcgcccttgtgccagagccgtaaaggtggactgtccctacccgctgtcccagatcacagcccggaacaatgtggtgtgggcgctgacagagcagagggccctcctgtaccgggagggcgtgagcagcttctgtccggaaggcgagcagtggaagtgtgacattgtcagcgaaaggcaagctttagaacccgtctgcataacgctcggggatcagcagactctctgggccctggacatccatgggaacctgtggttcagaactggcattatttccaagaagccccaaggagatgacgaccattggtggcaagtgagcatcacggactatgtggtgtttgaccagtgcagcttatttcagacgataatccatgccactcactcggtggccacagcagcccaagcccccgtagaaaaggtggcagataagctgcgcatggcgttttggtcccagcagcttcagtgccagccaagccttctcggggtcaataacagcggtgtctggatctcctcgggcaagaatgaattccacgtcgctaagggaagtctcataggcacctactggaatcatgtggttccccgtgggacagcttctgctacaaaatgggcctttgtgttggcttctgcagctcccacgaaggaaggaagcttcctgtggctgtgccagagcagcaaggacctgtgcagcgtcagcgcccagagcgcacagtcgcggccctccacggtgcagctgcctcccgaagccgagatgcgcgcctatgccgcctgccaggatgcgctgtgggcgctggacagcctcggccaggtgttcatcaggacgctctccaagagctgccccacgggcatgcactggaccaggctggacctctcccagctaggagctgtaaaattgacaagcttggcatgtggaaatcagcacatctgggcctgtgattccaggggtggagtttacttccgtgtagggactcagcctctcaatcccagtctcatgcttccagcctggataatgattgagccacctgtccaggtaagcagaagttagctggtggaactcactcttcagtaagacagaaactgtgaggatgctggtactgggaaaaaggatctgcacagcctctagaggcctcccagcaaatgcggggagccatgcccccagggtctacacactctcgttcatcaacatcacaactggaattcgggatttgtgaagtttagagctgaacagactgttacagattatgagtcaacacgtatattttctctttcaaaataataatatttcgtttttgactttttactaagtgaatattattttttaaatctgcctatatattggaacctctattttataataataatgataataaatcagtacccagaagtataaagaaggtaaaagttactttgaa

SEQ ID NO: 14487 - DNA, 874 bp, Homo sapiens
ggggctcaggagggaccctgtctgcccacagggttgcaggcctgccagctggcgctgagcaccaggaccgtgtgggcccgctgtccaaacggagacctcgcccggcggtacggcgtcacagacaagaaccccgccggggactactggaagaaaattcccggcagcgtgtcgtgtttcacaggcaggtgcccggggccagtgggcttaaggccccttggggttcccagggctcctgtggacgatgtcggggggctctcaaagaagccgaccccactgggctccaatctctcaaagcaagaactgagggcaaagccaggagtgtgtcccagggagggaaggggctggacacctgggctctgccagagtctcctgggcaaggacaaggtgctgttgacatccacttacagctgagggtacgaagttcacatggagatggtggcttgtccagtgtcccccacctagaatgtggcaagcccagacctgcgcccaagctcccagctccatctgtgcccaccccacaggctgtgtgattgacaagtatgtgattggctcttgtccctgcagtgactgcgtcagatgagctgtgggctgtgggcccgcccggctacctcctccaacggctgacaaagacgttcagccactcgcacggcacccagaagagcagccaggccgccatgccccaccctgaggacctggaggacgagtgggaggtcatctgaaggagccctggccgagtcacgcggaggggcccggcgtctgtggcgggcacaggggcttcagagtgactccctggtggacgcgctgcctcaacacttgtccagacacctctggccaggttggacccgcacacttactttcatctatgttggtttct

SEQ ID NO: 14488 - DNA, 491 bp, Homo sapiens
ggggctcaggagggaccctgtctgcccacagggttgcaggcctgccagctggcgctgagcaccaggaccgtgtgggcccgctgtccaaacggagacctcgcccggcggtacggcgtcacagacaagaaccccgccggggactactggaagaaaattcccggcagcgtgtcgtgtttcacagtgactgcgtcagatgagctgtgggctgtgggcccgcccggctacctcctccaacggctgacaaagacgttcagccactcgcacggcacccagaagagcagccaggccgccatgccccaccctgaggacctggaggacgagtgggaggtcatctgaaggagccctggccgagtcacgcggaggggcccggcgtctgtggcgggcacaggggcttcagagtgactccctggtggacgcgctgcctcaacacttgtccagacacctctggccaggttggacccgcacacttactttcatctatgttggtttct

SEQ ID NO: 14489 - DNA, 8844 bp, Homo sapiens
cgtggagcccagccaagagcaggacatcctaaccagcatggaggcctctggccacctcagcacaaatctctggcatgctgtcactgatgatgacacaggtcagaaagaaatacccatttctgaacgtgtcttggggagtgtgggaggacagctgactccggtctctgccttggcagccagcactcacaagccctggcttgagcagcctccacgggatcagacattgacgtccagcgatgaggaggacatctatgcccacgggcttccttcttcatcctcagagacgagtgtgacagagctcggacctagttgctcccagcaggacctgagccggctgggtgcagaggacgccgggctgctcaagccagatcaggtatgtgggttcgggtggtgggaaaagtagctgaggcttctttcttaagggtaataattgtcaagactgattattttccttctcatggaaagaaattctattcctactgcaaaatccgtaggccaactctgttttcaagtctgggtttcaggggatttccagcacagggactatgaatggcttgaactacttctgacctgttctaccctgctcagtaacctgcctccccaaccaaggtagcgtcttgctgtttcctctgaccccacaagtgcaggctggtgtaggcacttactgttagccatcgtagggcagggctgaattggcctggggccatctcagaaaaccagtgggcagaggactgtccacctgtggagtagagaaagctctgagcagtttggaggcagggagtctcctgtccttctcctcacacccctccaaggaaccatctgcaagagcacgaggccatttccagaactgctgtctcctcaacctccgaacagtggctccaaggctcccctgcgagctgtacaggaaccagtttggagtaaccagtctttgtaggtccacccagcacatgtaactaggagatgacttttaactgtccttgagcattttatattaaaagtgatttttttaaaagtgcctacttcccttagcaagtaattattactagatatatttgtttcaaaactgtgtcttgccctgtctcctactaactgtcgatgtgaggtatgaattatggctgcgcacttacagccacgtgtgctttccacagtctacgctggcttctgtcagtgctagcagtgtgacgctttgtcagtgctcaccatgtgcaggtatcccacaaagcactttagaggtttaactcttttacttctctaaacacgaactataaaataggcactcttcttgtccccattttacagaggagaaaatggaagcacagaacagctagacagcttgcacaaggtcacatagcaaatgaagggcgggccccaggaccccctcactcaccctctgtgctgtcatgcctcagaagtgaaacatgctgcttacttgttttgagacaaaacgccataagtctggcttttttttcttctttctttcttttttttttttttttctgagacagggtctcactctgtcacccaggatggagcgcagtggcgcaatcatggctcattgctgcctcgacctccccaagctcaagtgatccacctgcctcagcttcctgagtcactgggactacaggcatgtgccaccatgcccagctaatttttgtattttttgtagagaaggggttttgccatattgcccaagctggtctcgaactcctgagctcaagcaatctgcctgcctcggcttcccaaagtgctgggattacaggtgtgagctgctgtgcctggccaagggtggccttttattcagtcatccggcatttatcttttcaacccagtggttcttgagtggccttgactgtcagcctctgtgattatgctggggaccacagtgcagatggcagctagttgtggattccatcttcctgagcctcagagtcttgagggggagccaggtacatgttcacatcctcgcagttgagtgggactcaggtgagggtactgagcaaagtacagggctgcaggaagcgcaagcagcatggccccctaatgtctgggcgttagccaggcagactgtcggtggggtggggtattggaattctaggccagaaatttaggaaagccctcacttaggtgacagggatcctggccctttgagcccctgactctctaacttcctcccttcctcatcccactccaggtagctgggaagccaagaaattttatggtgtgtttttatttggaggttcggtgtggaagtaagacttgccatggtgagcagggctggattgagaagagttgggcaccattttctttgaagtagttaacttctatgtgggtatctgtacaaatacatttatcttctttgcatttattgaaaagtattaaagtacaaagactttatttagctttgatttttaaaagaattctagcaaggtcgggcacagtggctcacgcctgtaatcccagcactttgggaggccaaggtgggcgaatcacctgaggtcaggagttcgagaccagcctggccaacatggcgaaaccccgtctctactaaaaatacaaaaaatagccgggtgtggtggcagatgcctgtaatcccaagtactcaggagcctgaggcaggagaattgcgacttgcttgaacccaggaggcggaggttgcagtgagccgagattgtgcccctgtactccagcctgggcgacagagcgagtctctgtctcaaaaaggaaaaaaaaaagaaaatatggtggaaaaaagaaagacagtggtagtgccatatatccagtgcctctgtaatgattagactacaaaaaattgacttgcatccaaatgttgaagaacctggctctttgtgtaaggtgaggtatgcctgcagaataatagcagctccttcgtaacgtgatgtgatgctctaagcgttacatttgcaaaggtgttagaacaggagaaaatgtcatccagggactccagggagtctttgtagggagacagcagcacgcgtctcagaaggtttgtagtagaggggtgtccacagatagcaggggttgggagaagggttgacttggcgtcttgctgacccgttttaccgtctcgtgttaatgatatcctctcacctttcttactgagaacagtaagccaaatgtggctgtgtcctctgccacagaactcactggctcttcccttgttagtttgcagaaagctggatgggctactcgggtcccggctatggcatcctcagcttggtggtctccgagaagtatatctggtgcctggactacaaaggcggcctgttctgcagcgcgttgccgggcgccgggctgcgctggcagaagtttgaagatgctgtccagcaggtggcagtctcgccctcaggttcgcctccccgctccctgctcccgctccctgctcccgctcgccgctcctgctccccgcccccggggtgcagacatcttagtacagggctcccctgcagcagctctgggctcacgctgccgtgcgttcaccaggtttgcctcttcaggaacgtttgaggggttgtctccaaagaacgtgaattgcttcattggatgtcaattcgtagtgtaaatgggtgttcagtttgagtttttgttttctttattaattgcaatggtaagctctgatcgtatttttgtaagctagacaaaaagtttgaaaattgagggacttttttagggatattaatatactaactcttcataaaaataatacgtgtttctctttctcattgttgctttaaagcaaccgaactaacgaagacgggcctatggatatgttagatatattccaattatttggcttcctctttaggaattctgttttaatgagctctctgctgtgggtgaacagtctactccctgactctaaaaggaaagtccattcattctttcatgctgctgttaggccattgttagtgaactggagctggtgtttcctgaacgatgttctcctgagctggaagacctcccatatctgcatggaatcatttgcttgctttttctttctttctttcttttttttttttttttgagacagagtcttgctgtgttgcccaggctggagtgcagtggtacaatctcagctcactgcgagctccacctcccaggttcgcactattctcctgcctcagcctccccagtagctgggactacaggcacccgccaccacgcccagctaatttttttgtatttttttagtggacacggggtttcactgtggtagccaggatggtcttgatctcctgacctcatgatccgcccgcctcagcctcccaaaatgctgggattacaggtgagagccactacgcccggctttgcttgttttttcttaaggttgtgttggccacgtcggcacctacgccagtggggacacttttgccttgaagcagcctggtttactgtcaggacattggaatagaagtcagacgaagccgaagctgagtctgtggcttgggacctgtctgttctctgtaacttcactgtgtttcgggatgaatttcccttaattctccctggtctctgtcactgtttaaaatattagtttgttcagcgttgtttttcttgcttgctttcactgtttgtttgaaaaatatttttctttagagactggctaacaacccactccacaagctgtcattacacagttgtgtgttttaattcatttctcgttggtatcatttaccttcaggtttgtctccttagccttttagaactttggttctattcctgactatattagttacttgtattcccaggccccttggtccctcactgtgctagcgggaactctgtatctccatgagattcacctgctcagttgaggcgtccttcagggcccagtcccatgtccttggtgggcagcagagcccttgtgccgggggcaccacaggcagagatgctcgacaggccctctagtccagcccagctgacactcggtgatcactggtggccccttgccttgcctgcgtcggcctgctccaggcctccagctgcagcgctatcctgccttccctttcctctctcctcctccatctcttcatcaaagtcctcttcacagtgaaaacaggccaactcagtgcaagtgtgttccttctgtgcaccttttccattcagctcatccagaactgatccttctctttgaatccctaaaggactttttcagcctctcctagggcactagttgtgcttaggatgtttatttggagacttatcaaacctaataatgtcatcagtgtttctcctcccgtgtgaggagcgcctgtcatgtgcccagctctgtggccatgtggttgatctgcttccgtctgcagtctttagagcagccctgtaaggtggagatgatccccacggcccaggaggaaagtgaagcttggagacgggcggtgacatggagcctgaagctgcatagccactgggtggtggccaagggcccaaacctgggtctggtggcctctttccccacttggggggacagaacaggatgtgttttagaaatctttctcccctcaatgcccagcatgaagacttttgtatagaaatatattctagtatttattggacagtgaatagaatttttatttccataggagcccttctctggaagattgaacagaaatctaaccgggcttttgcttgtgggaaagtcaccatcaaggggaagcggcactggtacgaagccctgccccaggcagtgtttgtggccctgagcgatgacacggcctggatcatcaggaccagtggggacctatacttgcagacaggtaaccgcgggccacgcttagaggcctgccagctctgccgtcactgcctctgctgcaccctgctttgctagtaacatgcttaccacaatcgctatgattaagaggctaaatccattcgaattaagacacttctgggaagagagtatttgccatttggcatgtattagcagtttcctgcattgacacaaactcaacccaggacaaatttagggcaaaaatgaataggattatttggtgagatacagaaacagaatcttattctcctatggccaaccaccgcatatcacgtatcctacaatgttagatcttaagaggtaagaatacagaggaaggacataaaattcatttccccctttaagctaaagtttaagtggctgcattttttttttcagccatatcaaagcccggctcctatatacttacttacccgtgggccaggaaaaaaaaagaaataatttgctcttttttattttgagacggagtctcgctctcttgcccaggctggcatgcagtggtgccatcttgactcactgcaacctctgcctcctgggttcaagtgatcctcctgcctcagcttcctgatcacaggctgggattacaggtgcccatcaccacgcccagccaatttttttgtatttttagtagagatggagtttcactatgtcggccaggctggtcttgaacttctgacctcaagtgatctgcccgcctcagcctcccaaagtgctgggattacaggtgtgagccaccacaccaggccataatttgctctaaatagcagttcaggccaggtgtggtggctcatgcctgtaatcccaacactttgggaggcctagacgagcagatcacctgaggtcaggagttcaagaccaacctggccaacatggtgaaactctgtctctactaaaaaaaaaaaaaaaaatacaaaaaattagctgggcgtggtggcgcttgcctgtaatcccagctacttgggagcctgaggcacaagaatcacttgaacctgggaggcagagcttgcagtgagctgagatcgcgccactgcactctccagcctggtgacagggcgagactccgtctcaaaacaaaacaaaacaaaaatagcagttcagcaagtcacaggaagctgccctcagggaagtttttagctgatggaagggcacagtgggacttgcttattaaaaataagctgtaatgacagtcagtgtttactgtcagcagaatggggaaggatcttccaccagcaatgtgatttatcagtatctggaaggactgtggggcaggagttatcgtcagttgtccagaggccacgttggatttatgtaaagatcagtcttccaggcgtttaatgttgttgattccaggagaatgttgttgttgttgttttgagacggaatctcgctctgttgcccaggctggagtgtagtggcacaatctcggctcactgcaacctccacttcctgggttcaagcgattctcctacctcagcctcccgagtagctgggactacaggcacatgccaccatgtccagctcacttttgtatttttagtagaggcagggtttcactatgttggccagtctggtcttgaactcctgaccttgtgatccgcccgcctcagcctcccaaaatgctggcattataggcgtgagccaccggcctcaggagcatgttttaatcactgctgtgagtcgtcagctggggatgagtcttcaggttgaagctcttgcacagctggctctctcctagctgtgtaagaacctctggcctgggtgcacagccatgctggcttcataggccatatgctggcccaggtctctccagcctagttcctgtgtctttctttaaatgaaagtagctctgtcaaggcacatgcacatctaagctgccaggacatttgagctttggtcatggggaagacaggaggtgcttctggcctgggggtgaggagcgagtgacctctaaaccagtagtgccagaggaatcaccaggacagtgatttcacatgaggtggccccacccagacctgttggattaggtccaatccctctggagactgctcaggagtgtgtcgtgtaagaagtcctgccggtgattcccacctagtttagtggaaggaaatatcacccaaggactgcaatactataggtgcgtctgtgattagtcacggagcatatttgagtactgagacctaattgcaggcctaaggtcaaggaatacagggttgtaggcgacagttggtctgtctgctcccctgggaatagcctttgagctcatttagacatactttattgacagaacacaaggaggcaaggggagagccctggacagggagccagggaccctgagctttggcctgccactgccttgcagtttgacagacctcagatttcatctgggaaattcggggtttcattttattagtggaacctcgcacccagtcagagcagagaggagccgccgtgctggagctctctgcaggaacgactgcaggcctcaggtccctgccaactccagcagcgctgcagccctctgcctggaagagctgctctgccctgcagcctttgggcctccatctggccactctcctgctcttggcttttgtgttcttctcttagaacttcttaagctacattgggacaccagataattctgaattgttcagttttcaaagagtgtctaaaactgttttcagatagatgttacatttaggcagaatttaaccactttatgttgattaaacttgacaacaaaaaagcggccggacagggcagctcctgcctgtaatcccagcactttgggaggctgaggtgggaggatctcttgagcccaggagtttgagatcagcctgggcaacgtagaaaggccccgtctatatttttaattaattaattaattaaagtttttttttaaagcactcatcataaaagaatatagcaaaataccaaaaaaggaaaaataagccaataaccaagtcaaaatgaggtgtggagttctgactgtgtgtctttggggcttcttcccatcttcctggcaggtctgagcgtggatcgcccttgtgccagagccgtaa

SEQ ID NO: 14490 - DNA, 584 bp, Homo sapiens
cgtggagcccagccaagagcaggacatcctaaccagcatggaggcctctggccacctcagcacaaatctctggcatgctgtcactgatgatgacacagagacgagtgtgacagagctcggacctagttgctcccagcaggacctgagccggctgggtgcagaggacgccgggctgctcaagccagatcagtttgcagaaagctggatgggctactcgggtcccggctatggcatcctcagcttggtggtctccgagaagtatatctggtgcctggactacaaaggcggcctgttctgcagcgcgttgccgggcgccgggctgcgctggcagaagtttgaagatgctgtccagcaggtggcagtctcgccctcaggagcccttctctggaagattgaacagaaatctaaccgggcttttgcttgtgggaaagtcaccatcaaggggaagcggcactggtacgaagccctgccccaggcagtgtttgtggccctgagcgatgacacggcctggatcatcaggaccagtggggacctatacttgcagacaggtctgagcgtggatcgcccttgtgccagagccgtaa

SEQ ID NO: 14491 - DNA, 1344 bp, Homo sapiens
gcatgctgccactaacatgtccccagttccggaagtctcctgtcctttctcttgtcacccaactcctgccttccctgaaagtcccttcccgcttccagcccgccggggtcagcttggtcagcgtccattccagccccaacgaccagatgctgtgggtgcttgacagcaggtggaacgtgcacgtgcggaccgggatcaccgaggagatgcctgtggggaccgcctgggagcatgtgccaggtaggagcctgcagacagggcctgtggtgccggccagccggggctaccatcactgggggctgctgggcgctccctccaggccgctgtctgtgaggcagcctttgtgctggggctgtgctgtcgccgctgcttcctgggccaggggacaagcctcccatcatgttccttatcaggggaacccaggccgtcctgctggtgcttttgtgggagggcagtttgcacactgcccaggcccttctgtcctttgacttctggctttcggtggctttgctggccctgccaactggtcgtcctttccctcggctcctgccccaagcccagcccatcatgggcactccgtccccgcagggaccctggtggaggtgtgcagcgtcacaagagtcggcttgggaagcagcggcccatcccgtccatggcaggggctcaggagggaccctgtctgcccacagggttgcaggcctgccagctggcgctgagcaccaggaccgtgtgggcccgctgtccaaacggagacctcgcccggcggtacggcgtcacagacaagaaccccgccggggactactggaagaaaattcccggcagcgtgtcgtgtttcacaggcaggtgcccggggccagtgggcttaaggccccttggggttcccagggctcctgtggacgatgtcggggggctctcaaagaagccgaccccactgggctccaatctctcaaagcaagaactgagggcaaagccaggagtgtgtcccagggagggaaggggctggacacctgggctctgccagagtctcctgggcaaggacaaggtgctgttgacatccacttacagctgagggtacgaagttcacatggagatggtggcttgtccagtgtcccccacctagaatgtggcaagcccagacctgcgcccaagctcccagctccatctgtgcccaccccacaggctgtgtgattgacaagtatgtgattggctcttgtccctgcagtgactgcgtcagatgagctgtgggctgtgggcccgcccggctacctcctccaacggctgacaaagacgttcagccactcgcacggcacccagaagagcagccaggccgccatgccccaccct

SEQ ID NO: 14492 - DNA, 512 bp, Homo sapiens
gcatgctgccactaacatgtccccagttccggaagtctcctgtcctttctcttgtcacccaactcctgccttccctgaaagtcccttcccgcttccagcccgccggggtcagcttggtcagcgtccattccagccccaacgaccagatgctgtgggtgcttgacagcaggtggaacgtgcacgtgcggaccgggatcaccgaggagatgcctgtggggaccgcctgggagcatgtgccagggttgcaggcctgccagctggcgctgagcaccaggaccgtgtgggcccgctgtccaaacggagacctcgcccggcggtacggcgtcacagacaagaaccccgccggggactactggaagaaaattcccggcagcgtgtcgtgtttcacagtgactgcgtcagatgagctgtgggctgtgggcccgcccggctacctcctccaacggctgacaaagacgttcagccactcgcacggcacccagaagagcagccaggccgccatgccccaccct

SEQ ID NO: 14493 - DNA, 1028 bp, Homo sapiens
atcccgcctcctccggcccggcggggccgacgagtccggaggggctgccgcgggagcccccaggtttccctagatgacaaataaacattccttttcctgcgtgaagatagtctgtggaaaccttggccatggcatcgatatcagagcctgttacattcagagagttctgcccgttgtactatctcctcaatgccattccgacaaagatccagaagggtttccgctctatcgtggtctatctcacggccctcgacaccaacggggactacatcgcggtgggcagcagcatcggcatgctctatctgtactgccggcacctcaaccagatgaggaagtacaactttgaggggaagacggaatctatcactgtggtgaagctgctgagctgctttgatgacctggtggcagcaggcacagcctctggcagggttgcagtttttcaacttgtatcttcattgccagggagaaataaacagcttcggagatttgatgtcactggtattcacaaaaatagcattacagctctggcttggagccccaatggaatgaaattgttctctggagatgacaaaggcaaaattgtttattcttctctggatctagaccaggggctctgtaactcccagctggtgttggaggagccatcttccattgtgcagctggattatagccagaaagtgctgctggtctctactctgcaaagaagtctgctcttttacactgaagaaaagtctgtaaggcaaattggaacacaaccaaggaaaaggactctgtaagcaaagtgatctaaccttgtatgcgtcacggcccgggctccggctatggaaggctgatgtccacgggactgttcaagccacgtttatcttaaaagatgcttttgccgggggagtcaagccttttgaactgcacccgcgtctggaatcccccaacagtggaagttgcagcttacctgagaggcacctggggcttgtttcatgtttctttcaagaaggctgggtgctgagttggaatgaatatagtatctatct

SEQ ID NO: 14494 - DNA, 2799 bp, Homo sapiens
ggagcggcggtgaaggtcctgggtgaggtagggttggatggtgcttgccgcgtatcatggctgcctccggaaaactcagcacttgccgtctccctccgttgcccacgattcgagaaatcattaagttgttaagactgcaagcagcgaagcagctatcacagaatttcctcctggacttgaggctgacagataagattgtaaggaaagctggcaatctgacaaatgcttatgtttacgaagtgggccctgggccagggggaatcacaagatctattcttaatgccgacgtcgctgaacttctggtggttgaaaaggacactcgatttattcctggattacagatgctttctgatgcagcacctgggaaactgagaattgttcatggagatgtcttgacatttaaggtagaaaaggctttttcagaaagtcttaaaagaccctgggaagatgatcctccaaatgtacatattattggaaatctgccttttagtgtttcaactccactgattatcaagtggcttgaaaatatttcctgtagagatggaccttttgtttatggcagaactcagatgactttgacttttcaaaaggaagtggcagagagacttgcagccaatacaggaagcaaacagcgtagtcgcctctctgttatggctcagtacctctgcaatgttcgacacatctttacgattccaggacaagcttttgtccccaaaccagaggtggacgtgggcgtggtgcacttcactcccttgatacagcccaagatagagcagccattcaagctggtggaaaaagtggttcagaatgtatttcagttccgaaggaaatactgccatcgagggctcagaatgttattccctgaagcgcagcgcttggaaagcacgggcaggctgttagagttggcagacatagaccctactcttcggccccgccagctctccatctcacactttaagagcctctgtgatgtatacagaaaaatgtgtgatgaagacccacaactctttgcatataatttcagagaagaactcaagcgaagaaaaagcaaaaatgaagaaaaagaagaggatgacgcagagaattacagactctagctgctgcctgggggcgagcagcctaccagatgtcgatttgcactacgtggagcttcttatataggtactcttttgtctttacagaatgacgatacaaatgccaatgaccagatgtgacttattttccttttactatacagcttggcagagaaaataaatatcatcaaataagatacagtacaagctttcttttaatatatactgtatagatagttatgacatgtttagtataaacagcatctattacaatctatcttacaaaaatgaagtatctgcacattttgcccctaaaccacattaaaataacttaaatatgctttaaataaagcaaaaactaacaaacagctgaaagaaaatgcccagaggattttaaaaaatggccctttgaaaactattaatcacgacttccccagccttactttttccacataacttaattattagaatgtaattttaaggatcctaaatcatttgatacctgctcaaagtggatataaactaagtaatttacagattctgaccagtttcatctaggtttctgatccacaataaattaaaataacttaaatctttacaaccattttgtgggaaaatgtatactgcacaaaacccaggaatgaacagtttttttttttttttttttttgcaatttccactttaccaccagtttaaaagtaaaatgaggaatttaacccatatctggattgaatcatactatgattttccgtggctctctgtttcataaaaacactcctcactgacaacagatgttaaactctggacactgaattctcgctctagaacagaatttaggtcgatggtggcattttcagactgactgtcaagggactggtgacggatctgcgccttgagcaaagttcctctgtccctcttggtgctgttggcttttcgtttaatggggcagaagtgcccccggaccagtttgggctgctctcctcctttctgaccctcacccgactccgggccaggctgctgctcagcctcggggtgaacgtctgggtcctcggaaatcctcagtctctggaactgaatttcgatgtctttagtagggctgccctgcttcacagtctgacggtggtcatcatcttcatcgctcaggatgtcactctctttgatgagattgtcggcaaaatctgccaagccggggtgtgggtatttcccgggagaagtgctcttggagtcctgcctgccctcagccgtggggcagccgctgctctgggtgccgctgctcaagctgccctcgtcagagtccagcaaggttcccttgccagtctcaccggtccactcgttgctggaggaattcttcaggacttttaaagacctggatgaagctacagtgagaaaaacacatttcgctgtgatacagaaacaggttacacaatgtgtaatgtttgcctcaaagcttgtgtaagatttaacattaagattttattttatgatatgacttcagttagcaactatcctggtaattaggcaaaaatgtagctactgaaaacatggacatttttgacttaggtttacagttgtaagttaggcaattcagcatttttagattaccagagctcaattatgtaaatagaactagacactagaaactactacatgggctaagattcttattttgccaaggagtaagttgaaaagttaattggtaataataaatctaggctcctttctttca

SEQ ID NO: 14495 - DNA, 3251 bp, Homo sapiens
tggctgcctccggaaaactcagcacttgccgtctccctccgttgcccacgattcgagaaatcattaagttgttaagactgcaagcagcgaagcagctatcacagaatttcctcctggacttgaggctgacaggtggatggcttagcagtgctccccggatgtctccccagtgtccgtgggggcgtgggccggggggtcttgcacgtccccgcgggcgggtgtccaggcactggcgtgcgacgggcttttggtcaggtccttcgacctctttgtatcagaactccggtcccaccgcccaggagacacgtgaagtgcgttgattgctcacaaaactccgcgttcgggggggtgtagcctgccggcaggctgcataaatgccaagctccctaggggaggaagggttcatgggtcgtgaaaggcgctagtgaatattggaatctgggtcactgtgaaatcaatcattctgaaatagtacagcacatgctgactgcagttgctttacatgcagtttaaagttaccagaatttaaattgatgcgaggattttatcaataacttggtgaaaagagtatccctcgtatgattcgttttttaaacgtttacctgttcagtctaagcctcgggggcgctaatattcattcataagtacatattacacaagcaacattgtgctagtgccgggggtaggatatgggcgtgaacaaggcggtgtttcctcgaggagcttacttttagcaagtttacattcccacacctaattgtttaaagttactttttatgagatataatttatgtgcaataaaattaataagtttgaagtgctcaatttgatgagttttgacgaatgtatttatatattggtttaaccaccatcaccattgcttagtgatgttctatgagatgaggttgcaaaaatatattacaaatacgtctactaagtcacggctggagtacttaggttttgagattttcatatttcattctatttagtcccacttcagaagttgaaaagagcagtaaatcacacccaaaaagttcattttcacttaaatgaagcacactccagaaaacataaaatgttttatttcttggacatgtagtctttattctgcctgtaccaatatgactttggataaaataatttaactcaagttttctcttttttttttttttctttttttaagatggagtttcactcttgttgcccaagctggagtgcaatggcatgatctcagctcactgcaacctccgcctccccggttcaagtgattctcgtgcctcagcctcccaggtagctaggattacaggcgtgagccaccgtgcctagctaattttgtgtttttagtaaagacagggtttcactatgttgctcaggctggtctcaaactcctgatctcaagtgatccactcgcctcggccttccaaagtgttgggattacaggtgtgagccaccatgtccagtagtttcctcatcttttaattggaagaagggcctactactttaaaagattgcccactctaaaattctttggttctagtaatagctagtaccagccttttctgcttgttattagccacattctaaatataaatcaccattctcagggcagaagttataggtctgtgtattttttaaaatccttcaaatacattttctcatgagcctttatcttcaggagtaagtttcaaattctagatattatccactctttctatgggaaccagagttaacggagatgagggtacttagctgaggttagaagctcaggcagaagagagcaagattgaaatccaagctcattgatttgatagcgcttctttaatattcatttgtatttcaatgtgcctgaaaagtttgagagcagagacctgcctactgttgtagctctccattttaaagaaggagagtattaaatttattccataatgtatcattcctgttccctctgagaggcattggctttaggatttatacctatgttgaagtccatgaccttgtacaaataaaacaatagacaaggaaactgaaaagttaagagaaatgaaattgggataggagtccttggttaacatgtaaggattaggtgagaatgtgtgtaaatccatcataatagataagatggtcagtggatgctaattccctccctgttaaaagactaaaccatttttggatggctgagaaactagtttccgcattttagctgacaaagttatgttgttgaaaacaagcaaaaataggactgtgaacacctacaagaagtgctggtatgtttttagtgactaaatttccactatcctaggaagaccagttccttggatttccatatctcagaatcactaagaccagcccattgcatgtttttccagatgtgatgactggttgcacagagtcagtactctacctttttatgatgtcttaagggctgctaacttgaatttgattaattaaaaaattaatttttctgtattaacatgcatgtgtgcaaagctttaaaaaccctcaactgctcaatttaactttttcctgaaaatgactaagaattcaaatttctgaaaatcttacgatctaagaacttattgccattgccatagtgaccaccaccaagatgtctctagataaaaataagacttcagcactttttgcttttggatttcactagcaatactgaagattctgaatgtgaaactagtattgcttattcagatattcaatgttcaataactatagaaaagtgctgcattcttatccagtctgttcttaggagtcggttggtttcaaatcagtttgaaaggaatttgcatgggacagatggaaactacaatattagctaaatttaagctaagaaactttgtcatgataatcctgtgtgtgttaagggactggtacagttcaatggtgatgtggtagcatattcgattgccacttcatgttaatttaggtagagagttaaatagtcaaataaatattatacataaaggatcaattgattgggtaatggctgaatttttatagaagatttttctctctaaatttcatacgttgaaatttgccaagttaattgagataactaaaactctttttcctctagataagattgtaaggaaagctggcaatctgacaaatgcttatgtttacgaagtgggccctgggccagggggaatcacaagatctattcttaatgccgacgtcgctgaacttctggtggttgaaaaggacactcgatttattcctggattacaggtgagatgctt

SEQ ID NO: 14496 - DNA, 474 bp, Homo sapiens
tggctgcctccggaaaactcagcacttgccgtctccctccgttgcccacgattcgagaaatcattaagttgttaagactgcaagcagcgaagcagctatcacagaatttcctcctggacttgaggctgacaggtggatggcttagcagtgctccccggatgtctccccagtgtccgtgggggcgtgggccggggggtcttgcacgtccccgcgggcgggtgtccaggcactggcgtgcgacgggcttttggtcaggtccttcgacctctttgtatcagaactccggtcccaccgcccaggagacacgtgaaataagattgtaaggaaagctggcaatctgacaaatgcttatgtttacgaagtgggccctgggccagggggaatcacaagatctattcttaatgccgacgtcgctgaacttctggtggttgaaaaggacactcgatttattcctggattacaggtgagatgctt

SEQ ID NO: 14497 - DNA, 621 bp, Homo sapiens
tttagtgtttcaactccactgattatcaagtggcttgaaaatatttcctgtagagatggaccttttgtttatggcagaactcagatgactttgacttttcaaaaggaagtggcagagagacttgcagccaatacaggaagcaaacagcgtagtcgcctctctgttatggctcagtacctctgcaatgttcgacacatctttacgattccaggacaagcttttgtccccaaaccagaggtggacgtgggcgtggtgcacttcactcccttgatacagcccaagatagagcagccattcaagctggtggaaaaagtggttcagaatgtatttcagttccgaaggaaatactgccatcgagggctcagagaagaactcaagcgaagaaaaagcaaaaatgaagaaaaagaagaggatgacgcagagaattacagactctagctgctgcctgggggcgagcagcctaccagatgtcgatttgcactacgtggagcttcttatataggtactcttttgtctttacagaatgacgatacaaatgccaatgaccagatgtgacttattttccttttactatacagcttggcagagaaaataaatatcatcaaataagatacagtacaa

SEQ ID NO: 14498 - DNA, 433 bp, Homo sapiens
ggagcggcggtgaaggtcctgggtgaggtagggttggatggtgcttgccgcgtatcatggctgcctccggaaaactcagcacttgccgtctccctccgttgcccacgattcgagaaatcattaagttgttaagactgcaagcagcgaagcagctatcacagaatttcctcctggacttgaggctgacagataagattagaagaactcaagcgaagaaaaagcaaaaatgaagaaaaagaagaggatgacgcagagaattacagactctagctgctgcctgggggcgagcagcctaccagatgtcgatttgcactacgtggagcttcttatataggtactcttttgtctttacagaatgacgatacaaatgccaatgaccagatgtgacttattttccttttactatacagcttggcagagaaaataaatatca

SEQ ID NO: 14499 - DNA, 17413 bp, Homo sapiens
gtttctttcggagcggcggtgaaggtcctgggtgaggtagggttggatggtgcttgccgcgtatcatggctgcctccggaaaactcagcacttgccgtctccctccgttgcccacgattcgagaaatcattaagttgttaagactgcaagcagcgaagcagctatcacagaatttcctcctggacttgaggctgacaggtggatggcttagcagtgctccccggatgtctccccagtgtccgtgggggcgtgggccggggggtcttgcacgtccccgcgggcgggtgtccaggcactggcgtgcgacgggcttttggtcaggtccttcgacctctttgtatcagaactccggtcccaccgcccaggagacacgtgaagtgcgttgattgctcacaaaactccgcgttcgggggggtgtagcctgccggcaggctgcataaatgccaagctccctaggggaggaagggttcatgggtcgtgaaaggcgctagtgaatattggaatctgggtcactgtgaaatcaatcattctgaaatagtacagcacatgctgactgcagttgctttacatgcagtttaaagttaccagaatttaaattgatgcgaggattttatcaataacttggtgaaaagagtatccctcgtatgattcgttttttaaacgtttacctgttcagtctaagcctcgggggcgctaatattcattcataagtacatattacacaagcaacattgtgctagtgccgggggtaggatatgggcgtgaacaaggcggtgtttcctcgaggagcttacttttagcaagtttacattcccacacctaattgtttaaagttactttttatgagatataatttatgtgcaataaaattaataagtttgaagtgctcaatttgatgagttttgacgaatgtatttatatattggtttaaccaccatcaccattgcttagtgatgttctatgagatgaggttgcaaaaatatattacaaatacgtctactaagtcacggctggagtacttaggttttgagattttcatatttcattctatttagtcccacttcagaagttgaaaagagcagtaaatcacacccaaaaagttcattttcacttaaatgaagcacactccagaaaacataaaatgttttatttcttggacatgtagtctttattctgcctgtaccaatatgactttggataaaataatttaactcaagttttctcttttttttttttttctttttttaagatggagtttcactcttgttgcccaagctggagtgcaatggcatgatctcagctcactgcaacctccgcctccccggttcaagtgattctcgtgcctcagcctcccaggtagctaggattacaggcgtgagccaccgtgcctagctaattttgtgtttttagtaaagacagggtttcactatgttgctcaggctggtctcaaactcctgatctcaagtgatccactcgcctcggccttccaaagtgttgggattacaggtgtgagccaccatgtccagtagtttcctcatcttttaattggaagaagggcctactactttaaaagattgcccactctaaaattctttggttctagtaatagctagtaccagccttttctgcttgttattagccacattctaaatataaatcaccattctcagggcagaagttataggtctgtgtattttttaaaatccttcaaatacattttctcatgagcctttatcttcaggagtaagtttcaaattctagatattatccactctttctatgggaaccagagttaacggagatgagggtacttagctgaggttagaagctcaggcagaagagagcaagattgaaatccaagctcattgatttgatagcgcttctttaatattcatttgtatttcaatgtgcctgaaaagtttgagagcagagacctgcctactgttgtagctctccattttaaagaaggagagtattaaatttattccataatgtatcattcctgttccctctgagaggcattggctttaggatttatacctatgttgaagtccatgaccttgtacaaataaaacaatagacaaggaaactgaaaagttaagagaaatgaaattgggataggagtccttggttaacatgtaaggattaggtgagaatgtgtgtaaatccatcataatagataagatggtcagtggatgctaattccctccctgttaaaagactaaaccatttttggatggctgagaaactagtttccgcattttagctgacaaagttatgttgttgaaaacaagcaaaaataggactgtgaacacctacaagaagtgctggtatgtttttagtgactaaatttccactatcctaggaagaccagttccttggatttccatatctcagaatcactaagaccagcccattgcatgtttttccagatgtgatgactggttgcacagagtcagtactctacctttttatgatgtcttaagggctgctaacttgaatttgattaattaaaaaattaatttttctgtattaacatgcatgtgtgcaaagctttaaaaaccctcaactgctcaatttaactttttcctgaaaatgactaagaattcaaatttctgaaaatcttacgatctaagaacttattgccattgccatagtgaccaccaccaagatgtctctagataaaaataagacttcagcactttttgcttttggatttcactagcaatactgaagattctgaatgtgaaactagtattgcttattcagatattcaatgttcaataactatagaaaagtgctgcattcttatccagtctgttcttaggagtcggttggtttcaaatcagtttgaaaggaatttgcatgggacagatggaaactacaatattagctaaatttaagctaagaaactttgtcatgataatcctgtgtgtgttaagggactggtacagttcaatggtgatgtggtagcatattcgattgccacttcatgttaatttaggtagagagttaaatagtcaaataaatattatacataaaggatcaattgattgggtaatggctgaatttttatagaagatttttctctctaaatttcatacgttgaaatttgccaagttaattgagataactaaaactctttttcctctagataagattgtaaggaaagctggcaatctgacaaatgcttatgtttacgaagtgggccctgggccagggggaatcacaagatctattcttaatgccgacgtcgctgaacttctggtggttgaaaaggacactcgatttattcctggattacaggtgagatgcttaaagtgtctgctttaggaggcaaaagctgaatttaaatctttatgccatgatgcttaaaccccaaggtatccaaagattatgtaggtttttcctcaactatagatccccaaggccccattccagagattttgattccatagtctggagaaatctggaaatctccatttttaacaagcactctcagagggtctattgactacaccttgaaaaaaacctgctttaagcatttatgctaaacaaattaattgttttgtgtgatttttttttttaagtctgctaatagctatgcatgtcgtggcccattccttcaaaaataaataaaaataaataatggccagtaatgactcattggtatgacttttgagaacttcatttaggttcaaaaagcatttccacaaacaaaagatgagtaagacatatgcacgtttgtcatcatgagagactaattatgaagcttaagcattcttttataaggtaaattttttaagtgaaggaaggaagttgtacttttatagatttaggatgaggtttaaatgaaatgatacatgcatctttaaaatacaggcactgttattgtataagaaatgagagttgaaggaactgggcatgtttcaactggagaaaagaggccctgggtaagagtgtatatagcagcacatccaaggttgggggtacataggataagcttgttttgatcttttctaagaaagagctaaaacaaatagatggaaattgagggaggcaggattgaggatttgaaataaggaggaacttactttttttaaaacgctggcaaacagtgaaatagattgtatcagggatcttgtaaagggatttcctcataggggaacacttaatgtcttaaaggcctttgattcctccataattctaaaattttaaaagagtcctgaacctttggctcagatgagaagcaatttatcatgtgactataatagaataatgtagttatctacgttattacttccatacaaaaggacaaattgattttaaacgagtatattctcatactaacttgtatatatattaatggaaaaatgttaatttctgtcagaacggtttgagaagttgtttttgaaaacctagaactttgtgtgcatgtatctgatttttttaagaaacctagcagtttttccctaatcttgctttatctagtttttatgctttaaaaaattacataatatttccttttatctagttttaccagtctatactaacagaattggtttcagatactaaactttatgttgagatagtcacatggcacatattccttgatcaaatgtggaatttaatagtgatttttgttttgaactgtgttcttattttaagaattatatataagttggaggtggacgtgggaatattattatttttggtgagatcatgagattataaaaagaaactaaataactgtataatccccttcgggcttattcgtgtagccctttttggacatagggaatactcacctgacttttttgctcttaaaaagacttcttgtccctcatatctcaccattcgttgggtttattctttcttattaggccagggggtgaaccagatttccattcattcccacatattcccctctttgatatgaacaaaagatctttgaaggcagattgttgaaaagagcgactgccacccttctcttctcagtttcccccaaacccataagtcactgcgttcctaattccagccttgttttatctcattcgatttatcatcatctgacatactgtatatatgttcttcccatttgtttgttaattgactcacctgtctggaatgtaagtaccatgagggtagaaatgtgtgtctgttttgttccctgctgtacctctatctcacgtaacagtgcctagcacatagcaggtgttcagtaaatgtctcacatgagaaacaaaaaagttgaccactatttctgcatctgtgtatatatatacacaaatgtatatgtatctctcatattaattaaatgtatcattaaatagtgaaagtaaatatttgtgtagcattgataatgaaaaagttttatgctcttttttctaaatgtgaaggctgatttcaagttaaattactctagaggaaatgtatatttgacttctcatttgtttttagtagaaacaaaattaattcttagtatcttatatgcaggaaaggaatttgccttaaaaagaaatgttgggtactaaaatatcaaataggcctttttttccccagtgaggaatgtttcaatatgtaaaactactttgttttagaggtactaaattaatcataaaactgagtaaaagcagaaagaaggtgatctattttaaggataccattttagtgatttctaagctaatagaattactttttaaagaaattgtaataatttataaaataccttctagctgaaagcctgtcatttgtagcttaattcaattcctacagtattttcatgaggcagtttaggggaaagaaaaactggtgctaacatacaggattcatgctcagcatgttataaaggtaagaaaaacatgtctagtatgtttagtatagtatagttttgtggtaaagacgcagacttcagcatcagactgcctgggtttaacttcagattctactactagttgggtgactttgggtaggtaattttgtcctctgtgcctcagtttgctcttaggactcatatgaggattcagtgtatgcctgatacttagaaagcactgaataatatcttagttataagtaatcagttaaattattatccccatgccttgattacctctggtgattaatgactgatcaggagactgctgatctggaaagaggtataggaggaagtcgtgttattccattggagcactagaaaattctccagtgctatggaaacattggggtgttttccaactcatcaaacttgcattggacacctagggtttcttttcttgatgttgtcacattctgattgtgcatttctaggtttttaagtttttcgttgtttcttgttacatttttatgactgactggattctctgtgctgtggagaggagtgaggagatttcctgaatctcaaggagcttgaggccttgataggtttttcctctttctgaactggaaataacttagatttcctgacatctcagggaatttgaagctttgataggttcttctccatttgtgaactggagataaattcgtaaatcactcgtaccctttcagagaagtagtacagatttcctctcattttttttttttttctgtttattttagagcaaacctgtgcaacacacggcccacgggctgcctgcggcccaacacaaattcttaaactttcttaaaacattatgaaatttgttttgcattttttttaagctcatctgctatcgttagtgtattttatgtgtggcccaggacagttcttcttccagtgtggccgagggaagccaaaagattgcaattgcacagcactgttttaaaggcttcatatattaaaaataataatagctaatatttatggagagtttatcacagtaaatactttgtgatatggtttggctctgtgtcctcacccaaatctcctcttgtagctcccgtaattcccatgtgttgtgggagggactcagtgggagatgattgaatcatgggggtgggtctttcctgtgctgttctcatgatagtggatgggtctcacaagatctgatggttttaaaaatgggagtttacctgcacaagctctctctttgcctgttgccatccacgtaggatgtgacttgctcctacttgccttccgtcatgattgtgaggcctcccccagccatgtggaactgtgagtctaaacctcttttgtaaattgcccagtctcgggaatgtctttatgagcagcagcatgaaaacgagctaatacactttgttttacagctttgttgagatacagttgatgctcagtaaactgcacatacttaaagtgtacaaattactgaggatttgtctgtgtgtatatgtgtgtgtgtgtgtgtgtgtgtgtgtgtgtatgtgtttgagacatggtctcactctgtcacccaggctggagtgcagtgacacaagcacaactcaacagctcactgcagccttgacctcctgggctcaagcaatcctcccacttcagcctcttgagtaggtggaactacaggtgcacaccaccatgcctggctgagttttgtatttttttgtagaaatgggatttcaccatttctacatggtggtctcaaactcccgggcttaagcaatctgcccacctcagtctcccaagatgctgggattacaggcaagagccaccgcgtccagttaactgagttttgacatatatgtgattgcatgaaaccattatcacaatcaagaaaataaacactcatcgtcctcaggattcctcatgtttctttgtaatctgtcccttccttccccctttatctatctcagacaaccactaatctgctgtcactgtagattattttttatttttcagaattttatataaatggaatcatacaatatgtactttttttttggtctggtatcttttacttagcataattattttgcagttcatccatgttgaggtgtttatcagtagtttgctcctttttattgctgaatagcattccattttctgaatataccaaatttgtgaatctattcacctgttgatagactttgggtttttcccttttttggctcttatactgtaataaagcttttatgaacattcatatgcaagtgtttgtgtggatacacacttccatttctcttgagtaaagacctaggagtagaatatccgggtcctgtgtagaatatccgggtcctgtggtagacgtatattatactttttacagaaataccaaattgttttataagatgactgtgccatattacattcccaccagctgtatttcagagctcccattgctccacatgcttgctcagacttggtatggtcagtctttttaattttagccatcctagtgaatatgtaatggtatcctcttgtggtttttatttgcatttccctaatagataataatactggacatacgatgtgcttatttgccatctttgtatcttctttggggaattatttgttcaaatatttttagtacttttactttttttgtcttattgaattttaagagatatttatatggttcagatgtgaggctttgtcagatacagattttacaaatgttttctcagctgtggcttacctttttattttcttaacaatgtctttgaagaacagaagtttcatgtttatgaagtgcaatttatcagttttttcttctagactttatgctttttatgtcttatttttaaaatatttgccaaaccaagatcactaaaaatttgttttatttatatataatttaatatatatttatatatataaatatataatttaatatatatataaatatataatttaatatatatttatatataaatatataatttaatatatatttatatatataaatatataatttaatatatatttatatatataaatatataatttaatatatatatatttatatataaatatataatttaatatatatataaatatataatttaatatatatttatatatataaatatataatttaatatatatataaatatataatttaatatatatttatatatataatttaatatatatttatatatataaatatataatttaatatatatttatatatataaatatataatttaataatatatttatatatataaatatacaatttaatatatatttatatatataaatatacaatttaatatatatttatatatataaatatataatttaatatatgtttatatatataaatatataatttaatatatatatataaatatataatttaatatatatataaatatataatttaatatatatatataaatatataatttaatatatatataaatatataatttaatatatatataaatatataatttaatatatatttatatatataaatatataattatgtatatatataaatatataatatataaataatataaaattattttataattttagcttttacatttaggtctttgatacattttgagctaattcttgcatatagtgtgaggtaaggtttaggttctttttttaacaccattttttgaaaatactgtcttttcctcattgaattgccttagtactattgtcaaaaatcagttggttttatgtgtgtcggtttatttctgaacttccaattctgttctatttatctataggtctattgtttcaccaacagccacctgtatttattactatagactgaagactgaaaaagccttcatttttgccttcatttttggaaaatattgtggcagtattttgttttattactctaaaaaagttgctccgccattttctcacttgcattgtttctgacaaactttttgcattgcaaaaagtttctgacaaatcttttttcatccttacctttgttcttttttctctggctgcttttgatactttctactgtttttgagcaatttcatcatgatgtgcttacagtagctttgttcgtgtttcttgtgtgtagaattcattgagcttcttggatctgtaggttttcctgtgctttttgttgtctaatgtctgaaaattttgtttcatctattttctctgttttttaaattggtttaaggtaggagaatatgcctggtcccttagactccatctttgtcggagtaggaagtttcaggattcttcttaaccattaaattatgtggttgttttgaggaatttttggagagagaaagtaagtcattgtattgttagtattgcctttggttttttgtttgtttgttttttgagacaagagtttcgctcctggtgcccaggctggagtgcagtggcgtgatctcggctcactgcaagctccacctcccaggctcaagcgattctcctgcctcagcctgacgagtagctggaattacaggcgcccgctaccatgcccagctaattttttgtatttttaatagagactgggtttcatcatgttgtccaggctggtctcgaactcctgaactcaggtgattcacctgccttggcctcctaacctttgggttttcttataggtaaacactggttatttccatacttcattggcatagtggaaagttcatgggattgagcatcaaatagtctagtgaccaaatctcagatatgccacctactagctttgtgaccttaagcttgctgttaaaccttttttagcttcaactttctcatctgcagcatgggaataatagttctcttctgtggatattgcaaagatggatagaaatggatgtaaagagcctggcataatcccagtagccagtaatagttgctattttaattattccccttccagtcatcttattaagagacatatgaggtaatttcagcgtccaggcagaaagagctatttttagttagagataatgaagttttgaaattctttaatctctaacaatttttttaaaaaggaagattgccttccttgctattgtgacgtaactatttactttacacatgtaacttacttgatgttaccatagttaatcataacatagacaaaactcaacaagtaagcaaaaagtggcttacagccaaagtgactttttagtccatacaaagtataagtacggagatcagtggtagaagcaggcccactgacaactgtaagaagtaacagttgttacagtaacagaaagctataaaagacaaatataaacgcagaagaaacaataataataatagggtagcaaaaacaccttcgtaactattgaggccattattctaaagacaacagtaaccctaggtcatcaagaaaagggtgaaatttggtttagtgttcttggcctaaggaagaggattgtgccatatagcatccctatacattggcctaaggaagaaggttgtgtcgttggcatacctgtacgttgtgtacaatgtataatgataaaattaggataattagcatatccacctcgaacatttatcatttatttgtggtaagaacacacaattattatgtgtcaattaaaaataaaacaaacaaatagaataaaatctgatatggtttggctatgtccctactcaaatctcatcagtgagctctcacgagatctgatggttttataaggggcatttctcccttttgcttggcacttttccttgctgccaccatatgaagaaggacgtgtttacttccccttccaccatgactgtaagtttcctgaggcctccccagccatgctgaactgtgagtcaattaaacatctctcctttataaattacccagtctcaggtatgtctttattagcagcatgagaacggactaatacaaatctaatgtcaaatttaaaaaagagagtgaaagatttgataatgacattgaaatatccaacaaacttaaaattcctataaaaataattttagatatttgtagtatcatttaagatacgagtggttatgtgatttctgtttgtttttgctctgttcataaatttaaaatactgagaaagtctgaaaacgtacatttttaatacaattcaagttattttacatactaaaaaaaaataaagcaagctaattgacattttgacatcatgctgtaaccttccctctaaaagtctgaaaagtctgctgtaacatcttaattttttaatgaataaatagcagtagtcttttatatgtgttatatataagaatacaaattttatctttcacctactatattttatactatagattctttccttctcatacagtttgcttaacagttttgcccagccctgttacaaatatttatttcaacagcatttgggccctactatgtggcaaatcaggaagaagataattaacgtaactacagtgttggctgccatgaaccccttacatgagaaggtgacataaaatatgcaaaatgggtattcaatgtagtatttcttcttaaggaatcgataattttgtgtaagttctaagaattgcctaaattctttcctcatccagtaaaatcaacaaaaagctgcctagccaaaccacaattacttgccccctgcagaggagctttcactaagactttggttagagaagagatttttttttaaatggccacagaaagaatgcttctacatttgtgttttaacttgtattaaaggcattgtttattacattgtttcatgtaccctttacaaagcataataccagggaaaaaaaaattatctcttggagtcttggtacaactactattgaaaagcaaaaattatatatttcattatgtaaatcacgagagctagctgtcatgattgttaggattgttagctcttgtgttttacatatatgcttcccctcttcatggtttgattttcggtttcttcttttatagccttatgtaatgatgccttttactctaaactggcatacatctcattttggaagaatatagaattgaacactaaaataaaaatgaaagaagagtttgagagtgtctgtaaaaatactcatttggctgtaatctggtgcctgcatttgtgattggctgtgcctttaagcacattctgtgaaaacacctccagggttttgaagtgtaatgctccattgttattctcgaatgcatataatagtgattttcccaccccctccaccataccccatgtatcattatggtagtgaaaacatttctgctactggttggctagaaggtcttcatgtgttattgcctaatatcatttgaagtgtttaaaagggtactgtctataatcataatatcaatttagtctgtctagcactgtttccccataattgctttaaggacttcacataaatctgttaacatgagcgttcattccttctgcagtggggagttgcaaagtagatcaagctacaaattgtcaagaaggaggtgtaccttttaaagtgtggggaggatttggtttgtcattgactgagattgaaaagtgaatgggaatccaaaagaaatgtagttttaaacctaggaaaggagctgggtatggtggctcacacctgtaatcccagcactttgggaggccaaggcgggcagatcacttgaggtcaggtgttagagaccagcctgggcaacatggtgaaacctcgtctctactaaaaatacaaaaattagccaggtgtggtagtgcacacctgtaatcccagctcttagggaagctgaggcaagagaattgcctgaatcccaggagcagaggttgcagtgagccaagattgcaccactgcactccagcctgggcaacagagcgagactccatctcaaaaaacaaacaaaaaacaaaaacaaaaaagaaaacccaggaaaggaaggtaaatttatttatattatattagcttttagatatacagttgtacctgtcagggtgggaaaagttaacacttcaaattaagttaacgtcaaacagccaaatttacattgttctgttgtgttttagtcctaactactaattattaaatactttctatatattgacatcatgagacttaagctattagttctgcctctttgtttttggcgtgctaatttgttttaactttgtgaacataattatagaaaaaattttagcgttttccattgatgataagtactgtgattaaatatgtggttttatacattaagagcatgccgcatagagagctgtctctttttaaatttttagtatattgaaatcgttatattttccaagatttattgcctggaactcaccagatcaagttttactaactagtggtaatttaaaataatctataagtacattagtatcagaggcatgcaattatttttgctaaactaccatggctaaacatatcaaactagatgatttccagacttaaaagtatgtttagcctcttaccaatagaggcgtttcagctatttatttctggaagattatttgtataaatctgcctgattgacttgtgaagtaaatctttgcaagtttctagaccctacaaatttgggaagccaacatctcccaggctaaaagagaaagtttccagctttacagagacctgaatgccatttggtcattcacttattcatgcacttcttaaatatgtattaaacactcaccatgcattgctgtagctacaggggctataaaggtagataggaaatgggtcctgcccttaaggagcatatgtccttgcaggggaaattgagatacagtttgtaagtgctgtaaagaggcagacgcacagtacagtgttgacacaaaggtggactaatccacaagccatgtttcttggtccagtgtctcctctctggcttctgtgatcatcttgtttatcctccctcttggttgtatgagttgggcaaggagaggtgttaggagaaaaaaaatcagctttaatggacctagagaattaggaccaaggtaggctcagggcaaatgttccctttgagcctgttcaccatccctataaagtgctgggcacattctagaatcttggcaactgagttgaagccaaggttctccgagctctgacttaatgtgggaagagagtcacttcttcccttgaaatctaccttagcagtgatgtttcttctcgttgatacattcactcctgccttttaagtaaatttataagctcagagacttttttaatatttaactaaggacttcaagaatcagttttgtgttgggcatggggcacttaacacaatatgaatttatagataacttagctataaagttttttgaattaagtgccaactcttcagtactgtgagagtgtggtggtagagtaggtggaatgaagaagaaaaagactacaagggaaaaagtgctttttttcccctttttgctcacaaagagaaggaaaaggaaagaaagcaaatgattagtacgtggaaataggttgggaagtagctattgttaaacatccagggtaattcattaggtcgataaggggtatggatcaacaaatattaagattagggatgctctggtcagaggagtatctcggagtgccaagtggagactggcatcgacaggtgactttctacttggctaaatctacgcatatattaagttaaagatcttgatgatatatagaatcctttgtatatatatttaggctataaagatttagttaaattaagcttatctttcatatggttgactcctgattaattctctgtatttcatgataatgtccttagtctctaatttaaaaacttattgataggagtgagtttattgctaaatctatatagaaatagaagtcatcctgaaggtcaaaattacactaatatatttgtaaaattgtaagctagtgttgtactgtctgttactatccctaatcattcataggtgttaaaatgaaacgccaccattgtctgttgcaatagacgtgatgcagtatttgttcattaatgatcacccctggtctctgacttttttaactgattttttaaatgcacaggtttaaaaagtttagttttgttactcgcataagtatatgagctcattttactgatctttttataaactagatgctttctgatgcagcacctgggaaactgagaattgttcatggagatgtcttgacatttaaggtagaaaaggctttttcagaaagtcttaaaagaccctgggaagatggtgagtgcttttgggtagttataaaacatttcttttatgattatttatatcacaaatgttcattttatgatacatttattacaaatgtcttatatgtttatattttaaattatctgaacagaattaaataatgtgtattataattttctcttgctacttgcttccaaattataaaatctagttactttttttagttctaattcatttgtctcatttccaaatgttttgtattctgtgcaaataaactaaccattttttgtgataccatataaggatagggtaaactatcaattgttatttgttccaaatagtggaaaaaaagaagtgctttagtaaactaagccatgcccaagccattgttttaactttttctattattcttcacattcaatgaccaaccaaggcagtcttcattcacagacagtgtttattgggtacctgctgtgtgcagcccttcagaatgcatagataaatagggtatgtttcttcctataacagactctcagaacaaacggaggagggcttaggtgcctccacatctggctgcccccatgtctctggcctcccccatgaccagactccttcagttgggccgcacttgcagtctctgccagctgacaggccctcctgttcttagcatgcagtcttcaggtttctgccccagcccagccacactggaaccacaatgccttcctcattacctgtttcaaaccttatctgactgagttctcccaaattcatttaactgtaatccatagtcttccggaggatttctcttgctctttttctccctgataccagcccctcctgtttttccttttacatttgtgaactttttctaactattcttagctggtggttgtttttctacccactttgtacagattgttgtttctggggtttttctttttgggcaaatttgccagattactccattcctatggtttcacttaccacctacgtattgcagacattcacatctttatatgctgcctgtacccccttcctgggcatctgacctctgacagcttcatctaggtgttccataggcactttaacctcatcatgtccaaaatgaattctctttttcctcaagccaactctttttcctgtatttcctaggccagaaattcaaggacttttctctgagtaactgagcagtaattaagtataattttttcctcaataatccaaagcagattgtgagaaaacattgcttttgaataataagtgaaaaaaaaaatttagccatgtctatttatatatttttctttgatgctattaatatccagtctgattttactcgtcactgaaattgtattcagaatatattgatggaatcatttcaggttgttttttcctctgccaccagatcctccaaatgtacatattattg

SEQ ID NO: 14500 - DNA, 590 bp, Homo sapiens
gtttctttcggagcggcggtgaaggtcctgggtgaggtagggttggatggtgcttgccgcgtatcatggctgcctccggaaaactcagcacttgccgtctccctccgttgcccacgattcgagaaatcattaagttgttaagactgcaagcagcgaagcagctatcacagaatttcctcctggacttgaggctgacagatggagtttcactcttgttgcccaagctggagtgcaatggcatgatctcagctcactgcaacctccgcctccccggttcaagtgattctcgtgcctcagcctcccagataagattgtaaggaaagctggcaatctgacaaatgcttatgtttacgaagtgggccctgggccagggggaatcacaagatctattcttaatgccgacgtcgctgaacttctggtggttgaaaaggacactcgatttattcctggattacagatgctttctgatgcagcacctgggaaactgagaattgttcatggagatgtcttgacatttaaggtagaaaaggctttttcagaaagtcttaaaagaccctgggaagatgatcctccaaatgtacatattattg

SEQ ID NO: 14501 - DNA, 3605 bp, Homo sapiens
tggatggtgcttgccgcgtatcatggctgcctccggaaaactcagcacttgccgtctccctccgttgcccacgattcgagaaatcattaagttgttaagactgcaagcagcgaagcagctatcacagaatttcctcctggacttgaggctgacaggtggatggcttagcagtgctccccggatgtctccccagtgtccgtgggggcgtgggccggggggtcttgcacgtccccgcgggcgggtgtccaggcactggcgtgcgacgggcttttggtcaggtccttcgacctctttgtatcagaactccggtcccaccgcccaggagacacgtgaagtgcgttgattgctcacaaaactccgcgttcgggggggtgtagcctgccggcaggctgcataaatgccaagctccctaggggaggaagggttcatgggtcgtgaaaggcgctagtgaatattggaatctgggtcactgtgaaatcaatcattctgaaatagtacagcacatgctgactgcagttgctttacatgcagtttaaagttaccagaatttaaattgatgcgaggattttatcaataacttggtgaaaagagtatccctcgtatgattcgttttttaaacgtttacctgttcagtctaagcctcgggggcgctaatattcattcataagtacatattacacaagcaacattgtgctagtgccgggggtaggatatgggcgtgaacaaggcggtgtttcctcgaggagcttacttttagcaagtttacattcccacacctaattgtttaaagttactttttatgagatataatttatgtgcaataaaattaataagtttgaagtgctcaatttgatgagttttgacgaatgtatttatatattggtttaaccaccatcaccattgcttagtgatgttctatgagatgaggttgcaaaaatatattacaaatacgtctactaagtcacggctggagtacttaggttttgagattttcatatttcattctatttagtcccacttcagaagttgaaaagagcagtaaatcacacccaaaaagttcattttcacttaaatgaagcacactccagaaaacataaaatgttttatttcttggacatgtagtctttattctgcctgtaccaatatgactttggataaaataatttaactcaagttttctcttttttttttttttctttttttaagatggagtttcactcttgttgcccaagctggagtgcaatggcatgatctcagctcactgcaacctccgcctccccggttcaagtgattctcgtgcctcagcctcccaggtagctaggattacaggcgtgagccaccgtgcctagctaattttgtgtttttagtaaagacagggtttcactatgttgctcaggctggtctcaaactcctgatctcaagtgatccactcgcctcggccttccaaagtgttgggattacaggtgtgagccaccatgtccagtagtttcctcatcttttaattggaagaagggcctactactttaaaagattgcccactctaaaattctttggttctagtaatagctagtaccagccttttctgcttgttattagccacattctaaatataaatcaccattctcagggcagaagttataggtctgtgtattttttaaaatccttcaaatacattttctcatgagcctttatcttcaggagtaagtttcaaattctagatattatccactctttctatgggaaccagagttaacggagatgagggtacttagctgaggttagaagctcaggcagaagagagcaagattgaaatccaagctcattgatttgatagcgcttctttaatattcatttgtatttcaatgtgcctgaaaagtttgagagcagagacctgcctactgttgtagctctccattttaaagaaggagagtattaaatttattccataatgtatcattcctgttccctctgagaggcattggctttaggatttatacctatgttgaagtccatgaccttgtacaaataaaacaatagacaaggaaactgaaaagttaagagaaatgaaattgggataggagtccttggttaacatgtaaggattaggtgagaatgtgtgtaaatccatcataatagataagatggtcagtggatgctaattccctccctgttaaaagactaaaccatttttggatggctgagaaactagtttccgcattttagctgacaaagttatgttgttgaaaacaagcaaaaataggactgtgaacacctacaagaagtgctggtatgtttttagtgactaaatttccactatcctaggaagaccagttccttggatttccatatctcagaatcactaagaccagcccattgcatgtttttccagatgtgatgactggttgcacagagtcagtactctacctttttatgatgtcttaagggctgctaacttgaatttgattaattaaaaaattaatttttctgtattaacatgcatgtgtgcaaagctttaaaaaccctcaactgctcaatttaactttttcctgaaaatgactaagaattcaaatttctgaaaatcttacgatctaagaacttattgccattgccatagtgaccaccaccaagatgtctctagataaaaataagacttcagcactttttgcttttggatttcactagcaatactgaagattctgaatgtgaaactagtattgcttattcagatattcaatgttcaataactatagaaaagtgctgcattcttatccagtctgttcttaggagtcggttggtttcaaatcagtttgaaaggaatttgcatgggacagatggaaactacaatattagctaaatttaagctaagaaactttgtcatgataatcctgtgtgtgttaagggactggtacagttcaatggtgatgtggtagcatattcgattgccacttcatgttaatttaggtagagagttaaatagtcaaataaatattatacataaaggatcaattgattgggtaatggctgaatttttatagaagatttttctctctaaatttcatacgttgaaatttgccaagttaattgagataactaaaactctttttcctctagataagattgtaaggaaagctggcaatctgacaaatgcttatgtttacgaagtgggccctgggccagggggaatcacaagatctattcttaatgccgacgtcgctgaacttctggtggttgaaaaggacactcgatttattcctggattacaggtgagatgcttaaagtgtctgctttaggaggcaaaagctgaatttaaatctttatgccatgatgcttaaaccccaaggtatccaaagattatgtaggtttttcctcaactatagatccccaaggccccattccagagattttgattccatagtctggagaaatctggaaatctccatttttaacaagcactctcagagggtctattgactacaccttgaaaaaaacctgctttaagcatttatgctaaacaaattaattgttttgtgtgatttttttttttaagtctgctaatagctatgcatgtcgtggcccattccttcaaaaataaataaaaataaata

SEQ ID NO: 14502 - DNA, 649 bp, Homo sapiens
tggatggtgcttgccgcgtatcatggctgcctccggaaaactcagcacttgccgtctccctccgttgcccacgattcgagaaatcattaagttgttaagactgcaagcagcgaagcagctatcacagaatttcctcctggacttgaggctgacagataagattgtaaggaaagctggcaatctgacaaatgcttatgtttacgaagtgggccctgggccagggggaatcacaagatctattcttaatgccgacgtcgctgaacttctggtggttgaaaaggacactcgatttattcctggattacaggtgagatgcttaaagtgtctgctttaggaggcaaaagctgaatttaaatctttatgccatgatgcttaaaccccaaggtatccaaagattatgtaggtttttcctcaactatagatccccaaggccccattccagagattttgattccatagtctggagaaatctggaaatctccatttttaacaagcactctcagagggtctattgactacaccttgaaaaaaacctgctttaagcatttatgctaaacaaattaattgttttgtgtgatttttttttttaagtctgctaatagctatgcatgtcgtggcccattccttcaaaaataaataaaaataaata

SEQ ID NO: 14503 - DNA, 6538 bp, Homo sapiens
aagtgactttttagtccatacaaagtataagtacggagatcagtggtagaagcaggcccactgacaactgtaagaagtaacagttgttacagtaacagaaagctataaaagacaaatataaacgcagaagaaacaataataataatagggtagcaaaaacaccttcgtaactattgaggccattattctaaagacaacagtaaccctaggtcatcaagaaaagggtgaaatttggtttagtgttcttggcctaaggaagaggattgtgccatatagcatccctatacattggcctaaggaagaaggttgtgtcgttggcatacctgtacgttgtgtacaatgtataatgataaaattaggataattagcatatccacctcgaacatttatcatttatttgtggtaagaacacacaattattatgtgtcaattaaaaataaaacaaacaaatagaataaaatctgatatggtttggctatgtccctactcaaatctcatcagtgagctctcacgagatctgatggttttataaggggcatttctcccttttgcttggcacttttccttgctgccaccatatgaagaaggacgtgtttacttccccttccaccatgactgtaagtttcctgaggcctccccagccatgctgaactgtgagtcaattaaacatctctcctttataaattacccagtctcaggtatgtctttattagcagcatgagaacggactaatacaaatctaatgtcaaatttaaaaaagagagtgaaagatttgataatgacattgaaatatccaacaaacttaaaattcctataaaaataattttagatatttgtagtatcatttaagatacgagtggttatgtgatttctgtttgtttttgctctgttcataaatttaaaatactgagaaagtctgaaaacgtacatttttaatacaattcaagttattttacatactaaaaaaaaataaagcaagctaattgacattttgacatcatgctgtaaccttccctctaaaagtctgaaaagtctgctgtaacatcttaattttttaatgaataaatagcagtagtcttttatatgtgttatatataagaatacaaattttatctttcacctactatattttatactatagattctttccttctcatacagtttgcttaacagttttgcccagccctgttacaaatatttatttcaacagcatttgggccctactatgtggcaaatcaggaagaagataattaacgtaactacagtgttggctgccatgaaccccttacatgagaaggtgacataaaatatgcaaaatgggtattcaatgtagtatttcttcttaaggaatcgataattttgtgtaagttctaagaattgcctaaattctttcctcatccagtaaaatcaacaaaaagctgcctagccaaaccacaattacttgccccctgcagaggagctttcactaagactttggttagagaagagatttttttttaaatggccacagaaagaatgcttctacatttgtgttttaacttgtattaaaggcattgtttattacattgtttcatgtaccctttacaaagcataataccagggaaaaaaaaattatctcttggagtcttggtacaactactattgaaaagcaaaaattatatatttcattatgtaaatcacgagagctagctgtcatgattgttaggattgttagctcttgtgttttacatatatgcttcccctcttcatggtttgattttcggtttcttcttttatagccttatgtaatgatgccttttactctaaactggcatacatctcattttggaagaatatagaattgaacactaaaataaaaatgaaagaagagtttgagagtgtctgtaaaaatactcatttggctgtaatctggtgcctgcatttgtgattggctgtgcctttaagcacattctgtgaaaacacctccagggttttgaagtgtaatgctccattgttattctcgaatgcatataatagtgattttcccaccccctccaccataccccatgtatcattatggtagtgaaaacatttctgctactggttggctagaaggtcttcatgtgttattgcctaatatcatttgaagtgtttaaaagggtactgtctataatcataatatcaatttagtctgtctagcactgtttccccataattgctttaaggacttcacataaatctgttaacatgagcgttcattccttctgcagtggggagttgcaaagtagatcaagctacaaattgtcaagaaggaggtgtaccttttaaagtgtggggaggatttggtttgtcattgactgagattgaaaagtgaatgggaatccaaaagaaatgtagttttaaacctaggaaaggagctgggtatggtggctcacacctgtaatcccagcactttgggaggccaaggcgggcagatcacttgaggtcaggtgttagagaccagcctgggcaacatggtgaaacctcgtctctactaaaaatacaaaaattagccaggtgtggtagtgcacacctgtaatcccagctcttagggaagctgaggcaagagaattgcctgaatcccaggagcagaggttgcagtgagccaagattgcaccactgcactccagcctgggcaacagagcgagactccatctcaaaaaacaaacaaaaaacaaaaacaaaaaagaaaacccaggaaaggaaggtaaatttatttatattatattagcttttagatatacagttgtacctgtcagggtgggaaaagttaacacttcaaattaagttaacgtcaaacagccaaatttacattgttctgttgtgttttagtcctaactactaattattaaatactttctatatattgacatcatgagacttaagctattagttctgcctctttgtttttggcgtgctaatttgttttaactttgtgaacataattatagaaaaaattttagcgttttccattgatgataagtactgtgattaaatatgtggttttatacattaagagcatgccgcatagagagctgtctctttttaaatttttagtatattgaaatcgttatattttccaagatttattgcctggaactcaccagatcaagttttactaactagtggtaatttaaaataatctataagtacattagtatcagaggcatgcaattatttttgctaaactaccatggctaaacatatcaaactagatgatttccagacttaaaagtatgtttagcctcttaccaatagaggcgtttcagctatttatttctggaagattatttgtataaatctgcctgattgacttgtgaagtaaatctttgcaagtttctagaccctacaaatttgggaagccaacatctcccaggctaaaagagaaagtttccagctttacagagacctgaatgccatttggtcattcacttattcatgcacttcttaaatatgtattaaacactcaccatgcattgctgtagctacaggggctataaaggtagataggaaatgggtcctgcccttaaggagcatatgtccttgcaggggaaattgagatacagtttgtaagtgctgtaaagaggcagacgcacagtacagtgttgacacaaaggtggactaatccacaagccatgtttcttggtccagtgtctcctctctggcttctgtgatcatcttgtttatcctccctcttggttgtatgagttgggcaaggagaggtgttaggagaaaaaaaatcagctttaatggacctagagaattaggaccaaggtaggctcagggcaaatgttccctttgagcctgttcaccatccctataaagtgctgggcacattctagaatcttggcaactgagttgaagccaaggttctccgagctctgacttaatgtgggaagagagtcacttcttcccttgaaatctaccttagcagtgatgtttcttctcgttgatacattcactcctgccttttaagtaaatttataagctcagagacttttttaatatttaactaaggacttcaagaatcagttttgtgttgggcatggggcacttaacacaatatgaatttatagataacttagctataaagttttttgaattaagtgccaactcttcagtactgtgagagtgtggtggtagagtaggtggaatgaagaagaaaaagactacaagggaaaaagtgctttttttcccctttttgctcacaaagagaaggaaaaggaaagaaagcaaatgattagtacgtggaaataggttgggaagtagctattgttaaacatccagggtaattcattaggtcgataaggggtatggatcaacaaatattaagattagggatgctctggtcagaggagtatctcggagtgccaagtggagactggcatcgacaggtgactttctacttggctaaatctacgcatatattaagttaaagatcttgatgatatatagaatcctttgtatatatatttaggctataaagatttagttaaattaagcttatctttcatatggttgactcctgattaattctctgtatttcatgataatgtccttagtctctaatttaaaaacttattgataggagtgagtttattgctaaatctatatagaaatagaagtcatcctgaaggtcaaaattacactaatatatttgtaaaattgtaagctagtgttgtactgtctgttactatccctaatcattcataggtgttaaaatgaaacgccaccattgtctgttgcaatagacgtgatgcagtatttgttcattaatgatcacccctggtctctgacttttttaactgattttttaaatgcacaggtttaaaaagtttagttttgttactcgcataagtatatgagctcattttactgatctttttataaactagatgctttctgatgcagcacctgggaaactgagaattgttcatggagatgtcttgacatttaaggtagaaaaggctttttcagaaagtcttaaaagaccctgggaagatggtgagtgcttttgggtagttataaaacatttcttttatgattatttatatcacaaatgttcattttatgatacatttattacaaatgtcttatatgtttatattttaaattatctgaacagaattaaataatgtgtattataattttctcttgctacttgcttccaaattataaaatctagttactttttttagttctaattcatttgtctcatttccaaatgttttgtattctgtgcaaataaactaaccattttttgtgataccatataaggatagggtaaactatcaattgttatttgttccaaatagtggaaaaaaagaagtgctttagtaaactaagccatgcccaagccattgttttaactttttctattattcttcacattcaatgaccaaccaaggcagtcttcattcacagacagtgtttattgggtacctgctgtgtgcagcccttcagaatgcatagataaatagggtatgtttcttcctataacagactctcagaacaaacggaggagggcttaggtgcctccacatctggctgcccccatgtctctggcctcccccatgaccagactccttcagttgggccgcacttgcagtctctgccagctgacaggccctcctgttcttagcatgcagtcttcaggtttctgccccagcccagccacactggaaccacaatgccttcctcattacctgtttcaaaccttatctgactgagttctcccaaattcatttaactgtaatccatagtcttccggaggatttctcttgctctttttctccctgataccagcccctcctgtttttccttttacatttgtgaactttttctaactattcttagctggtggttgtttttctacccactttgtacagattgttgtttctggggtttttctttttgggcaaatttgccagattactccattcctatggtttcacttaccacctacgtattgcagacattcacatctttatatgctgcctgtacccccttcctgggcatctgacctctgacagcttcatctaggtgttccataggcactttaacctcatcatgtccaaaatgaattctctttttcctcaagccaactctttttcctgtatttcctaggccagaaattcaaggacttttctctgagtaactgagcagtaattaagtataattttttcctcaataatccaaagcagattgtgagaaaacattgcttttgaataataagtgaaaaaaaaaatttagccatgtctatttatatatttttctttgatgctattaatatccagtctgattttactcgtcactgaaattgtattcagaatatattgatggaatcatttcaggttgttttttcctctgccaccagatcctccaaatgtacatattattggaaatctgccttttagtgtttcaactccactgattatcaagtggcttgaaaatatttcctgtagagatggaccttttgtttatggcagaactcagatgactttgacttttcaaaaggaag

SEQ ID NO: 14504 - DNA, 578 bp, Homo sapiens
aagtgactttttagtccatacaaagtataagtacggagatcagtggtagaagcaggcccactgacaactgtaagaagtaacagttgttacagtaacagaaagctataaaagacaaatataaacgcagaagaaacaataataataatagggtagcaaaaacaccttcgtaactattgaggccattattctaaagacaacagtaaccctaggtcatcaagaaaagggtgaaatttggtttagtgttcttggcctaaggaagaggattgtgccatatagcatccctatacattggcctaaggaagaaggttgtgtcgttggcatacctatgctttctgatgcagcacctgggaaactgagaattgttcatggagatgtcttgacatttaaggtagaaaaggctttttcagaaagtcttaaaagaccctgggaagatgatcctccaaatgtacatattattggaaatctgccttttagtgtttcaactccactgattatcaagtggcttgaaaatatttcctgtagagatggaccttttgtttatggcagaactcagatgactttgacttttcaaaaggaag

SEQ ID NO: 14505 - DNA, 563 bp, Homo sapiens
gtttcttctcgttgatacattcactcctgccttttaaatgctttctgatgcagcacctgggaaactgagaattgttcatggagatgtcttgacatttaaggtagaaaaggctttttcagaaagtcttaaaagaccctgggaagatgatcctccaaatgtacatattattggaaatctgccttttagtgtttcaactccactgattatcaagtggcttgaaaatatttcctgtagagatggaccttttgtttatggcagaactcagatgactttgacttttcaaaaggaagtggcagagagacttgcagccaatacaggaagcaaacagcgtagtcgcctctctgttatggctcagtacctctgcaatgttcgacacatctttacgattccaggacaagcttttgtccccaaaccagagtcctgcctatgcctttcggggcatttaaaattgctactagaaagttctgtggcttttcagactacactcatgaattcagtccagctgattaatcagtgtctaccgaaaataagtggtgtctctatctgggaagtttagcactgag

SEQ ID NO: 14506 - DNA, 27223 bp, Homo sapiens
atctttacgattccaggacaagcttttgtccccaaaccagaggtaagtttctgcttatttgttgtagtatatcggaattaggacgtttgttcccctgaggatgtgtcataggaaataacctctaggatctaacctttgtttatgtgcaaactgacactgtactttacttctgaataagaaccacaaaaatcgtaatatgaatagctagttcttactataattgttctccttaggtagggtgactaaatgtttaggttcatgcatgttatcctggtggcagtatcattcatcatcttcatcttcatgatgttactcttaaagtatccctgtatggaagataagttacacggtcacccaatatttgagaaaagaaataaaatacttttgtgttttctgttagagacctctaactaaagctacatcaaacattatttacttaacacttttttgggagaccttattatggtagtgttatttgtggtaaatcatctgtggaagaaacagttggatattaaactaggctttgatattatatgctagttatgtgagtaagtgctagttacagaaacagagtttctctgccaaaaattaaaattaaaaaaaccgttgtctgttttagcaaaaccactgcttggtgagttattacaagatgtgtactattaaaaactcatctttttcttcagtgaatgtatattgagcatttactgtttgaaaatgcgttgggtagcaaggggagtctacagggatatgagcctaatccgatacagagtctgccttcagggagttcacagcctcatgaggaatagaaatttctcactggtccctaaaactctcaaatataaggtcttgcagagtgtcccttgcatcatgtatccttcataaataacaagagatagcatggaaaaaaatgcattatgtgactatagatttagatatagattctagatttagaatggagaccctaaccaatagtgttagatctacttgtctgtcttgaagacgcctaagtgatctccatgctctttgctgccaccttcatacttctttgccatttggccagttagctgagcgttcaggtgactaggaagtcaggccatcttccccttacgtaacagacataattgtcagctttttctaaatcgagctcagggagcttgctatcggtgccacctcccttcagcatctcagacttcagagacattgcgaatgacttctcctagaataattagatccaagacagaatttgatgactggaggtatcttataggttatcttcaaatttaaaacatttgtgctttcagggactttctctcctagtacaggtggccattataatgaaaaaaataaaaataaaaaaccagtgaccatgtagcttgatttcttcttgtcatgcacatgtgtgtgcatataacattttaaatagtgtaagactcattatatcaaaaaccaagatccttactcataggcctctatagttatggttatgaccattatccagaatctccaggctatttaagttttactaacgggttcttaggatagatattcgaatatttttagtggaagctttctaactctgttttagttacctagttgagattatttgatggagtttcgaagttattatccactttatctttgatttagtggtaaggtacatatgtagtttatcaattaaaatttaccttctctgggattaaggccacaagaaaatatttattatttggaaaaaagctagctatgtctttgattcctttttttattgagggatgtttacgttttggcaaattaaacattttcatagcaatttacttcactttttttattatattgtaactattacatacaggggatttatttgtaatccagaaaagcacttatcaaggacttgtaggtgtgcaccaccacaccggctattttttgtagtttttcatagagacaggattttgccatattggccaggctggtcttgaactcatggcctccagtgacctacccgctttggcctcccaaagtgccgggattacaggctaaattttagttctaaaagaattctctgctgctttgaagtagttttaccatattagggcaaagcagaaatgttctgaagaaagccagaaaatattttgctgacagttacattgagcaaatgttttaaaaattcattttcttgggccgggcacagtgactcatgcctgtaatcccagcactttgggaggccgaggtgggcggatcacgaggtcaggagatcgagaccatcctggctaacatggtgaaaccccgtctctactaaaaatacaaaaaattagccgggcatggtggtgggcgcctcaagtcccagctactcaggaggctgaggcaggagaatggcatgaacccgggaggcggagcttgcagcgaggcgagatggcaccactgcactccagcctgggtgacagagcgagactccatctcaaaaaaaaaaaaaattcattttctcaaataagaaagaggaagagtttttacagagatgataaactaattcaaggctagtactctaactaaaccttctgcatacaagaagagaaagtcctagacgcacataattgcaacacaaggtaagataagctaagcgctaaaaatagaggttgggcagattcctgggtggttgagagagggagattaatgctcagaagaaatttactaacattcattacttattctcaatcaaaactctaagaatcagatatagagaatttcttttgtgatacaatgaggggcttacttacaaccactttcgggattttttcctgtgagagtctgctgtcccttctgtttctcaatcttttaactaactcaatcaagctttaatggcagaactttcactaccattgaactattacaatcctgttctgactagttgaactgaattactgctgaactttactcttattaagctctctagtgtagttcccaaaatttgaacccaaaatactttgtgtctgcaaaacagacaacctctgaggttcttaaaattagactaattaattggtctactttagtgtctcttaaactattagagtctgtagtatgtagcttttaagttagaatttttttaattttgtgttttcatttcactgttaatgaaattatttacatttacaagacaatgtcttttgcaatgcaaattcagaactaaaattgttttcatgacagaatacaacctgtttcttaagtttctcaagctagcttttctctattagcctctgtagatccctgagaatccacatatttctggggttccacgcttaatcttttttttcagctactctgcacatttctcaagtttgggaaatactgagctattagctagatcctcaaaattctgtctttttttttatgaattatggtgataggcttcataatctaacatagttcgtaaagagtggaaaggctttttagttctcaacactatttttttttttttttttttttttttgagacagagtctcactctgccgcccaggctggagtgcagtggcacaatctcggctcactgcaacctccaccttctgggttcaaatgattctcctgcctcagccttccgagtagctgggattacaggcgcccgccatcatgccccgctaagttttgtatttttagtagagacgaggtttcaccatgttggccaagctggtctcgaactcctggcctcaggtgatccatccgcctcggcctcccaaagtgctgggattacaggcatgagccaccacgcccagccagttctcaacactattctctactctgacttagtagaaaaatcatttagttatattatgagagttgtaacgggttctttttaattgacactggtagaggcagtagacttccaagtaagctagacctgctggaattccagtactgctagttttgagagcttggtcgggttaataggctgagtttactacatccagatttgaccaataataccacccttgaaggacatttgtgaggaatagaaataatcaatgcagagtgcctaatatgagtatctggcagtgaatgctgccagtcaaagtagttgttattgttatgatataaacaaatatttatggactaagttgtagtattctgatataaaaataaggattataatttttaagctatatatagaatttatatttaatttttcctatttggaagtgtggtatatagaacaagttaccttcaaacatggtacacatttaaagcataaatagtgtccattaaattgtagatgaattaatgatatatccatgacatataaagaaaagattggaacttgagacatccactcttgacttttgaagagcgttttagaggcttccaaccctgcttgttcacagctattgaggccttgacctctgtgggagatagtcttgagtttggtgggtggatgggtccacagaagagacaactgtttttcatgcttttgtgttttttgaaatctgacattgaggatgttatttctgctgtatatttaccttgtattcaagaatcattttggtatgaggtcagaacactagtgttttcctacttaactaagactcttctgtctttggtttgtattctcctcctagaatcagattgagatgggattttcataaaggtgatgtattgacaagggccctcaggagaaggggcatgagggtagcaggaaagggcaggggaagagctaagtaaacatattgttcctcctggaggagcttcagcctagaaccacggcgggaggagaagctgtgtagcacaaattgccccacgcgtctgtgttcccttgaggcaagggaccagcttattggaacctgtgccagccagtctttgcagggagcagtggggcagtcacttcccagtagaggcagctccatctctgggagccattagcacccatcagtgccagcagctgggggtggctgccctggcccagtggaaggagcttggccaagacacagcatcctgtctagcttcctaccagtagacaaagctgtcagattacttacatggccacctctctgccgcagttgcttggaagttctaaactaagtttcatgtttaattgctttagcatgcttcaaccaggaacatttaatagcattttttctctcttctttttgtttgtaactttagtctttcatctttatcagttgtttttatacttattatacctgcaattttataagttgcctcaaattcttttttaaagcccttgagtccaaaataaaaataaatataaaccaaaagccatttttataattaaagtagtaccagagtcatcctccttaaaaatcaggtaaaatacgtgttgaatagagataagagtatttgctattacaattttaattcagtactaggcatgcttccataaactgctcaagaataaatggtaagtattctaaatccaaggagggaaaaaacaaaattgcatttttgcagacagtacttttatgtatgtataaaatgcaatgaaattaatacaaaagtaactggagataatgataataatgtgatagtgttctgcagaattataggctaggctaaaaatctcaaaagtcaagtaagttagtatttgctaaagtcatgtagctgacaatatagtgatgaaagacatatgagaaaacattgtccacatccaaaactgaacttctgtctaactaccctagtgggcctgccctccctgcacctcttattcactatgctgactaatggcatcatccacccaggtcatccaagcctaaaccttggaggtcatcttaagcaccacctccccagacctttacaactgctgaccctcagaactagtcagtcgttaaccagcttctgacattacctaaatttctcccaaacccatcccaattttgtacccaattcttctgacttaatttaagtctatcatttttgtcagaattactagatgaattcttcagtcatatgtatagatatacacgtgctccacaggttaaaaaaaaaaaaagtatgatatttttggtcttttgggttttgttttggtaactttttatcaaagaagaatgaataagtatattcgataaattagactatgatttctcaaactcagaactgttgacatttggggccagataattctttgttgccagagtctgtcctgtgcattgtaagatacataaaggcatccctggcctcttcctactagattccagtagcactacctcagttaagataaccaaaaaagtgtcccagcattgccgaatgtcccctgcaggctaaactcaccccagggagagccactggattagactaagaaccattgagtaacactagtcatatgctttctgtgcaccaactgctttctgtgtatcatctcatttaatccccacgagaactctgagggtagatgccattcttaagcaaaccaagaccttagttaagtaatgcatgctgtgtaaccatgcacccacaccagggcttgcacccgggtagtttgactccagaacctggttccctcaggttggaaccatctccccacttactagctgtgtgaacttgggcaagttagggaacttatgtcacctctgtcgccctcagtgtcctgtaagatcctgagaatagtgcctacctggtagagttgttaggtttaagccaggactggcatgtgttaggttttagaccaggactggcatgtgttaggaagcacttgccatgacatgtcactgagaatgcagagctaaaaatgacaccacacctcccagtctagttggagatgcaatcatgtaaactcataatttcatgacttcttaaatagagcgtttttacacagtacacattacttaagtcttggtgtgctcatgtgagctattgtgaggattaaatgagagcatttattaaattcatagtttgttaaatagagcattttctgcgagtgcagatgcgggcttgaacttctaggctgtcaggattgagtttacaggagaggtccgtgtgaatcctgaagggtgagcaggagctttggtagtgagggagtgaggctgggaggagtgcaggtggaggaatgaacacagcgggataggaattcctgtaggaatagagagactccacatcatttattgcaggattgccacttccaaacaatacactgggccattatttcatataaaatggctggttttctgagagtttgaaacattcgtgtttctacttaggaagaaaatactccagagctaaataaaaattatttttgaagtatatatagaatgatatagcagatataaagataacttttactgtaggactaaaggctacatagactatgtaaacccagccacattcagcaaagtgagagaagaactattaatgggatcaaagcagttctagcacattaatttgcatgaaatcattctttgcatcagaattctttttagtatgacacttgtgtataaaataacattttgaccactcaaaaggaatacatactttaaacaatcatttaaccttctacaaaatgatccccttcctaattcccgtttgtgataataccttttcgttttagctattccagtaatagctaatgacattgttgcagaagagaatgtctacccagtaaaataggtataggatatgttagtctatttctgtatgcacaaatgaaagttatttacttacgtaaaatatattcttcccacttcctgagttattaatgtacaaagaaataatcttttttcccctttaccattgaatcattgacaatgactaagcttcaattaacaaataaattgttagaaacaatagtgggcagtgtttcctagatttttatttacttgctaaaatatttgaatcacatatcataatttatattttaaaagcattctttaaaatatattttgacattcattaattgaaacagcttatttgtaagaatgtttttgttaacatgaatgaaatttgagagaaaaagtgacaaaggtaacttttatcatccaaatatgaataaatgagagaggaagtgggatggtagtaaatccagaatgtgataggataaatgaacttaatctgtggagaatcctcttgctagaagcagaagaagggagttcttaaacattttaaaacaaacttttgttcttatcacttagcttgtacttaatgctttaagagtcctagagattttagtttggtttggctttctttactgtggtagcatttaccaatttcttcagttctgcctaatcttagtttgcatataatattgtcagctcttacaaatatatgtagatagttttctaaaatgaaaaagaaatgggctggtcacaggaggtggggacttgggatggatggttttagcagcatctgaatggagtaggcagctcttgtattcctaatgtactttcacacactgtagctttaaaacagaagcaagttgctgtgttgttgccaaccagatagcaaagtggataatattcttggttaacaccagggcaaggtactttttatacttggcagtttagttcttttataaaatccagtttgaaaggtgtatcagcaaattatcttgaaaaagctatcaaataattgccttatgaatgtaatcagaacctctttcaattataaatctttaagtaaaacatggaaacaataatggaaaaaataaagaactcttcagacagatgtaattgtatatgatagttttattggcattttaaactactttgtagttgttaaagtattttacattctactttctttgtagggaaagttaagcataattctgatttttttttaatctaaaagtcccatttggcacccaaaagttccatttcatatgcattactcagttatttacacataatccttcagattgtgtgtggaattgttctcgagctgtgtgttagagataggctgctgtgtgggtgggtcgagtctagcttctggattcctttttatacaggaggtgcagaaaatcatgccagagataaacaacagcattgcagaaatgaatccgatatagatagctcctccaggttcatgtttgttgctttctggaactgtcagatccagaaagtttgctatgatctcctttgtgtaccacactgtcgagattaaactagagattcctgcagacatgaaacagactcctccagcaaaggaagcatggctcttggtttctctgtcccctcctaagcgagtacatttcattcctactgtggaagtgcagatccccaaagcagacagaacacacgccaggaccatggtggctctcgcagcctgcacgtggatggggagggacagaatggagtgtttcagggcacagctgaacatcccagtgctgtaccacgtacagtccatccagagcccgtgcagctgtacaatggctgttatgatgttggagtccacatccacattcaccttccagttgggcagcagagtggctgtgagcactccagagaccccagataaggccaggatgaaagcaaggagctggagtcctgctgaggccatgatgttactgttaagtctgtcctcttagaaaatcctgatgtttaacaatgatggctgtcagaattctatctatttctgtgcagtagagaaccaaataacaaagcctaaggaaaaaaggcaaaaccaggattgagcgaaagaaagtaagtaaacaaaaggcttccctttagagtaggagccaagaacacatctgagtatcccccttctccagcccccaagcagatgaggatgctgtaggctggaggagaaaagctcccaccaggccttgaagactggtctgagtgatatgcatgggtggtgttgatacagggcataaagaaagcagttgcccacttaattctttttaaaactcaacatatgctgaaactgtagcgtggacatgtacgttgttaggagatttagacatttgaaattccagctatagtatctgataaagaattttaatagcattataggtttttcaaatgattttattttttatttttattttttttgagatggagtctcactctgtcacccaggctggagtgcagtggagcgatcttggctcactgcaagctccacctcctgggttcacaccattctcctgcctcagcctcccgagtagctgggactacaggcgcccgccaccatgcccggctaattttttttttttttgtatttttagtagagatggggtttcaccctgttagccaggatggtctcgatctcctgacctcgtgatccgcccacctcggcctcccgaagtgctgggattacaggcgtgagccaccacgcctcgcccaaatgattttatttttaatgaaaatactcaatacataataaggaagaaaataaattaaggccaccttttaaagatggtttataaatacattttagaaaagtatttaggaagtggctttcataaacagatctttatgacacacccacagtgccaggcacatagcccaagtgaaccatttgaggaggaaggacagcagtggaaagaagtctgagtcactggcatggttatccctaagttctagttaatacctgtttgcaaaatcctgactgaggttagtacttgttttacttcaggtgcctggtactcaaaacaattaagccactgttttttgtatataagaacatgaggtcctttctaattgggaccagaatcatttcctggcccaaatgaagccggctattctgaacaattcagaagtagtgatggcagatctcaaaaatacataccagaaataaccacatcattagttgtatgtgaaaggataccagaaataaattaaccctttattttctttgtttatttttaagaggaaggaaaagaccacctactttgtggcttggctgtgttttaagaaacaaaaaggctttcgattccatctttctattcctgttcccctatctagcccatctggcactgcttactgccttatttgagaaaaatgtaatggtttctgaaatactgcagtactgactttctttgtcattctgagttaattttgaatggtatgctaaagtggctctgtcgtgattcatatgtattttacaaaaggtgatacaggctcttgagtcaaagacacttgggccagttcttagctttatacctctctgtgcctcagtatcctcttctggaaaatggggaggattgaaatacttcgttcatagggttaaataagttaatacattttaagggcttagaccaatatttaagccacagaaagtcctcagtaatttaaaattgacatcattattagtatttttatttcttatgtattgtgacaattgatgtttaaaattatttggatcttttccctttttctcttccttccttgggctgatttattttcatagaatcttggagctgaaagaaacctcagacagacaatctcaagcatccttgttttttcagatcagaatgttcagataggatatcaccccatgtcatacagtcttcagcagccaacctgcagcgtccagatctctctccacccctcctacctcacagggtcatcccgcatcctttccccttttaccacaacacttcctgctgaaattctttctccccctgtgtgtttcccttgggaaccagggaaaacactgtatctggaggcaaaaagcaccattaactgtctacttcacccactcccctccccaccaaggaaaaaaaggactgtagaggatgttaataggccacatggctcagcttcagatgactcggcaaggagattgatgcctggctttggttaaatatttgaaatagtactaatccattgcctatatttaaagtataaactttgcatagctacaaacattgattctctaagacattagatcctagactatctggattgtgctgttctgtttttgttcataatctgaaaatgtaaatcttaccattttagaaaaggatttccctaggattttaagttcttaagagtcagacttatctgtagacatcagtgtgcctaggattcacctgctatcatacagtttcttttctgttttccaaacttagaccaaaatagaacaaaagttaaagtttctagaaaaaaaatcaagcacatgtttacagttttgtaatagctgctttcaagtttaggttttagcatttcggactccagccagcttgctaaattactgcctctggaccattttcagcttagggattcttcaagtgtggggttgctggaacattttctaacagcatctgcttgctcacttttctctctccctctctctttctttctactttgactgaataacctttgttgtcaatctatgttcagcttaccaattataatccttttcttcccattaactgatatattttataactttcagtatatttcagacatgaagacagtttgttcatcatgattaacaagtactggcagtgatcaattacagacagccaaaatcagtgtaaacaatatgacgtgtcatttaattagcatagtgcttgcttactgttgaatattggattcaaatgcttttttttctgcatagagaacttatgtagaaagaatttgttctccaaatgaaggtcactttctgctcatacaaatatactggcattttagctgcattgcgctttaccctccagccacgagtataataccgtttgtggcctgttctctcaaaatttctatctcgtagagaataaaggcacactttgttccagcagctgtggtggtggtggtagagaaatactgtgaaggcaagcagaagcagaggggaggggtcgcatgtaaacacttacatggtctacagtgaaaactctctcatggtcccaaaacacagtgcacacagaacagaacccaggcaccttcagtttatgaactactcgccaacagaaagtctgttgtagatttcactaaaatgtaaagtcagctttccagacaaggtttatttatatcaaaaataatatttaaaagcagatttactgcttataattcgaactaaataataccgaaagacctattcttagatctctaagcattaagacaggttttatttaccataccttttgtcagtagccttcactgtcttaactccttcggtcagttgtcttcaaattaacctcagttagttatggtgaagaaaaaccatatacgtgaggcttatttcagaaattctggatatgtttataaagctccaataagttaacttgaaaaaagcaaataaaggacaacgtagaaatctgagaggtaaaaactgctgatggtgttagaagataaataccaggttctccatctcattttttgagatgtgggagaattaagaaaggagaggcggggaagggagggaattgttgttacaacaggatttgttgaaacctgaaagctaaaaatgcttttgtgtcactgtgtacagaggaggaattatttgggtgctcacaaaaaggccttcttttcttttaatataatgttttagtcacatagttataacttatttttgaaattttctctatgttgaaagatataatgtattattttatgtcctcagttcaagaatgtggtctgaaatatttttaacaatgtcgtgccttgcaaatgagagttgagactcccttttttccctggtattcttgacttgtctggaacctgaattcataaaattgttaattttcaaaataatcattcagaagaaagttttttaacatatgtatttttttcaataaaagaaaaaagaaaacccagcaacaacttttgactagaatctgatcactaaacctacaggtatttttgtgtgtgtggtgccctgagttttcttgttattgcttccacttagatttgtggagtataactatagagattcaggaaatgttatgaataaattacccaaaatgatgtgatgagacacatcagataagactgtgatcagatactgaggttgtagcccatgaataatggtacagatggatttcactgccatccttttgggttctcatttttttcttcctcagtaagttttattctacaagctataaattcatagccattatacagaaagaagataattttattattggatttttaaatttaacaactgttaataaccatgttagactttaatcatttctttaaaagtagtaaataaacaaacacatgtttcggttatctggattttttgttttggtttgttttaatcctaagttttgcattgagcaagatactctttttcctcttttctaagtctaacatctgtgggtttgcttttcagccatagtattgattacatgttaagtcttagctctctaagtcgttgtaagctttatgtgtactggctttgttctttgattttatttcatgggaaatacaaacaattcagtgcataaataaatactggaagaagttgagttgaattgcagacactaatagtcgcagcagtgtcattagtgctgcatccgaagacacctcaccagggccctccagcgtcctggcttgtttcgctggtcgccatggttgttagtgcagacataagctttgtgaggctgactgatggcagatggagggacccggctgctccccactctaacctctagcataaggaagctggctggaggataaatgggttaagcatgctttaatgtacatttaatgtacatttctattctcaaaacatgttgattatttttttgccttgatgaaaacaataatcctataaaatattaattgcctgctttagaaggaaaacttctgaactggaagcaactttcgttagctatagacctttaatgaaggcagaatttcttatataaaaaaggagctaggaaagtagaagtgtaaatagaaatatagtttatcaacattactatccacttctgatgtggacattaaagggatattaatcttttaagtccagagactctcctaggtaagtcttatgacccctcagcttaaatctcttgcccagccctctcccctgaactcccaagttgtgtttctgtctgctgacttggcgtcactgatggatagctcagacctgtcatggcacaaaactgaattcctgaccattcccaaactgttctccccacggtcttcccaggttcattagtggcaaatccttccttccatttggccgcctgagatcttaaaagtaatccctgattccatacccaacatcccttgagtcaacaagttgttttgtttctgacttcagactagaacaagaaccttccacctctgagctcctcttctgcttccactgtagcgcaagacctctgaggtagaagttcagccccacagggcaagcacttctctctgtttcgttcatcactgattctcctgtgccaggatcagtgcctggcacatagtagggatacaataaatatttgcccaatgaatgaattcagaaactgactttaagtatataatgttaaactataaattgcacttgaatgattaaaaatacaattttatttctaagcaggactagaattttaagtaattttggaactctagtttgtcatcttgctaataacattatctaccatttataacctgctttccatatgccaggtactgtttaaggtgctataatacttaattctcaagacaaacctagcagataagaagaattttatagacaagaaaactggccgggcgtggtggctcacacctgtaatcccaacactttgggaggctgaggcaggcggatcgcctgaggtcaggaattcaagagcagcctggccaacatggtgaaaccttgcctctactaaaaatacaaaaattagccaggcgtagtggcacatgccattagccccagcttctcgggaggctgaggcaagagaatcgcttgaacccagcagacggaagttgcattgagccaagatcgtgtcatagcactccagcctgggtgacagagcgagactccatctcaaaaaaaaaaaaaaagaaaagaaaagaaaagaaaactaagctacagagaagtaacttttgactaaggccataaaatgagtaaattgcaggaatggggttgagtcccaaaacaatgatttttgaaaccctgacatactacatagcattgccccacctctaattagaaaagagcatatttgtaagtcctacctctcttggtagtttataagctatggaaacaaattaacccagaaatctctgtagctttacatatcagcatttacttctcagtcctgcaaagtccactgtgggttgagtgattgcagtccatctttcttctttagaatgttttcatttatcttttttttttttttaattttttaattttttttcttttttcttttttttttttttaattgatcattcttgggtgtttctcgcagagggggatttggcagggtcataggacaatagtggagggaaggtcagcagataaacaagtgaacaaaggtctctggttttcctaggcagaggaccctgcggccttccgcagtgtttgtgtccctgggtacttgagattagggagtggtgatgactcttagcaagcatgctgccttcaagcatctgtttaacaaagcacatcttgcaccgcccttaatccacttaaccctgagtggacacagcacatgtttcagagagcaccgggttgggggtaaggtcacagatcatgttttcatttatctttaagcagaaattactttagcttcccttagtgtgtggtgttgcttagtgatgttaatctggatgttcaggtaggcttttattgtctttctgaaagaatcagtaatttaactgagtattttggaaataacaataccacaccttttcatagagcttaacagtttataaagcattgcactccatcttctcatcactggatcacagtaacaggcttatgagagagacctctaccctaatcaaagaagcctggggatcagggttaaggggaaacactttggtggctgacattttcttcaagaaggagtttgaaggccaccactagaggcagtgtgaaccatcagagtgtttttttgtggtggaatttgtggtttaagagcacttggctatggtgtggaggatttaaagagatcagaattggagacagacagactctgggaggctgtggtaatgggagcgattaaatggaaataactagatgagtagagatattgcataggaaatggattcaagataaagggtgttcataaattctggaaatataattaaatatatataatgtagtcaagggcatcttcggtctgtaaaaagaacccaaaatttcctgtctacattttgaaaacaaatttgtagaaggggctttgggcttgtattggtttcagatgtttcagtggacaaattacagaaaaatctaacagtagactaaactataaggactcattgtttgaaagtcagtactgttcaaggttagttctgcaatttaaaactcttcttaagtattccagctcattctgtttttctgttccttcaaactgaacttttcttggctgtgtgaaggttgattatacaaattaggtcattcttgtcttacccaactaaatcagagtcaaggggccaggaggaaaaagcactcagggcacatagcactgtcgcacctgctccaaaatttacactttctataagcctagctgctgaaatggcctgctgtaacaccaagaccagttttagctagtagctgctgggaccacctactgtgactctaagactggttttacctgctgtcgtcactcaccaatcagagcttgtccacacccaaaagcttctctagtgccaatgagctttctttcaaaacaacacataacatttctctaataaaactcccaaccttccttttgttctttggacatactgaagaccacctggtctgtgtgtaggccctaatttacaattcttgcttcccaaataaaacattgaatttggagatttgtctctatattttaggtttacttcaacagctatgagatggctgcctcagctgaccctttcatcaagaagcaccatattctacggccaggtgtggtggctcatgcccataatcccaacactttgggaggccaaggcaggtggattgcttgcggccagaagtttgagaccagcctggccaacatggtgaaacccagtctctattaaaaatacaaaaattggccgggtgtggtgccacccacctgtatttccagctactcaggaggctgagacacgagaattgcttgaacccaggaggtggaggttgcagtgagccgagatcatgccactgcactgcactccagcctgggcgatagagtgagactctgtctcaaaaaaaaaaaaaaaaaggcagcaaagtattctagagttctcttcccctctcccaccaccaccccagactatgctttaatgtctcactttccagaactggctcatttggtcattcttttttttttttttttttttttttttgagacggagtctcgctctgtcgcccaccctggagtgcagtggcacgatctcagctcactgcaagctccgcctcccaggctcacgccattctcctgcctcagcctcccaagtagcggggactacaggcggccgccaccacgcctggctaattttttgtattttttagtagagacggggtttcaccgtgttagccaggatggtctcgatctcctgacctcatgattcgcccgctttggccttccaaagtgctgggattacaggtgtgagccacagcgcccagcctcatttggtcattcttaactgtgagcgagactggggaagtttgtatctggcttttcatcccccctggtgagctgtatccagcagggactcaggctggctttgtgggtgtcacagggctctagctgcacttctagtgaatttaatctccaggatttgagttgactgtgtgatactttcccaagcaactaggattgttccccaaacctgtgattctcatttctgcccacacgagggctttggaaaagccccaagaggctcaggcccaacccagtggcttttatttaattttctgggatggagccccatccttgtatttttcaaatgctgtccatttaattctaatgaaaagttggggttctgaattttaaaaaaaatgttgtgatggttaacactgagtgtcaacttgattggattgaaggatacaaagtattgatcctgggtgtatctgtgagggtgttgtcaaaggagattaacatttgagtcagtgaggtggggaaggtagacccgccctcaatctgggtgggcaccatctaatcagctgccggctcagctagaatataagtgggcagaaaaatgtgaaaagagagactggcttagcctcccagcccacatcttttctcacgtgctggatgcttcctatcctcaaacattggactcccaagttcttcagttttggaacttggactggctctccttgcttctcagcctgcagatggcctattgtgggaccttgtgatcatgtgagttaatacttaataaactcttctttatatatatatttaatatttacatattatatattaaatatatattatatattatatataatatatatttatattatatataaatatatttaatatttatatttaataaactcatatatatatattccattagttctgtccctctagagaaccctaatacaaatgttttttcttctttgctttccattcaatcttgaaaataatgacagttcagagtaagataaaatagttacctgttccagccctacaaatttaaagtgatttgacctaatcctaaaataatgttcttcttctgtcccagccttaggaaattaacagtatcagctatgaatatacgaatgtactgaccaagcatcttcagtgtgatgtctagtccgtttgataattatggtttattatgaattactatatttgtatgcatgttctatttctcagtcttttaataatattactagcagcatttatcaagtgccttctgagtttgtttagattgagagcctctctgaggtcctgtcttctctctgagggacgggagttgctcaggacctgcagcgctggggtccagaccctggcagttgccaatgtgctgccacacccatggcccggctgggcagcctcgaagctgcctcaggcagctcctgccacatccacaaacccaagcgggagcacagcccgggacaggaaacacagggcacgtccagatgctgctgcttcacagacaccaagggcgtggtttgtggaaaaggcctagttttaggaaggtcttttccctctgatcatccaggaactccagattaaatgtaacagaaaacctttatacaacaattgtcagttcttgttccatttgtgctttcttgaggattacacgtgcatctccctgaaattgtttaatctcttgggaccaagagacactgactcatcttgttgttgttattactaataggtgtaatttacatacatacatatgtacatttacataatttacacagtaaaaaaactcttcatccccctcaccacatttcttagtcttatttctcttgtgatctgagtttgctgtcattctcttggcctcagttcttcctaccacatctgctctgagaggaaacactatgtgactgtttaaaatctgttctttttttatgatcccaagaagaaagagaaaaaaacaaagatctgtaggaagaaaaaagggtgaggacagaacttctgcagaaataaatattgttacaataacacaaattgtaaactttaggataggtactgaccgtgtagttgatctttattgaaccagttggtttgaaatacttagaatgctgtcagctttaaggttttacagtggaaattctttccttaaattggcttttggacatggatcacaggtagagtgaaccaattccagaaaatgtgatctacattcacatttgtcagtattttctttttctatgacatgcataattatcatatcacaggcatcagtgacttgctgcctctacctgggattctccttacctgggaaagttgtaacctcgaggcccgtgatgtcctaaagtggactgtcattagcttggtggaggtacttgaagagcaagcagacactggagggtggggaaaccaagcatccggaggcactcatcttgctccgttgttttacccgacagtgaagtggctctcccaagcccctgtcctcctgcgttccattttgtggtgcctatagcctgcaagatgccatatgcttcctgttcccaaccacccaggtctgcccgtgatcatcccacttcgaactttgaatccttcttatatgttgttctttaaagtcttactgattattccctgtggtcttttttttttttttcactagcccttctgttgtcttaagttatggctgtgtcttggctatttacatagtaacttcctcatcattttttcatctccactatcttgtcctctaatggtcttgaacaccgtgagagtgttgaatgaagacccttttgtagacagtggccagcattgtttctgtgtctgtgcatgtggtcgtgacttagcttttgggcatatgataatcatcaggaactgagttgtacgtctcttcagtgtcctctgtatatcatgttgattacagttctcagttgtaatatctaatatctaagatttaagatttaatatctccttagcccgggtcccttgtgagttccaagtgctgctctgagctgataaccagtcacgtcctagacaccctggcctggaaactaggacatctgcctcgggcctgttatggccaaggctgctaacactgagaaacagtcttagcttgttacagcgttgacgtatagggttagaaaggcaaatatttaaattcattttaaatcctttcatttgaaattttagtaggtcattttggtatactgatggactgagtttggaaaaggctggcggcattaaactagaatattttaagtacttctgatgcctttgtactgatttcttttttgtaatcaaacccattaatagacttaaaactcaaggaagaaaaaataatacttgtaattttaaataagcattcaattataagtaaaaaacatttttgtattcgttaccatagttaccaagcagctttcctatagttctagaaaaaaatgggctccatcattcagagtaattctgaaaggtgcctttgggggaaagggagaggaaggggtggtacaggagaggtcctggccgtcccagaagcaggagacataactggaagagctttgttgacgctgagttttacagaatctcccactaaatagtaactgcatttgtgaggggaattctcttttagccgtgacataatataagccaacttaacagagtattggaattgtattcaaactttagaagtcgacgctatagtttacatggggtactactatatttgttcagggttttaaaactttatttaaatcaagcaaaagttagacacttcctgtatttgcaaataccaactatatctcaaaggaatgaaatcaggcaaataaagatgaggccaaaatttaaaatctaaggaagctgaaagtggcagtttctgtactggaagagagtgcatctatctctgtatttgtgcttttggtcttaatagtttgtaagccttatgtagagttttgataatatttcatggttttaggcctaggcagggattagattttatctcagattttgctaagagtatttcttctggagactagcaggctgctagtaagaattgatagaattggctctttgtcactgggagaactggagttgaagggttacaggagatgagtcctggagaacgggaggcagggacaagggtgccaggaagctcaggggatgaaagggaaatggagagtccagtgagagaaggctggcgaggtgtagagagtggccagacacatgcctgacagttgggaccacttctctatacaaatcaggaggaggcgaggtaggcaggatagttcagagtttgtgggaaggaacctgacatctgaagtcagtggagtgtgtcttgggctgctgcctgcactctgccattcatagatcaggtcttctttttccttccccagaactgccctgagctgaaaccacctttcttctctccctatagcagtacatctaccccacctacaccctgcatccactccacagccccttgtcttcttcagtccctctttccctgatgaccacagacctctccaagctgggcactgttctatggtgcgttttgttaaagtctaagggaagtcctgtaggaagaggtagttgttactaaacttgaggaaacatgaaacaacatatagcacacaattcaaaaaacttactaaaatttattaagagcatttgacatcttagttaagtcactgttcataactactgttccaccatagaatcttcacaagaacagcctgctggacttcacaagaaggctgatggatgttgggggtgggcatttggggtgtggaaaggccgcttggcacattctcagcatgcgccagcccacaccgccccttaccaccaaagccttctatttcccattccatccagtaggagcagctgtagctgacctgaaaccttcggggacaggctcattgattgtttaaatagggaggtgcaagctctcaggggtccggggccttgatgacacagctcaggcaccacaggcacctcccacaagcgcgtcaggctgtgtgaggctgagcacagcttattttcactttcttgtccataaagtctcacatcatattcagttgttttccttctaccctaaaagaaacacaaccagaaaagccagtctcccattttcatctgtttaaggaattatgtagccacaaggatctttagaagcaagtcctcttaggagaaaatgacaacctctatgggatttcaacaatggagttccttttgaaaagcagtggtgcagcccacacctcctaaattgccgtactttcttcgccttttgttgagtctgtatgagatcctcattaacaagtttaacaattcctggagactgaggcttttgtcaattatgacgagacttcccatttcctagaccatggtctccgttagcatttttgtgtgtgtagttactgttttgaatccatttccctctgtctttaaatgtttttcctttggtatttgaatttgtccttgtgaatcaccatgagtccatttttggaacaaatcagggtataaatctcttataagatatgcctgaaaagttttatcttctgacaattaaagaatctccacagctggcagtagcttaaacactatcaaacagtgacattttttgatggtttccattttcaatttcagtcctgcctatgcctttcggggcatttaaaattgctactagaaagttctgtggcttttcagactacactcatgaattcagtccagctgattaatcagtgtctaccgaaaataagtggtgtctctatctgggaagtttagcactgagtggtccctgggggcctgtctgccatctctctgtgtcttgaagctgctgctgcggcttatttttttcctcattcaaaaactaaaatattctaatgccatctattatctgctgactgactttaatgatttggattgatttttaagccattgtgaaactgtgttttaaaattaagtgaccatcaagcacaggtctggtggatgtcattagagaacaggtgcagccggctgatttctccatgtcatttgcgaatccagaatgtaccatcttccatgcctagagatgaaaccgaagtacgtggaaaggtctgtttatgaaaacaggctgttgacagcccatcctcctgttttacaaggatgagttgattgatcacactatgccacatatcatgccacagaatgataatatgtttgcttacaacgaaggtggacgtgggcgtggtgcacttcactcccttgatacagcccaagatagagcagccattcaagctggtggaaaaagtggttcagaatgtatttcagttccgaaggaaatactgccatcgagggctcaggtaagaatgccttttcttctcttcagttgcagtctttataaaatcctcaggcactttttaagagtgagaaccttgtttgctctattcttaaagctctgagtattacacttagttcaggcctgtgacggacaagacttcactgccaatgaggagagagcaaagacttgctagacctcaggtggcctctctcagggtggcttaaacataagcgcagcctggagttggtgactgcacagctcacagaggctctgtaccagggagctcgtggttccccagtgaggactcaagacagataataatgggttttttaaatgcttgctttctaccgagttgccctatctcttctttaaggacacacttgagaactaggaagcaaatatgacttctgagcagccaaaatcatatcacgaagtcctcacgtaagcacgtttccatctcacagaaagctgctgctgccaagaggctctcaggaatcactgggaaaacctgacagggcctggtggtctagaggtcgcccacctcgatgggctctgaaggaccacagccttgttgcagatccagaaagagccaagaagctgtttagttaagcccagtgatagtctgcttaagaaggcaggaaagtgtatttgtaaaagatttccatctacgataatctatccatagtccgctgtttaaagaggctcggcgtgagaggcacatatttctcattttctaaaacctcctcacatggcttcattgtaattctctctttcacaaggtccgaagtgtccctttagcatatgaaatgacagcagattattttaggggccagctgggcatcagctcctaagagtgctgcagtccacaaagcccattgctgaggatgccagatggcagaagctggagcctcagcctgccacttgttgcctctaattaagccagaattcccaccttaccagatagttcctgcttctctagcagagacttaaggtgcagagctggtgacagagatgccactggccagccattttggctgcagcccccagctactgtgcactgctggtgagtgaaacagaagctggattttggctcacacttacccctcacgcagagcaggacccacacagctgtacctgatagccctgattcatgggggaggagggagcacaaaactatgtccttttatgtgcttttggaaatcctggaattggtctgagcctagagctggcactagcgtttccaaggcaaccccccagctaagtgaagggccctattcatttcagatacaccatcctcaggacagacatggaccagatactgtgccacccagggtaacaggtcaaaggactttgacttattggtgttcttcagatattagaaactgccatcatcaggccctctttgccatgaaactgaactcaaagatctgtcacctcaccctgaaagtgtgggggacatgcaattccttgttgaaaggaccatcagcctataagcaacatgctatctatctcccctggccatgacaccttccaagccccttgggatgagctctgtaagagccctgagacttgaagaaaaatgcaatccaggcctaactccgcagcatttcaagcagttctgctattcattttaaaacaatggttcaatttggatagatgaaatttaaaatatatcctctacttcaaatcagttttaaagatgcttgaaaaataacaagaggaataattatattttcctatcagctattttcaaacttttagcaaaaaaaagtaactcttttagcgtgaagagttctaaaggctgatacattcaaattctagagaatcaaaactgatgatttgtcacacaagaaataatacaactttcacattgaaacatgaggcacatcaagcttatgtttctacaagaatgcagctgagcagatgttactttaaacttacttacttacctttaaaaagtacatgtactgatttagctttggagaatgctttcccattgtgtgcttgcctcgcgcctcaggttagagctgcctcagtggcgggccgtgcctcttatctggtgctatataatccaagaggctcctgccactctctccagctgtcagtagccagcaactgtgttgtgttgttttcaaatgagggttaaaaagtgtcatgatttgcagaatttaagtaaaattcttatttttctgtctgtctgtcttcccctcagaatgttattccctgaagcgcagcgcttggaaagcacgggcaggctgttagagttggcagacatagaccctactcttcggccccgccagctctccatctcacacttt

SEQ ID NO: 14507 - DNA, 444 bp, Homo sapiens
atctttacgattccaggacaagcttttgtccccaaaccagagaatgtaccatcttccatgcctagagatgaaaccgaagtacgtggaaaggtctgtttatgaaaacaggctgttgacagcccatcctcctgttttacaaggatgagttgattgatcacactatgccacatatcatgccacagaatgataatatgtttgcttacaacgaaggtggacgtgggcgtggtgcacttcactcccttgatacagcccaagatagagcagccattcaagctggtggaaaaagtggttcagaatgtatttcagttccgaaggaaatactgccatcgagggctcagaatgttattccctgaagcgcagcgcttggaaagcacgggcaggctgttagagttggcagacatagaccctactcttcggccccgccagctctccatctcacacttt

SEQ ID NO: 14508 - DNA, 29751 bp, Homo sapiens
gggcgagcggcgcggcggctgcgatgagtgcctctgcggccaccggggtcttcgtgctgtccctctcggccatcccggtcacctatgtcttcaaccacctggcggcccagcatgagtgagtgagccggcgcggcgggggtcgcgccgaggggcggcgggagttggctcgccgcgacgggagcctcgcaacttttccgagggggctgggaccgtccgccgcgggacagaggttcgtggccgcaggggctccccgcgcctggccagactaggggggcgccccaggggtcgcacgggccgggtcttggagccgggccctgaggtgcccaggctggcgcatttcgggatgttggtgccagcaccgcgccaggtgcccggggtcacaggcgtcaatacggccatgcccctgccctggaggggcccaggggccggtggggagcggaacaaacacggacactacgaacctggccgtgtcagctcgtttgtgccttgttctttttgcatctcacgggaacgtttccatgtatggactttcgcatacttatcatttcttattaattttagaaactgttgtgaatgactagcagaaatagcccggaaccaacaggcagagacgtgggttctaggcctggctttggcactgacggtgtctggcctgacggtgtttggcactgacggtgtggtctggcctcggttttccggtcaagtggactttgtgtgcgtcctattgtaaggttccaccgagacctctttgtgaaggggcgttgtgaatggagaagtgcttcccagtgcctgcgctggggtaggatggggacaggcagcagaggcagaacacttcaatgtgaaggaaatgggtggggctgatggagggggacagggcttgggttcgaagccctgcctcccactccactgcagggatcacggactaacctgcagccggcagctgaaggcctgagggtcgccgggtgttgggacaggcgccagcctctgttcctgctgatgttggttgctgtctggagggaggaggaagtaacctgctatgtctctcagctgttggtgctaaggaaattgcatcagtctgtaggctgcaaacccccttcagctggtcaggccgtggagtgtctgtacatagggtggtaacttcctcctctccagctgcctggccgcctgatacaggcagcacccacactgagtgctcaccaggcaccagcagtgtctacccttggtctggcccagtctctggaggcatcccctggaggcagctgctctgggccaccgaatattacatgcctgtcaatatagtgcatgggggaccctgtgctccaaaaaatggcattacgggtagttcagtgaagatatactgagtgcctactgtgtgtttggcactgttccaagtgttggtgacatagctatgaacaagccagaagaggctgtggaggcaggtaatgagatagacatcaacaaacattaatacatcgatagtgacatgctatgaagataataaaatagggtgactggggagggggctggtggccagggaaggcttctaggaggaggtaacacttgagctatgggaagatctgggaatggagcctgtcgggcaggaaaatggagcagtgcaggggaaggaattggatgggcgtagtaggtattttggaaggtgaacagatggggcttactgaagagggttgcatggcagcagaggatttgaggatgagccctaggttttggcctcagccactgggaagatggtgatggcatttactgaatacagactgaactatgtattgctgtgcatgatggagcgcactggcaagcactacagcattttgaataattagtgtcagccattcttcctgtcctcttgcaggttaaaacccccgtggcctttgattcctctcttctttctccactcccttcctcctactgtctgcttccccataagtcctggggctctagtgtctgttccctcctttcagttctccctggcactggccctttctgacctggactgtggcaaaggctccggtgcaagtctcgctgcccagccccgctgcgtgtttctcggcctcggccccccagtcccagcccacgcactagtgctcctgccgcaccagcctgcctttgctccttgaccattcctcctcctctccagcctctagcccggactcctgctgctccctgacagggatgctgccttcctcctatcgcagactgttgaagccgcacctggactttatggccacttctaccttctgcagaccctccctctctctcctttgagctccctcagtcccttgtttgcacctttctcccgagagttactttcctgtggtaagaacttacctgccccggctatagctcacccctctgtactgtcctgcccaggccagcgccgtgtgcatcgtaggcactcaggtatgtttgactttgttgaatcgagtttccttcccaccaaaccttttatgcaactctgaaaaccagaaaaagaaaattagattgagaggtcaggaaaggattgagcgtgttctgtctccctctctcactgagagagacacactgctcacactcatccttgcatgtcccctctcagtaggtgtctgttcatagaagggcatcagcagcccttcccaccccccaagactagcaactttctcatcctggggttagtcgcagcccttacctgtccctgagtccctgcaggacctgtttcttcctgtggtgagcaggtcctgcacttggctgttgtaggagggtctctggggacagtgccaagagtcagagacaatctgctgccctagtttcccttcattcttccctcctctcctggagctaagagcatgagaggacgctgtgaaccagttcacactgctctgtcctgctccagaagagcaccaaccacgcgatcctgctggcagtgagtgcaggcccttggtaggagtgaagactggagttgtcacctgaccaccacctgcctcaggctgttcaccattaaaatgcctgtcagctgacccagcacacccacctcttccctcatgggattcttcagcccagcatcatactcttgacccacactggcttcctccttcttcagctcatccccacaggaggagcctggagcaaccactgaagtgcaatcaccagaaacctcctatttttcagtttctcacctggacattgaaacagccaccctcattcttttttaaaaaatgtaattaattgttattattttttgagacggactcttgctctgtcatccaagcgggactgcagtggtgcaatcttggctcactgcagcctccaacccccaggttcaagcaattctactgcctcagcctcccaagtagcggggattacaggcatccgccacctcgcctggctaattttttgtatttttagtagagacggggtttcaccatgttggccaggctggtctccaactcctgacctcgggtgatccacccgcctcgacctcccaaagtgcttggattacaggtgtgagccactgcgcccggcctcattcttatcatagaattgatccatctatcatttatccatccatcctccatacattcacccatactccatccatccactcatcatcatctatccatccatttatccatcatcctccatcatccatcaattcatccatcatccatccatccatttatccatcatcctccatcatccatcaattcatccatcatccatccatctattcacccatcatccacccattcacccatcatccatccatccattcatccatcatctatccattcatccatcatctatccatcctttcatccatcatccatccaaccattcacccatcatccatccatctatccatccactcatcgtctatttgttccccccttccctccctccttctattcttatctttctctctcctaggggacggtgatagttatccaaaggtcccgatgttgggctgtggtggtgtggaggggtctcagttgaggagtggtgcttgtagctgctccaatctgaagaggtcctggtgtagcaggccattggagtgggccaggtagtattttgtctagaattggaagccctgtcagtgctggaggtgtgagagggagagtattgctgttggactgcaggagaactcctagtgggtagagctcagagtccattgagataggttcctccatgtaggcagggacttctcttatttatccagtctcctagggcctgcaacaatggctaccacataggggtgcagaatacatttttttgcttgctatgtttttgaattaattaataaacagatagatgcaatgatgtgactttcctagggtgacacagttagcaacagaatgggtaccaggatcccggtttcctgactgataactctaccaagcctcgtgccctatcgctgccccactgagtagcggctttggcccctgctgtccttggtgccactccctttcctgtagaacatccaggggatgtactcaactaagcttcaccttggtttctatggtttggggttggatgctggtctgttggccctggttctggggtgttgggctatcttcattctggcctcaggtctagtccagactccttctccatggatttcctggcctcattctctggcccatttgactatacacataacataaggtctttcttgtcccctggaaggcatgtttagttgtaatgcctatatattccttggagctcagtctgagggtttctgactggccctgagggaggtggcagagtcagtggtgaggcctgtcagctgctagggagcaggggttagaggaacgtgtaagtggaggcagtggggcagtggccataggtgcagcagggtggggtgaggcagagggagctccagacgtgtcatctgtgcacatgagacaggataagaggagaatgaggaggacctgatggcttcggtccctgaaagtcatgggctgcagcccagatgggccaaagagctgcagataaacttcactaactctacagtgctgggagctgcaggcagaggcagaattatggatgaattatgcagcactaggagggaatgcattcaatagtcaggaaattccaggcaccaatgtgtttattttgatagtgaccacctccctgttctggtcgttgcagttcctggactattgtaggggttgctgccctcatcctgttcctggtagcactgctggctcgtgtcctcgtcaaaagaaaaccaccccgggacccactgttctatggtacgtctccacaaagggaaatcttttgtatctgattaataacacaatactttcagcctcagtcacatattcctccttggttgtgaatactctgagccctttggtaacagtggctgcaagtgtaggggtgtttcaggacaatctggccctcgcctctggctattgcctctcaggcagtggactccaccctctcccaggtggcatcccggtggagagttactgccaggccaggcagggcaccctgccaaccccagcatgctttgacctctgacctctgacctcgactctcatgctagctccttcctgggcttcctgtcttcagcctgctactagcagtcccccccacttagtgcagaacttaactgtgtggtgtctgggtctgcacatatgcatgaagaggaaaataatggaacctgccatagagacaagcacctatagtgcaccttgtatgaccctgagcactttagcagcaggctttcacctaatcctcaccatccctccacttgaaagtgaagcagctggcttggagatgctaagaaatgtggcaaaggtcgtgtggctgttgacccctaaagcccatgcccttccatcatgcatgctgccccagccaagctgctaccggcctttgagcacttcctgtgccaggtaccttgctgggcattttgttctgtagtttctgcttcagtaatgctgcatatcaaatgcaccccaagtcctacagcaacaaacatttatttttcttgctcacaggtctgtgggttggggccactctgcatcaggctgtgggttgatttcagggctgttctctgactccttgttcttggaccagcagctcccaggcatgcccttctcatggcagatacagaggcacagtggggctagaaggaagaaagtggtggctcttaaggccttggcttggagctgccccatcttactcccacccatattccaatggctgagatgaggcatagggccaagcccatcagcaacagcatagggagcattctctgcctacagtgggccttgggaaaggtggggtgggaaggaagaattgtgagtaactagtttctcccaatccacatataagaagctctgaagcttcagaaatgatgtaatttgcctaaggttttacagccagtcattagatgagctgggtccgtctgctttcaaggcccacatgccttttcctggctctctccactagcctgtgctctgacccttgcacacctttccagatgagtttcctgctgctgtctgtccctcctgttcctccccactccatggagcctgtattaactgtactgatgtctctcctgactcttcaaggctgggcaccctttctcctgtaccctcagccctctgtcctggtctgttacaactttgagtacactgcagcctcagggtgaggctcaaggccagactcctcacgtactagaaggcagagaccatgtccttgtcattgctaacacagtgtctgacacttgtgttgtcatcagcaatcattggcagattatgtgccgaacacttcctttcttggagacatatgatggctaatcacctgggaggcttctggaaaatgagtatcaggaagtgacactgccaatgagaactgggccaaaggcccccatggaggcgtggggaaggcacatctgcaaaacagggcacatgtggccttttgttccttctggggagaatgtgaatgctggactcctggctgctgactccaggcaaggccggcttcccttctctgtgaattaaccatccccacactcctctccatttcttttttcacagcttttcttatattcaccatcagatttttcttctgtccatgtccatcccatagtctaaggcaccaatctgttacaacttgaaaatgcagctttgacaaactaacatgcactaaatttgatcacctgctgtttaaaaagtattatttcttagttatttgtgctagtagttttaagcccatttaggagatgctcacaactctggtaagattctctgacaggtatagctttccttctgtcatattcaattataccctcttgtattcatttttaacatcactagtcttttttctgaaagccattgtcacttgcacatcagccacctgtctgtctctaggatacgccatgtggaatagggtaaccacactggacacgctgtgaggtggcctgcttgggaatcattgagatgaatcacttcgtcaagtcattgtctttttttttttttgagacagagtcttgttctgtcgcccaggctggagtgcagtggtgtgatctcggctcactgcaacctccgcctcctgggttcaagcaattcacttgtctcagcctctggagtagctgggattacaggcgtgcaccaccacacccagaaaatttttgtatttttagtagagacggggtttcaatatgttggccaggctggtcttgaactcctgacctcaggtgatctgcctgcttcagcctcccaaagtgctgggattacagacttgagccaccatgcccagcctgaatcattgtcttaaacttagtggtcacttctatgcttccttggccactcagttactggctttgctcccactgcccatgtgggatgtgggtttgattctgggcagccacttgtaggggagtggaggatgggtggagttggcctgctagaatcttctgtgactgagccggcagtgaccatcattctccactcctgtgatgagtgttcccttgatgagagtacttaggcagggatggggagagctgcgaacacaggtggaggtccagctgggtgtgtagaaggggtattctgttagtctatctcgataattgtccacagcatcttctggaaaacatgaaaaacattccattattattagctgatgccaagcttgtagtaattgtctcctgagctattgctttttaaactgctgctttctttgctctagtgtatgcagtttttggatttaccagcgtggtgaacctcatcataggactggagcaagatggaatcattgacgggttcatgacacactacttgagagaggtatgggatcacttagtgattatgaggtttcaaccaaaaggccacaacccagatcacattactcagagacagaaatcctctcatttagtgtgaacaggtacgctacgcaggctttcatttcctataatagccttaggtcgcttagtcacatggaaagtggagcagaaaggacggttagatcacgagaggcaattctctccaacattcagctctcacggcttctctcactcatgaccgcacacatgacctgcttttcccctttatctgtatttaatataaataaggtaccttaaatggatttagtatttatgtgtctgttaatacatgactatctcagaaaccccaagtcagtcttaaatttgtaaagtacccaacacagaggcacttgatgaagtcatttgattgtgatggcttgcactctccaccatgctgcccaaatcatagctttgatactacctggtactcgagagagctagtcctattttcttattttatggtgggctgaacccagccccagagaggttaagtgacttattcaaggtgacacaggaaatgaggaaaagggctcaaagcagattcttcatccatgttcagataatggggagctttgtatgtacgctgtgggagtttgggttttatcctgtctgtgagggaagattttaagtcagtgaagaatacaggcagctctgggaaggatgggcttgcagggaagggtccgtgccatgagctggggcaccagtcaggaggcttcctcgggaccagcaggggcataaacgtggctggatggaggcagcgcatgggaagtagagagagggatgaactttagagaatcggagtggctggaatgaataagacttggggacaaattgggagtgatgggaaggatgaggcctaagacagtgtcctgattcctgctttggaatttggaagaatgctgctgtttttacaccagagagggatgacaggaggaatttatttctgcagacatttgttgaaggggactctgtggtcagaagacctgctccctgccccctgggagctccctgcctgaaagggtggggagatggaattgtcccaggcacagtgagagactcactccaggcacagaagtactcagaggaggaattaagtctgggtgcagtcggggaaggcttattgagttggtgacactgctgtagcattttaaaaatggtcatggcagtggaagatggacatttccagatggaccagggaggtagggggaattccggagagaagggacagcttgggcaaaggcttggagaggagaaagagcatgtgcctctccctggggcaccaatctgcaaggatgaggctgagtttctatggggaggtggagtttcagatgctggcagggctttgcaggtcttgagctctgaggagcagtcctggaagagagagtcacgggccatcggagtgcagttggtacctgaatgtctgagaggagaagggcttgcctatgagaaggtagagagagaaaagggctgagcttgggactttagagaccatggccagaagaagagaagcccctgaagtggaccatggggggcaggccaagaggcagaaggaaaacctggagagtgggggccatggagcccagaggagggaggttttaggaaggaggcggctgacgagagggctggaggctgagttggcaagggtggtaagcattggggcagacggggtatcagaagggggactggggtgtaactgtggtggcaaggtctgcagggccaggctctggggacccagctgtgatagagaggagatggggcttggtccagcaggctgtgacaagttttggggagttttagagtagaggaacaacatgccaagagccaggccttgagaatctttatctggcaggaggagtgtcatgggttggaaggaggggacaaaggtagggagaccatttgggaacatagctgtggtccagtgagggacactgagggctagacctaatgctgtgaagaagagggagaattgccggggtgacatcgtagcaataaagttgatagatttgctgagagactgcataggagaatgaggaatgaaaaaatgaccatgtggttttgaccttggtaagccgaatggtttcaccattaatatagagaggccatggctggcctggtggctcatgcctgtaatctcagtgctttggaagacaaaggcgggaggatcgcttgacgccaggagttgagactgcagtgagcaatgatcaccactgcactctagaccgggtgacagagtgagaccctgtctctgtacgtacacacacacacacacacacacacacacacacacatacagagagagcaagagagagagaggcaagatggaaggctggttgaggggagaagctgatgaattaagagttcaggcgagttgaaaggacctgtggcctgtgcaccatgcagttaaagatgctcatcaagctaccaggagaggccagcactggctcagagagccaggtgtgttagcaatggaagtctgaaaccataaatcggatgtattcttcagtcagagcaagtccaagagaagggacgtgggcctggcatgggtgtagaagcagaaccttgattctgtttcctgcttctctgattttaatttgatttgatctgtgggagagatgacagagcagtccttgccccaggggagcatgaagcttaagagaaagccctgcttgcttggctgattgatgggctggttgatctgcactcttccttgttgtagaaaggacttaaggcatcttacagcgtgaaacaagccaggacagcatgaacgtgggagaaagaggaaaggaaaacaaggtggggccaaaacaacagtaaaaatgcacggaaaattgatgacagtgattttctagaagccacctggaaatgtaaccacctagaaaagggaaatgtagttcgtcatataatcttgtgttcataacattaacatttgcccaggagaagtatggctcttcttggtctctgctaggtatactagctacgtgaccttaggaaagtcttgtaatctcagagcatctgtttcctcatctgtaaaatggactcaatcctgtccatcccactgggttgttgggaaggtagaaggaggggttgggtgtgaagctccgagttcggtgcctgcctgcctatgtgtcagtatgtggggaatgagtgttgtgccatgcccagcccagcaagccacgggatcagcatgaattattaaggccagccactggttctggaaagcagggtcatccctggccacctctctggtcactgccaagcaccttgtgtcaaagatttggcttggtctccatgagtttgccatacagccaggattgcctatcatgccatctgccttcgcatcacagtacaaacctatgttgatgcatcatgggccaattggccaggcattctctaattccatcctctgtggccagaccctggttttggcagctccagcgtaaagttgtattttcatgttcctaccaattttgaagaaatagtttcatcttagcagatgaacacaagttagttctgctgttttattttacttgcaatacaggtctgatgttctgcatttacaggtcttatttaaagtggacttctttttaatgctttctttagggtgaaccgtatctgaacaccgcatatgggcacatgatctgctactgggatggctctgctcattatctgatgtacctggtgatggtggcagccatagcatgggagtaagtcagttcacctggtgtgtgcctttgccaccttagcaaccgataagcgggtatgtaaggaaacgttatgcatagaggcaaatacacaagcaggtatactggacatgaatataagttccatgggtgcacgtcagacgtggctttatcctccttgtaccactgccttttgaatatgtccttctgaattgctccctagcatggtgacagctcgggcagaccctttaagctttctgattatgttgtcttacaagaataatttttattttcagcaattaaagctaagcacatcttaaacttcatttcaaaacttcaaaatttccaaacagcaatctcatttcggttcaaagcttctgtccttccccagatcaggcacagctctgcggcttggctcgcactaaggcttggctacatggcttgtccgttcactcctcctgtctcactctgcggctggccccttggcagtggatgtgtatgtacaagggattaaaggaacaggagccgagtctgatgtgaaaggtgctggtttttgggtattggtacccccatcatgatatgctagcttggtcttgggaggcacacatgtgagttctttagagaccccaaccacaggagcttctgcattgcactaatccctgaagtgaacgacgtgctcttgggctgaatttctgcccatggtggcacacccacagctttttttctgctggggcccctgtaacccagaaggtacaccctttggggaggggtcttttcaaaacatttcaagtccggccatcttctcaggcctccacttgcttctgggttacagaaagtcatgcattcttgccccatacaaggttgaaatgtagtttacccaagtatctccctcactcccaacatgcactcaaggtcagctccagctaattctttttttttttttttttttttgagacaggctggagtgcaatggcacaatctcagctcactgcaatctccgcctcccaggttcaagcgattctcaggcctcagctgggactacaggcgtgtgtcactatacccgcaaattttgtatttttagtacacaaatctaaacatttttttcaccatgttggccaggctggtctcaaactcctgacctctggtgatctgcccgcctcagcctcccaaagtgctgggattacaggcgtgaaccaccgtgcccggctccagctcattcttatctgttctcctgcttataatcccagtcattatgaatgggcctcttggggtctggttacatttggcttgagggcgggggtggggcaggacgcacacagtattctcgtttcccttcagagaatttccttttgaatttctcatagcctgttacatagtgtggagtttgggttattggggttatcaattgaaggaactttttttttttattttgagacggagtctcgctctgtcacccaggctggagtgcagtggtgcgatcttggctcgctgtaacctctgcctcccaggttcaaccatttctcctgcctcagcctcccaagtagctggaattacaggtgcatgccaccatgcccagctaattttttttttttttttgtacttttagtagagatggcgtttcaccatgttggccaggctggtttcaaactcctgacctcaagtgatctgcccacctcagcttctcaaagtgctgggattacaggcatgagccaccatgctcggcctgaaggaagtttttgtcagcattgaagatttggggtatatgtctagcagctcctttgcaacatggggtacatgtcacttgtcttcacctttggggctttggccaaaattctgtgaccccagaaaaagtccatttaacattatcattgtaagtataactcatacttataatgattaaaaatatggatccaatttcatttcttctttcaactttctttttcctttcatgctgttgagtttcacacacaatagggaaatgcaggagtcctgtggcagggatgatcatgttgtagtttaacagaagacatagcaggcgtaatttcctatttaaaaggacacgaagaaggttctatagtatatcacatggcaatgaagttacataaccagggctccttgtgtttgatttattcctctcaattcaatatgttttgattgatgtactttactagtttgaatacaaaataatattgaagatcattttttgcttagtattctaagacaaacataccaagtcaagatttttttgttgttgttgttacagggaaacttatagaaccattggcctatattgggttggatctattattatgagtgttgttgtttttgtgccaggaaacattgtaggtaagaaactttatcttaaagttcactttccttttctaaaacaatggggcttgtttttaaatagagaagctcttttagttataatagaaccaagtgattccaagcttactaaaaacctgttttgcagaataattcctttttctcacctttaaaaaaagtactttttaagaagtgctttgagcaattttcagatgtgtgcattgaacaatttggcagtcaagttatcagggattcctgtttttttagaaggatcttgagggagtgagtatggtgtttatggctatatttagtgtgcaaatatgttaactcctgacacactatgagaactccaaaaatgtacttggaaattacaagtacattattaatgtatgcaggaaatcaggatatataggtagatagatagatagatagatatagatatagggagatagatatatacaaacatatatagatacctatctagatgtattttttgagacaggatctcactctgttgcccaggctggcttgcagtggtacagccatagctcactgcagccttgatctcctgggctcaagcagattactgtagataggacatgcctgttaatacacatctagtattttaaattgacctttttaatttggcctcattaaaaatattgtctggcccatagcaaaattttagatgacctgagatggggaggtatcctaaatattacttgtgttagatatgcttttggtaacttctttctctttctctcttttaaatagggaagtatggaacacgaatttgccctgcttttttcttaagcataccatatacttgtcttcctgtctgggctggtttcagaatctataatcagccatcagaaaattataattacccctcaaaggtgattttattaagctttgatgtaccctgttctcaaactcatagggttctttcgcatccactggccactgaattgaaccatgcctctgtggactggagcatttggggcatccaaacagtgcgactgttttgattatgtagcattagcttacgtattaattaatgtaggcaagaaggtctgtttctgtctgaatacatctgcttctgttggcaaggccatactttggggagcttcctgtgccagtggtcacactggctctaactatcagattctgcattagtgtgtcaagtgaagtccatagtgtgtggttcatctaggattgttaatggcctggacgttgaacacctgggttcctctgtgacacctatgcatttactaccccaagaggacactggagggatactgctcctcaaggtagtctacacagccatacaatcttgactccagagatccaggcccatagagactggctacaggacatctgagacacctcccttccattcacagccaaggtagtcaaggtgaaacagcactggcctggcagatactctgttaaggccttcatttctaagctagtttctctctgtttcttttacttttctaggtattagatcatttagcaagatcttttaagcaaaactgatatatgaaaatatgaattactagagataatcagaatacgactattcattttacaaaagattttcagtataattcattaaaatacattttaattgacaaatacttcatttgtaaacatttagacaccttctatgtaaactcaggctggcacactgacagctggtactaacttccctctgaggaaagaggtggctgttaaaaagaaaaagcaaatagtcagtccacccttagtcccagctccactgcttttaaaggttccatgtcagtgtgtcaacagagtaggtatgccatgaggcatgcagaattacttatcattatttttaatgtgaaaacacagtgacagccagggccaagcaggcattgtcatacagtgctgacagaaacataaattcagaattgctctgcaaagcaatttggcaatgttatcaaccttaataattctggaacccaataattctgctcctagagccctatcttcaggaaatcatcacacagataccaccaaagatttacaaagttgttcatcattacattaagtataacagtgaaaaatgcctaaatatccaacagtgggagaatggctaaagtgtggtgtttccatatggtattcagtttgagaaaatttttaaacatgtgggaaagtgcttataatataggcagatgttgagagcaaaaagaacaaatacagaattgtttatatacaggaataattttatatataaaattgttcctaattttgtgaaaaatgtagatatatgtgtgtgtatatatgtatgttgtgtgtatgtaactatatctatttacatgtattactggaaaagtataccaacggttaatagtggtgtggcaggtttatggtttacctttaaaatttattatcattaaaatgtcatttcaagaaaaaaagtggactcatagagctacaagagcccttcgagagatcatttagcccaaattcttcatttcacagataaggaaattgagacttgaggaaggaaatgattttcctaaagttccatggccagtgatttatgatataaattgtgcatcttcaaaattctcttatccatcatcatgacatttaatgtttcagatttcagattcttctttggcactttgggcctgctctttaggtacaaactctattttaggttattcaagaagcccaagcgaaagacctgctgagaagaccatttgatttaatgttggttgtgtgtctcctcctggcaactggattttgcctgttcagaggtttggtaagcataacagatcataataacgtaacattgtgatactactcacatttccaaatggaaaaaaacttagaaatatgtttttgtttttccatcagacttcttagcaaactaacaaaccattcctcccatcaaagcctggagccctggacctgcttcctgctgctcccaaccccagcctcctgctgtcacctcctcctgtccttagatcaagctctactcagaagcatcttcctccccgttttagggcatctaaaaaatcagccatcagagtctctcttttttattcttttgatgtttctgatttaaatgtaaatatctttggtaaggatggcaccctaggactgcaacacaactgtggcacagagcatccctgtgttctcaggagtaggggcaatggggttgaggaaggcgtaccagttcaacaattcacgtgtatgtagggtcatgggaatgtctcactggtaagagtagtgttgagtaaattcatctcacgcctggagtctttgtattgatgtgactgaaatacattaagggcacatgggcatttcatgttttctattttctctttattaatattttactgcagaggttaggaaaaagactcacaggctttgtagttagaatcctggccacttactagctgtgtggccttggaaaaactacttaacctcttggactctgttttcctctctgtaaaataacactacctaccttaacagtattgttttggagattaaataatgtacatcaaacacttggtagaggctcttatacatagtaaatgattactgttaggatttttattgatcagtgatccttcacaatgccccaatttgatgatttcttcttagtagaaatgaatttgggaagtttagaattatattgttaattatattcagcttcagtgacaatttctattcgaagcctgttggcgcgcgtaacagttggacagtagagtggcaagtgtaagcccatgcaggtgacttttatcatttcagggtcttgggctactgggggcctgtgcagcaggctgggttcagggtgagaagctgttttaagagttatctttatctgtgaaatgtcaagaaactttctggaggagagctggctaacaggaggaggggcatggggaagagaagtaaagaaggcaaggccatagctttgcttagaccacagggccactgaaactgttctttggttagtttgttgtaattcttaaagttcaaacaacaaaaaatagtgggccccacctgtattcttgcacggccatatccccttccctgtgcacgagaaaaatgtgtgcatgtgtgggggtgcatgcaaggtgggtagggcttttggattggggccatttttaccaactctgtcattggcctgtgttcatatatgccatctaggtgggacaacatttatggccaaagacatgaggaatggtgcctgaggggaggaaggtgactcagaggggacctagtaaagtgccaaaaagactttccagcaagaggaccctgctttcaaatcatcttttactgcctccaaaggccatatacgctatgatgcactggagacaggaaggtgctattttcaaatcttgcaatgcatagtaagatgaatttggtgtagaaatatacttttcttcctgtagggaatagggggctagttatttccaagaaaagtgaaactcataatttaaagcaagctgtgctttggctagccaaacctagatacttaaactctgaatatctgaaaaatacccaagaatagggcattagtttccatttcctgcaccataattaacctttgcttagtctccttagaacaaatctgcaaaatatttccatcattgatgagcctctacaatgcatacgttttgttaaacagcaaagcagcttgtgactaaacctggcacatttagccttatcagcaaacctaagaaccagatgtgattgtatttttataatgagtttatttttgtccttagattgctttggattgcccatctgagctctgccgattatatacgcaatttcaagagccctatctaaaggatcctgctgcttatcctaaaattcaggtcaagtagttatgaagcctaagatttttctaaaattaattttctttttaaaaaatgggtcccagctgggtgcggtggctcacgcctgtaatcccagcactttgggaggccgaggcaggttgatcacgaggtcaggagtttgaaaccagcctggccagcatggtgaaaccccatctctactgaaaaaatacaaaaaactagccgggcatggtggcacatgcctgtaatcccagctactcaggaggctgaggcaggagaattgcttgaacccgggaggtggaggttgcagtgagccgagattgcgccactgcactccagcctgagtgacagagtgagactccacctaaaaaaataaataaataaaaataaaagtaaaaaaaaaaaaagagtcccatataggaaataggaattaatattttcaaagatgaaaatgtttacttttttgtactttttagtcaggccaagttaactgccaatttgctgatgatgttatttctctgttcaatacagatgctggcatatatgttctattctgttccttactttgtgactgcactgtatggcttagtggttcctggatgttcctggatgcctgacatcacattgatacatgctggaggtctggctcaggtactaagaatattctgttgagaaggtttacttgtggtctaggtgtcaattgttgaatatatgaaaaacttctctgctcagtgttttagactaggagatagctattagacatgtcaccttttgttttgcagttcttcagaagacatttctgcaagtacattttatttcaatctcacaataactatatggtagatgtgccatccagttacacagatgaggaagttatctgtggtccagtgaagttaaatgatttgcccaaggttacacacccagcatgtggcattgttgttttattggactgtttcacaatctctgaataccatggctactaaaaaaggattgagagctgtcaccttcaaaatgtccatccaaatttaagacttcagaattccactacgctatgctatacagaaccagggaaactggtttaaaaaatgttctgggcctgtcatttcattccttttccgctggcaccttgccaaatatttggcctagagtaggtgttcagtgaatgcttactgcgtttaactgaaaatgaaattatctatggagaacttcacacataacataaagcacatttttacaagataattagcaaaacaaatcaatcttctgaacaaggaagaaaattaatttttcttactagaaataaaacaaatgaacttatcatttaaaaacattagcttcatcttgttcttttcaagcagttataagaatgaggttcatctagaaactgtaggcttgtacagtcaattatatgcatggtataataatcatgatcgtaagacatactagaattcacacggttgaaaaatatagtatttaaggggtcaatgcattaaatcctttcagtttgaggtaattcttaattataaaattagcatagtagtatcgaaaaagttgatgtagcatccagaagtaatggttcctgtcctttccttgaggggcttaagaaggaagagaactaacatttattgctctttgctggttgtttttcctttgcagacctctaaatacctgattcctcagtccttggggtttatttctgtattttaggtctttatctttgtatctttcaataccaactataagctgataacttccagttttctaccttcggcccacaccgttcccagactcctgtatttcattccaaactcagtctttttacttgcatgcctcactagcacctcagatttaatatataaaataggacctgatcctccccacaacctctcttccattttttcattatctgtttaaatagtccaattgcatccagcaactcaagccagaaacttggagtaattatttacactcctcatcctctacatctagaccaccactaagtccttttttttttcttttaaagagacagggtcttgctccatctcccaggctggagtgtgatggcacagtcatagctcaccgcagcctcggactcctaggctcaagcaatcctcctgcctctgtctccagagtagctgggactacagacatacaccaccgcacacagctaatttttaaattttttaaagagatgggatcttattttgttgcccagcttattctcaaatgcctgcttcaagtaatcctcctgcctcagcctcccaaagtggtaggattacaggtgtgagccaccacacccaaccaggtccagttagttttactccagtgattctccaacccattttttttttccagctccgctgcccctacactagtctgagctctcattaccttacttcatgccaggcaaaccacgttaaaagttttacttacctatttgtctaaggataggctatgtgctctgctgctgtaacaaatactcagagtagcttaacacaattaaaattttaattcttttttatgcaaagatcatgtgggatattttcaaggtccaggcctggcaccaggtcaactgaggggaggctggtgactgtggtcttcctgcctgcctcagaataaacagcacaatggacacataataatatcttttgtaatagctctgggaaaaaaaccccaatttaaagatgaggaggctgaggctcagtccacctgaaattatttgcctaagattacagttattaaatggcagaataggtttatgaaatcctgtctgactccaaagctcatattcttctccattgtgttatctcacccaccccatgcaaacaatgaactatggcacagagtcctacagcacaaaagactgtatgtagtacgaggtgctggagaaccttgtgggtggaaggcagtgacattccgagttggactctgagggccaagtggggctttattaggctgagcctctccagggaataacccagggaaacactgaggtgtgggcatatgcagcaggtctgagggcagagtaagccttgcctttttttttggcctggttcctctgccttattctcctgtatccttcagaacagatggccgcatacccacttcactcttgccagccctttctttagaggattagactgttcagtttgacagctgttcagtttgacacctattacctgtgtcaattgtgctttgcctgcacaatcaggcctcctctgcctgccatgtgcctggtcggcctggtaccagtccctgatgcaggaatgctaagtgtcatcagccagcaggctggttaaagagaccagatgttggacctggtcaagtctcaggagacaaatggaaacagcaggaaaacctaggcaaaagcctagtcacatggccagggtcaacagtcaggaagcttaggaaggtcatagcttagaggaaaatgggtgtggtaagcctgtagcaataagacaaaccctaatctgttggtgaagctaagcttgcaggtgggcacttattactccagccaagtggttctgagaagggcagtgtggactacagagcagctggcagccgcaggggcattacctcattcatgtcagacgtcaggcatcctggggcttatccatcactgcccagttgataaggcagcctgaagcccctctcttgatggtgaatgcccagatccagagcctaaggctaaggaccagatcctgtaaatgtcagaaggatgtttctcccagcccagcaggtgaagacagactgagtaaagaattatgggtctgattcccacagctcttggctgagctttaatatctacccacttatagtgtgtaggctaaggaaaagttagaagccatgccgcaacaaaacaatagatatgaccagaatactgaattacgttatttgttttgtacttagcaaatactcgcttatgaaatggagtctcatcttatgggagtatctgacacattcatcacagaaagcactctccagcaaggcacggtggctcacacctgtaatcccagcactttgggagcccgaggtgggtggactgcttgaagtcaggagtttgaaaccagcctgggcaacatggtaaaaccccatctctacaaaaaatacaaaaattaggctggcgtgatggcatatgcctgcagtcccagctactaggaaggctgaggtgggaggatcacttgaaccaggaggcagaggttgcagtgagccgagactgtgtcactgcactctccagcccaggtgacagagagagaccctgtctctcccaccaccacaaaaaaacaaaacaaaacaaaaataggcatttttctgtaactttaatcagcatctttgcttgctaaaattgccattcttatttagaaaccttatgcattcatgatcccactaactttactaaaacttacttttactgaaacatctagtaaactctcaagaatctatgcaacttagtaagggaaaaaaaaaccacctttgaaaagttctagatcagtataggccaatggaagaaatattgagtagtggccaggcgcagtggctcacacatgtaaccctagcactttgggaggaccaggcaggtggatcacctgaggtcaggagtttgagaccagcctggccaacatgacgaaaccccgtctctactaaaaatacaaaaaattagctgggtgtggtggtgggcatctataatcccagctacttgggaggctgaggcaggagaatcgcttgaacctgggaggcagaggctgcagtgtgccaagatcacgcccactacactgcagcctgggtgacagagcaagactgtctcaaaaaaaagaaagaaaaaagagtgagtagttattggggccttgatttcagaccatgtaggagtctgccaaatctgctgccttcagaaatcaaaagatcaaggaaagagtaaaagaagattgaataaaatgaaaccaggacacattttagaccaaagagttccactggggacttactcataacccaggtatcttttcatataaaatgctaaccataggattaaagctgcaagtgtaatctgaaaggcattataggctgcttagatccacttattagcatttcctatcaattgaagcattttctctgctaaaatatcaatgaaaatgaaaaaaagccaaagccagtagagttcatatagttaggaacataagctctggaggtgaactggttcagattctagcctgttgctgatgagcacaatgaccttggctactttacctctctgatcctcagtttcctcttctgtaaagtgaggataataacagtagctttctcatggaattgctgttagggttggatgaggtaatacatgtaaagggcttaaaacagtgtctggcacataacagctatgtaaccctttgttgctactattactggtagaagattcccagtaagaatttggagatatgccttatgttgttccgaagattaacctgaagacaaactaattaaattaagtgtattgtatataattaccaagaaaacaaagaaactgggtgaaagctttgggacagactcaccatgggcttggtaaggagcctgccatcccacagccagcgaaggaggttcagttacttcagtcaggtgctgccctcagactctctaactccctggctatgtaggtgctatgtcatgtctttttctcacaaagagatatggaaacttacgtgtgaataatttggttgtgaagagtttactgaagtaaatttatcattttttttttaacttgagacagggtcttgctatgttgcccaggctggtctcaaactcctggactcaagtgaccctcccgccttggcatcccaaagtgctgggattataggtatgagccaccacgctcagcctggaagtaaatttcatacggtttttccctcatggagacgttaagaaaaatctgaaagtaacagtttaggaagaacacggatagttgggatactaatgcaaatcttgttttcttcatttgcttctggtgtgattcattgctaaacatctttatttagtattaaattatactgatttaacatcttttatgtacttatcctttcatggagacactcacagtaaaaaggtcaaaaggtcaagagaatctaaaaacaaagggcccagattttctacagtcgagcaccagatcatgaatgggtatttcagttttgtacttgtgtctacagaatagccccaagtgcttgacactgtctaagcatgtcacaaacatcacctcactgaaccctcataacaacctatgaggtgggttccacacctcacccgaggccatacggctggtttgtggtggagctgtgatttgactctggatgtctagttccaaagtcagtgttctgaaccaatgaactatgttgctcagaaaactctaagaaaagataacacagttctagattagctatttatactgtattagcaaaagaccctggctatcatcccaatggtcacctaagttttctgcctataacattcacatggacatataacactctttcagttcctccttgtggaaccacgattaacttttttagttatcctttacagattgtctctatacatgtaagaaaacagctcttaaaatttaacctttgttcaccttattgtctcatttgccattccaatcatccattcttaaaaaaaaatcagagtatatctcttaattatttctgtaaggtgaaaatgatttagaatgaagtggaagaaaaattattagggactcaacctcacattgctaaattctggagaaatttctaggatcaacaactcatatctgtaatcctgggcctcctgttaattcagcagcattgagttcactgagccacctgaccccagcacaggctcaggctgagctcttcaggtcctgccatgagaggccttgtgctgctgggaacatcacccaggagaaaacctgcagccctttattagctatgtgcttgggaagagaaacctcctcaggtgagactgtttttctgaacttcagaaccctgaacacttaacatcctatgccttaggagaaagctatggtcaggtgctcactcagctggaagtgtggccaccataagtacatccattaggactatgagcagtactgggagctgcacaccactggccttagagttcttctctcacatacaaatgcctcttttgattatgaatgttaaaatttttgtgccttgtttaataattctgaataaagaggcctactaaaatacatacaaaactagagaaatgctttgtagaccctttttgtattttgacagtcacaagtccattgttgttgaacgtttattgagctctaacaatgtgacaggtgccacacaaaacattagacacagtacctgcccagtgggcttacaatctaatctaaggacatgaatctttttttttttttaaagacagagtctcactctgtcacccaggctggagtgcagtggcacaatcttggctcactgcaacctccactccccgggttcaagcaattctcctgcctcagcctcccgagcagctgagattacaggcgtctgccaccacgcccggctaattttttgtattttttagtagagatggggtttcactatgttggccaggctcgtcttgaactcctgacctcaggtgatccacccgccttggcctcccaaagtactgggattacaggcgtgagccactgcgcccggccatgattcacttaatgttgccatgagtttgctgttcatgaaagtgaggtattaactgcactggttagtgcaggaaaagagcctacggaatcactgactttttacacaggctcccctatgcaagtaggcacaactgctcatatttattctctcaaagtatggttggcatttccccaaatttggtgattttgtgatgtgtacaagtatctataaagacagaaccaccaaacccagatttctgagaaccagggatcaaatgtggcttccagtccagagaaaatgcttggttatatattcagaaaaacactattattcaaaacaggccctaaggaaaaacagtatgggagccatgctcctgctcagagttcctagaatgtccagaaagcacctcctcagggcagccctgaaagtgccctttactctcaaggcattttgtcctcagagcccagagatgcatatacatttgctgggttctgcctgggcatctacccaggggagttgtatctgagggccgagtcctctcagtgcctcatggatcacaatgtagacaatccacgtgctggtccttggcaatacatcatgctaatttaatttatatctccagagtagcaaaaatgtaccacaggtctccagaatatatcaggaatttgtaaaaatgcagcccattaaaatatctgccactgataaaaaattcataaagatgctgcttaaaaaaacttgtccttttcttgtcatggtgaagtcaagtaagtaacacctttatctgtgaaatcactcagcagaataaattggtttcatatggaagaaatgtaaaataacttatatgtatttaaagcaaattatctagttcttcattcttgttacttctatgccttctctatagtgcagtcttttgtctctttgatcctgatgaactgataatttactacttattacatttagattcccaatcctttattcatgtgtatcttgaatttcagcaagatatgaaaatgcagactccaggggtacattttgtaatgatacaagccttctgaggaaattttctgacaggagcttttaatcctgctgtggtctgttttaccctttccaatacggttttcctctgtgcttgcgaaaaatatcaaaaaagaccaattggcacattctgaatgtgttttctgaataagtatataagtagagagggaggccattttgcaaatgcggataatgctgacatgtcgtacttctaaataaattataatttgatttaaaaaggttgcctgcatgtacatttgccattttacaaagagcaaccgtactcctacctccacccaagttggtaacaaccttatcttacaaacaacccttaatattttaaaagctgcagaaaaaacaaatacatgaataaatgaataaacaaaaaacacatagggaaagggtatgagctcttgctgcaaggagtagatgaaagactgataaatgaagctgaggtccccccagtgcttccctttcaatagtttatgctaaaaatatttgttttttaaaactctgcgctttcttcatttttattggaacgcaatttgtgaaccacaactgagtctgtatgcaggatctccagaacgcaaatcagaaaaaaatttgagattttattcagatttttctattagattgagccactaatgttcggtaaggggcacttgatggttaaaaaacacaactggcatgataaaactacactaaataatatctactttatttgaacagtcatatcaagaatggccctaaatttaatcaaggactaaatttaatgaaagactctgacattaaagactctggattgtttgaaggtattttgcctgcaggtgagactggttttgagggcacagaaacgtagcctgaatgaaccattcagaactcatcatgcatccaactgaacacgtttcatgcttactcaattttttttttttaaatgcaacaggctcagttttctcacattggtgcatctcttcatgctagaactgcttatgtctacagagtccctgaagaagcaaaaatcctttttttagcattaaacatagcatatggagttcttcctcagctcttggcctatcgttgtatctacaaaccagagttcttcataaaaacaaaggcagaagaaaaagtggaataaaaatattacttcatgttcctcctttctaaattactaacttttgttatactggtactgatattttgtcccatttcactctcttctcatacgtgagtacttaagaatatgtacattcttgctctgcactgtatgtgtgagctatatggtattgtgtaaattttttttgaaggaaaatggaaattcttgagaaacagtttgtttaaagaaatatattcaaaatcatttgtgaataaacttgatcatccatctcaatattgtttgacatataaaataattataagtgtaaaaaattacaatttagtgccaacagtagtgagcatgaaatgaaactattcaaaagagaatatggcctgtgcatattaaaaaattcaaaacagtgaatgcagactggaggagtaacttttgcaaataagatgaatatgcttcattattaaactcaatataaaaggcaaatcatcagaatatttttaaatgttgtttgaaaaatgttttcccaaggaaagtttattatttgctgctgtttcaagaaaattacttttactaaatttttttgtgtgaatttaaacagctaaatagggatcagtaactttatctctatccttaatgaacatttgttttattggtggctggaaatatttctattgtatttctgtgtatatttttaataaaattatttttggcctcttataaagacaaatcttattaaatttgaaacatttcatatatacacataaaa

SEQ ID NO: 14509 - DNA, 1469 bp, Homo sapiens
gggcgagcggcgcggcggctgcgatgagtgcctctgcggccaccggggtcttcgtgctgtccctctcggccatcccggtcacctatgtcttcaaccacctggcggcccagcatgattcctggactattgtaggggttgctgccctcatcctgttcctggtagcactgctggctcgtgtcctcgtcaaaagaaaaccaccccgggacccactgttctatgtgtatgcagtttttggatttaccagcgtggtgaacctcatcataggactggagcaagatggaatcattgacgggttcatgacacactacttgagagagggtgaaccgtatctgaacaccgcatatgggcacatgatctgctactgggatggctctgctcattatctgatgtacctggtgatggtggcagccatagcatgggaatgctggcatatatgttctattctgttccttactttgtgactgcactgtatggcttagtggttcctggatgttcctggatgcctgacatcacattgatacatgctggaggtctggctcaggctcagttttctcacattggtgcatctcttcatgctagaactgcttatgtctacagagtccctgaagaagcaaaaatcctttttttagcattaaacatagcatatggagttcttcctcagctcttggcctatcgttgtatctacaaaccagagttcttcataaaaacaaaggcagaagaaaaagtggaataaaaatattacttcatgttcctcctttctaaattactaacttttgttatactggtactgatattttgtcccatttcactctcttctcatacgtgagtacttaagaatatgtacattcttgctctgcactgtatgtgtgagctatatggtattgtgtaaattttttttgaaggaaaatggaaattcttgagaaacagtttgtttaaagaaatatattcaaaatcatttgtgaataaacttgatcatccatctcaatattgtttgacatataaaataattataagtgtaaaaaattacaatttagtgccaacagtagtgagcatgaaatgaaactattcaaaagagaatatggcctgtgcatattaaaaaattcaaaacagtgaatgcagactggaggagtaacttttgcaaataagatgaatatgcttcattattaaactcaatataaaaggcaaatcatcagaatatttttaaatgttgtttgaaaaatgttttcccaaggaaagtttattatttgctgctgtttcaagaaaattacttttactaaatttttttgtgtgaatttaaacagctaaatagggatcagtaactttatctctatccttaatgaacatttgttttattggtggctggaaatatttctattgtatttctgtgtatatttttaataaaattatttttggcctcttataaagacaaatcttattaaatttgaaacatttcatatatacacataaaa

SEQ ID NO: 14510 - DNA, 29764 bp, Homo sapiens
gggatgcggtgaagggcgagcggcgcggcggctgcgatgagtgcctctgcggccaccggggtcttcgtgctgtccctctcggccatcccggtcacctatgtcttcaaccacctggcggcccagcatgagtgagtgagccggcgcggcgggggtcgcgccgaggggcggcgggagttggctcgccgcgacgggagcctcgcaacttttccgagggggctgggaccgtccgccgcgggacagaggttcgtggccgcaggggctccccgcgcctggccagactaggggggcgccccaggggtcgcacgggccgggtcttggagccgggccctgaggtgcccaggctggcgcatttcgggatgttggtgccagcaccgcgccaggtgcccggggtcacaggcgtcaatacggccatgcccctgccctggaggggcccaggggccggtggggagcggaacaaacacggacactacgaacctggccgtgtcagctcgtttgtgccttgttctttttgcatctcacgggaacgtttccatgtatggactttcgcatacttatcatttcttattaattttagaaactgttgtgaatgactagcagaaatagcccggaaccaacaggcagagacgtgggttctaggcctggctttggcactgacggtgtctggcctgacggtgtttggcactgacggtgtggtctggcctcggttttccggtcaagtggactttgtgtgcgtcctattgtaaggttccaccgagacctctttgtgaaggggcgttgtgaatggagaagtgcttcccagtgcctgcgctggggtaggatggggacaggcagcagaggcagaacacttcaatgtgaaggaaatgggtggggctgatggagggggacagggcttgggttcgaagccctgcctcccactccactgcagggatcacggactaacctgcagccggcagctgaaggcctgagggtcgccgggtgttgggacaggcgccagcctctgttcctgctgatgttggttgctgtctggagggaggaggaagtaacctgctatgtctctcagctgttggtgctaaggaaattgcatcagtctgtaggctgcaaacccccttcagctggtcaggccgtggagtgtctgtacatagggtggtaacttcctcctctccagctgcctggccgcctgatacaggcagcacccacactgagtgctcaccaggcaccagcagtgtctacccttggtctggcccagtctctggaggcatcccctggaggcagctgctctgggccaccgaatattacatgcctgtcaatatagtgcatgggggaccctgtgctccaaaaaatggcattacgggtagttcagtgaagatatactgagtgcctactgtgtgtttggcactgttccaagtgttggtgacatagctatgaacaagccagaagaggctgtggaggcaggtaatgagatagacatcaacaaacattaatacatcgatagtgacatgctatgaagataataaaatagggtgactggggagggggctggtggccagggaaggcttctaggaggaggtaacacttgagctatgggaagatctgggaatggagcctgtcgggcaggaaaatggagcagtgcaggggaaggaattggatgggcgtagtaggtattttggaaggtgaacagatggggcttactgaagagggttgcatggcagcagaggatttgaggatgagccctaggttttggcctcagccactgggaagatggtgatggcatttactgaatacagactgaactatgtattgctgtgcatgatggagcgcactggcaagcactacagcattttgaataattagtgtcagccattcttcctgtcctcttgcaggttaaaacccccgtggcctttgattcctctcttctttctccactcccttcctcctactgtctgcttccccataagtcctggggctctagtgtctgttccctcctttcagttctccctggcactggccctttctgacctggactgtggcaaaggctccggtgcaagtctcgctgcccagccccgctgcgtgtttctcggcctcggccccccagtcccagcccacgcactagtgctcctgccgcaccagcctgcctttgctccttgaccattcctcctcctctccagcctctagcccggactcctgctgctccctgacagggatgctgccttcctcctatcgcagactgttgaagccgcacctggactttatggccacttctaccttctgcagaccctccctctctctcctttgagctccctcagtcccttgtttgcacctttctcccgagagttactttcctgtggtaagaacttacctgccccggctatagctcacccctctgtactgtcctgcccaggccagcgccgtgtgcatcgtaggcactcaggtatgtttgactttgttgaatcgagtttccttcccaccaaaccttttatgcaactctgaaaaccagaaaaagaaaattagattgagaggtcaggaaaggattgagcgtgttctgtctccctctctcactgagagagacacactgctcacactcatccttgcatgtcccctctcagtaggtgtctgttcatagaagggcatcagcagcccttcccaccccccaagactagcaactttctcatcctggggttagtcgcagcccttacctgtccctgagtccctgcaggacctgtttcttcctgtggtgagcaggtcctgcacttggctgttgtaggagggtctctggggacagtgccaagagtcagagacaatctgctgccctagtttcccttcattcttccctcctctcctggagctaagagcatgagaggacgctgtgaaccagttcacactgctctgtcctgctccagaagagcaccaaccacgcgatcctgctggcagtgagtgcaggcccttggtaggagtgaagactggagttgtcacctgaccaccacctgcctcaggctgttcaccattaaaatgcctgtcagctgacccagcacacccacctcttccctcatgggattcttcagcccagcatcatactcttgacccacactggcttcctccttcttcagctcatccccacaggaggagcctggagcaaccactgaagtgcaatcaccagaaacctcctatttttcagtttctcacctggacattgaaacagccaccctcattcttttttaaaaaatgtaattaattgttattattttttgagacggactcttgctctgtcatccaagcgggactgcagtggtgcaatcttggctcactgcagcctccaacccccaggttcaagcaattctactgcctcagcctcccaagtagcggggattacaggcatccgccacctcgcctggctaattttttgtatttttagtagagacggggtttcaccatgttggccaggctggtctccaactcctgacctcgggtgatccacccgcctcgacctcccaaagtgcttggattacaggtgtgagccactgcgcccggcctcattcttatcatagaattgatccatctatcatttatccatccatcctccatacattcacccatactccatccatccactcatcatcatctatccatccatttatccatcatcctccatcatccatcaattcatccatcatccatccatccatttatccatcatcctccatcatccatcaattcatccatcatccatccatctattcacccatcatccacccattcacccatcatccatccatccattcatccatcatctatccattcatccatcatctatccatcctttcatccatcatccatccaaccattcacccatcatccatccatctatccatccactcatcgtctatttgttccccccttccctccctccttctattcttatctttctctctcctaggggacggtgatagttatccaaaggtcccgatgttgggctgtggtggtgtggaggggtctcagttgaggagtggtgcttgtagctgctccaatctgaagaggtcctggtgtagcaggccattggagtgggccaggtagtattttgtctagaattggaagccctgtcagtgctggaggtgtgagagggagagtattgctgttggactgcaggagaactcctagtgggtagagctcagagtccattgagataggttcctccatgtaggcagggacttctcttatttatccagtctcctagggcctgcaacaatggctaccacataggggtgcagaatacatttttttgcttgctatgtttttgaattaattaataaacagatagatgcaatgatgtgactttcctagggtgacacagttagcaacagaatgggtaccaggatcccggtttcctgactgataactctaccaagcctcgtgccctatcgctgccccactgagtagcggctttggcccctgctgtccttggtgccactccctttcctgtagaacatccaggggatgtactcaactaagcttcaccttggtttctatggtttggggttggatgctggtctgttggccctggttctggggtgttgggctatcttcattctggcctcaggtctagtccagactccttctccatggatttcctggcctcattctctggcccatttgactatacacataacataaggtctttcttgtcccctggaaggcatgtttagttgtaatgcctatatattccttggagctcagtctgagggtttctgactggccctgagggaggtggcagagtcagtggtgaggcctgtcagctgctagggagcaggggttagaggaacgtgtaagtggaggcagtggggcagtggccataggtgcagcagggtggggtgaggcagagggagctccagacgtgtcatctgtgcacatgagacaggataagaggagaatgaggaggacctgatggcttcggtccctgaaagtcatgggctgcagcccagatgggccaaagagctgcagataaacttcactaactctacagtgctgggagctgcaggcagaggcagaattatggatgaattatgcagcactaggagggaatgcattcaatagtcaggaaattccaggcaccaatgtgtttattttgatagtgaccacctccctgttctggtcgttgcagttcctggactattgtaggggttgctgccctcatcctgttcctggtagcactgctggctcgtgtcctcgtcaaaagaaaaccaccccgggacccactgttctatggtacgtctccacaaagggaaatcttttgtatctgattaataacacaatactttcagcctcagtcacatattcctccttggttgtgaatactctgagccctttggtaacagtggctgcaagtgtaggggtgtttcaggacaatctggccctcgcctctggctattgcctctcaggcagtggactccaccctctcccaggtggcatcccggtggagagttactgccaggccaggcagggcaccctgccaaccccagcatgctttgacctctgacctctgacctcgactctcatgctagctccttcctgggcttcctgtcttcagcctgctactagcagtcccccccacttagtgcagaacttaactgtgtggtgtctgggtctgcacatatgcatgaagaggaaaataatggaacctgccatagagacaagcacctatagtgcaccttgtatgaccctgagcactttagcagcaggctttcacctaatcctcaccatccctccacttgaaagtgaagcagctggcttggagatgctaagaaatgtggcaaaggtcgtgtggctgttgacccctaaagcccatgcccttccatcatgcatgctgccccagccaagctgctaccggcctttgagcacttcctgtgccaggtaccttgctgggcattttgttctgtagtttctgcttcagtaatgctgcatatcaaatgcaccccaagtcctacagcaacaaacatttatttttcttgctcacaggtctgtgggttggggccactctgcatcaggctgtgggttgatttcagggctgttctctgactccttgttcttggaccagcagctcccaggcatgcccttctcatggcagatacagaggcacagtggggctagaaggaagaaagtggtggctcttaaggccttggcttggagctgccccatcttactcccacccatattccaatggctgagatgaggcatagggccaagcccatcagcaacagcatagggagcattctctgcctacagtgggccttgggaaaggtggggtgggaaggaagaattgtgagtaactagtttctcccaatccacatataagaagctctgaagcttcagaaatgatgtaatttgcctaaggttttacagccagtcattagatgagctgggtccgtctgctttcaaggcccacatgccttttcctggctctctccactagcctgtgctctgacccttgcacacctttccagatgagtttcctgctgctgtctgtccctcctgttcctccccactccatggagcctgtattaactgtactgatgtctctcctgactcttcaaggctgggcaccctttctcctgtaccctcagccctctgtcctggtctgttacaactttgagtacactgcagcctcagggtgaggctcaaggccagactcctcacgtactagaaggcagagaccatgtccttgtcattgctaacacagtgtctgacacttgtgttgtcatcagcaatcattggcagattatgtgccgaacacttcctttcttggagacatatgatggctaatcacctgggaggcttctggaaaatgagtatcaggaagtgacactgccaatgagaactgggccaaaggcccccatggaggcgtggggaaggcacatctgcaaaacagggcacatgtggccttttgttccttctggggagaatgtgaatgctggactcctggctgctgactccaggcaaggccggcttcccttctctgtgaattaaccatccccacactcctctccatttcttttttcacagcttttcttatattcaccatcagatttttcttctgtccatgtccatcccatagtctaaggcaccaatctgttacaacttgaaaatgcagctttgacaaactaacatgcactaaatttgatcacctgctgtttaaaaagtattatttcttagttatttgtgctagtagttttaagcccatttaggagatgctcacaactctggtaagattctctgacaggtatagctttccttctgtcatattcaattataccctcttgtattcatttttaacatcactagtcttttttctgaaagccattgtcacttgcacatcagccacctgtctgtctctaggatacgccatgtggaatagggtaaccacactggacacgctgtgaggtggcctgcttgggaatcattgagatgaatcacttcgtcaagtcattgtctttttttttttttgagacagagtcttgttctgtcgcccaggctggagtgcagtggtgtgatctcggctcactgcaacctccgcctcctgggttcaagcaattcacttgtctcagcctctggagtagctgggattacaggcgtgcaccaccacacccagaaaatttttgtatttttagtagagacggggtttcaatatgttggccaggctggtcttgaactcctgacctcaggtgatctgcctgcttcagcctcccaaagtgctgggattacagacttgagccaccatgcccagcctgaatcattgtcttaaacttagtggtcacttctatgcttccttggccactcagttactggctttgctcccactgcccatgtgggatgtgggtttgattctgggcagccacttgtaggggagtggaggatgggtggagttggcctgctagaatcttctgtgactgagccggcagtgaccatcattctccactcctgtgatgagtgttcccttgatgagagtacttaggcagggatggggagagctgcgaacacaggtggaggtccagctgggtgtgtagaaggggtattctgttagtctatctcgataattgtccacagcatcttctggaaaacatgaaaaacattccattattattagctgatgccaagcttgtagtaattgtctcctgagctattgctttttaaactgctgctttctttgctctagtgtatgcagtttttggatttaccagcgtggtgaacctcatcataggactggagcaagatggaatcattgacgggttcatgacacactacttgagagaggtatgggatcacttagtgattatgaggtttcaaccaaaaggccacaacccagatcacattactcagagacagaaatcctctcatttagtgtgaacaggtacgctacgcaggctttcatttcctataatagccttaggtcgcttagtcacatggaaagtggagcagaaaggacggttagatcacgagaggcaattctctccaacattcagctctcacggcttctctcactcatgaccgcacacatgacctgcttttcccctttatctgtatttaatataaataaggtaccttaaatggatttagtatttatgtgtctgttaatacatgactatctcagaaaccccaagtcagtcttaaatttgtaaagtacccaacacagaggcacttgatgaagtcatttgattgtgatggcttgcactctccaccatgctgcccaaatcatagctttgatactacctggtactcgagagagctagtcctattttcttattttatggtgggctgaacccagccccagagaggttaagtgacttattcaaggtgacacaggaaatgaggaaaagggctcaaagcagattcttcatccatgttcagataatggggagctttgtatgtacgctgtgggagtttgggttttatcctgtctgtgagggaagattttaagtcagtgaagaatacaggcagctctgggaaggatgggcttgcagggaagggtccgtgccatgagctggggcaccagtcaggaggcttcctcgggaccagcaggggcataaacgtggctggatggaggcagcgcatgggaagtagagagagggatgaactttagagaatcggagtggctggaatgaataagacttggggacaaattgggagtgatgggaaggatgaggcctaagacagtgtcctgattcctgctttggaatttggaagaatgctgctgtttttacaccagagagggatgacaggaggaatttatttctgcagacatttgttgaaggggactctgtggtcagaagacctgctccctgccccctgggagctccctgcctgaaagggtggggagatggaattgtcccaggcacagtgagagactcactccaggcacagaagtactcagaggaggaattaagtctgggtgcagtcggggaaggcttattgagttggtgacactgctgtagcattttaaaaatggtcatggcagtggaagatggacatttccagatggaccagggaggtagggggaattccggagagaagggacagcttgggcaaaggcttggagaggagaaagagcatgtgcctctccctggggcaccaatctgcaaggatgaggctgagtttctatggggaggtggagtttcagatgctggcagggctttgcaggtcttgagctctgaggagcagtcctggaagagagagtcacgggccatcggagtgcagttggtacctgaatgtctgagaggagaagggcttgcctatgagaaggtagagagagaaaagggctgagcttgggactttagagaccatggccagaagaagagaagcccctgaagtggaccatggggggcaggccaagaggcagaaggaaaacctggagagtgggggccatggagcccagaggagggaggttttaggaaggaggcggctgacgagagggctggaggctgagttggcaagggtggtaagcattggggcagacggggtatcagaagggggactggggtgtaactgtggtggcaaggtctgcagggccaggctctggggacccagctgtgatagagaggagatggggcttggtccagcaggctgtgacaagttttggggagttttagagtagaggaacaacatgccaagagccaggccttgagaatctttatctggcaggaggagtgtcatgggttggaaggaggggacaaaggtagggagaccatttgggaacatagctgtggtccagtgagggacactgagggctagacctaatgctgtgaagaagagggagaattgccggggtgacatcgtagcaataaagttgatagatttgctgagagactgcataggagaatgaggaatgaaaaaatgaccatgtggttttgaccttggtaagccgaatggtttcaccattaatatagagaggccatggctggcctggtggctcatgcctgtaatctcagtgctttggaagacaaaggcgggaggatcgcttgacgccaggagttgagactgcagtgagcaatgatcaccactgcactctagaccgggtgacagagtgagaccctgtctctgtacgtacacacacacacacacacacacacacacacacacatacagagagagcaagagagagagaggcaagatggaaggctggttgaggggagaagctgatgaattaagagttcaggcgagttgaaaggacctgtggcctgtgcaccatgcagttaaagatgctcatcaagctaccaggagaggccagcactggctcagagagccaggtgtgttagcaatggaagtctgaaaccataaatcggatgtattcttcagtcagagcaagtccaagagaagggacgtgggcctggcatgggtgtagaagcagaaccttgattctgtttcctgcttctctgattttaatttgatttgatctgtgggagagatgacagagcagtccttgccccaggggagcatgaagcttaagagaaagccctgcttgcttggctgattgatgggctggttgatctgcactcttccttgttgtagaaaggacttaaggcatcttacagcgtgaaacaagccaggacagcatgaacgtgggagaaagaggaaaggaaaacaaggtggggccaaaacaacagtaaaaatgcacggaaaattgatgacagtgattttctagaagccacctggaaatgtaaccacctagaaaagggaaatgtagttcgtcatataatcttgtgttcataacattaacatttgcccaggagaagtatggctcttcttggtctctgctaggtatactagctacgtgaccttaggaaagtcttgtaatctcagagcatctgtttcctcatctgtaaaatggactcaatcctgtccatcccactgggttgttgggaaggtagaaggaggggttgggtgtgaagctccgagttcggtgcctgcctgcctatgtgtcagtatgtggggaatgagtgttgtgccatgcccagcccagcaagccacgggatcagcatgaattattaaggccagccactggttctggaaagcagggtcatccctggccacctctctggtcactgccaagcaccttgtgtcaaagatttggcttggtctccatgagtttgccatacagccaggattgcctatcatgccatctgccttcgcatcacagtacaaacctatgttgatgcatcatgggccaattggccaggcattctctaattccatcctctgtggccagaccctggttttggcagctccagcgtaaagttgtattttcatgttcctaccaattttgaagaaatagtttcatcttagcagatgaacacaagttagttctgctgttttattttacttgcaatacaggtctgatgttctgcatttacaggtcttatttaaagtggacttctttttaatgctttctttagggtgaaccgtatctgaacaccgcatatgggcacatgatctgctactgggatggctctgctcattatctgatgtacctggtgatggtggcagccatagcatgggagtaagtcagttcacctggtgtgtgcctttgccaccttagcaaccgataagcgggtatgtaaggaaacgttatgcatagaggcaaatacacaagcaggtatactggacatgaatataagttccatgggtgcacgtcagacgtggctttatcctccttgtaccactgccttttgaatatgtccttctgaattgctccctagcatggtgacagctcgggcagaccctttaagctttctgattatgttgtcttacaagaataatttttattttcagcaattaaagctaagcacatcttaaacttcatttcaaaacttcaaaatttccaaacagcaatctcatttcggttcaaagcttctgtccttccccagatcaggcacagctctgcggcttggctcgcactaaggcttggctacatggcttgtccgttcactcctcctgtctcactctgcggctggccccttggcagtggatgtgtatgtacaagggattaaaggaacaggagccgagtctgatgtgaaaggtgctggtttttgggtattggtacccccatcatgatatgctagcttggtcttgggaggcacacatgtgagttctttagagaccccaaccacaggagcttctgcattgcactaatccctgaagtgaacgacgtgctcttgggctgaatttctgcccatggtggcacacccacagctttttttctgctggggcccctgtaacccagaaggtacaccctttggggaggggtcttttcaaaacatttcaagtccggccatcttctcaggcctccacttgcttctgggttacagaaagtcatgcattcttgccccatacaaggttgaaatgtagtttacccaagtatctccctcactcccaacatgcactcaaggtcagctccagctaattctttttttttttttttttttttgagacaggctggagtgcaatggcacaatctcagctcactgcaatctccgcctcccaggttcaagcgattctcaggcctcagctgggactacaggcgtgtgtcactatacccgcaaattttgtatttttagtacacaaatctaaacatttttttcaccatgttggccaggctggtctcaaactcctgacctctggtgatctgcccgcctcagcctcccaaagtgctgggattacaggcgtgaaccaccgtgcccggctccagctcattcttatctgttctcctgcttataatcccagtcattatgaatgggcctcttggggtctggttacatttggcttgagggcgggggtggggcaggacgcacacagtattctcgtttcccttcagagaatttccttttgaatttctcatagcctgttacatagtgtggagtttgggttattggggttatcaattgaaggaactttttttttttattttgagacggagtctcgctctgtcacccaggctggagtgcagtggtgcgatcttggctcgctgtaacctctgcctcccaggttcaaccatttctcctgcctcagcctcccaagtagctggaattacaggtgcatgccaccatgcccagctaattttttttttttttttgtacttttagtagagatggcgtttcaccatgttggccaggctggtttcaaactcctgacctcaagtgatctgcccacctcagcttctcaaagtgctgggattacaggcatgagccaccatgctcggcctgaaggaagtttttgtcagcattgaagatttggggtatatgtctagcagctcctttgcaacatggggtacatgtcacttgtcttcacctttggggctttggccaaaattctgtgaccccagaaaaagtccatttaacattatcattgtaagtataactcatacttataatgattaaaaatatggatccaatttcatttcttctttcaactttctttttcctttcatgctgttgagtttcacacacaatagggaaatgcaggagtcctgtggcagggatgatcatgttgtagtttaacagaagacatagcaggcgtaatttcctatttaaaaggacacgaagaaggttctatagtatatcacatggcaatgaagttacataaccagggctccttgtgtttgatttattcctctcaattcaatatgttttgattgatgtactttactagtttgaatacaaaataatattgaagatcattttttgcttagtattctaagacaaacataccaagtcaagatttttttgttgttgttgttacagggaaacttatagaaccattggcctatattgggttggatctattattatgagtgttgttgtttttgtgccaggaaacattgtaggtaagaaactttatcttaaagttcactttccttttctaaaacaatggggcttgtttttaaatagagaagctcttttagttataatagaaccaagtgattccaagcttactaaaaacctgttttgcagaataattcctttttctcacctttaaaaaaagtactttttaagaagtgctttgagcaattttcagatgtgtgcattgaacaatttggcagtcaagttatcagggattcctgtttttttagaaggatcttgagggagtgagtatggtgtttatggctatatttagtgtgcaaatatgttaactcctgacacactatgagaactccaaaaatgtacttggaaattacaagtacattattaatgtatgcaggaaatcaggatatataggtagatagatagatagatagatatagatatagggagatagatatatacaaacatatatagatacctatctagatgtattttttgagacaggatctcactctgttgcccaggctggcttgcagtggtacagccatagctcactgcagccttgatctcctgggctcaagcagattactgtagataggacatgcctgttaatacacatctagtattttaaattgacctttttaatttggcctcattaaaaatattgtctggcccatagcaaaattttagatgacctgagatggggaggtatcctaaatattacttgtgttagatatgcttttggtaacttctttctctttctctcttttaaatagggaagtatggaacacgaatttgccctgcttttttcttaagcataccatatacttgtcttcctgtctgggctggtttcagaatctataatcagccatcagaaaattataattacccctcaaaggtgattttattaagctttgatgtaccctgttctcaaactcatagggttctttcgcatccactggccactgaattgaaccatgcctctgtggactggagcatttggggcatccaaacagtgcgactgttttgattatgtagcattagcttacgtattaattaatgtaggcaagaaggtctgtttctgtctgaatacatctgcttctgttggcaaggccatactttggggagcttcctgtgccagtggtcacactggctctaactatcagattctgcattagtgtgtcaagtgaagtccatagtgtgtggttcatctaggattgttaatggcctggacgttgaacacctgggttcctctgtgacacctatgcatttactaccccaagaggacactggagggatactgctcctcaaggtagtctacacagccatacaatcttgactccagagatccaggcccatagagactggctacaggacatctgagacacctcccttccattcacagccaaggtagtcaaggtgaaacagcactggcctggcagatactctgttaaggccttcatttctaagctagtttctctctgtttcttttacttttctaggtattagatcatttagcaagatcttttaagcaaaactgatatatgaaaatatgaattactagagataatcagaatacgactattcattttacaaaagattttcagtataattcattaaaatacattttaattgacaaatacttcatttgtaaacatttagacaccttctatgtaaactcaggctggcacactgacagctggtactaacttccctctgaggaaagaggtggctgttaaaaagaaaaagcaaatagtcagtccacccttagtcccagctccactgcttttaaaggttccatgtcagtgtgtcaacagagtaggtatgccatgaggcatgcagaattacttatcattatttttaatgtgaaaacacagtgacagccagggccaagcaggcattgtcatacagtgctgacagaaacataaattcagaattgctctgcaaagcaatttggcaatgttatcaaccttaataattctggaacccaataattctgctcctagagccctatcttcaggaaatcatcacacagataccaccaaagatttacaaagttgttcatcattacattaagtataacagtgaaaaatgcctaaatatccaacagtgggagaatggctaaagtgtggtgtttccatatggtattcagtttgagaaaatttttaaacatgtgggaaagtgcttataatataggcagatgttgagagcaaaaagaacaaatacagaattgtttatatacaggaataattttatatataaaattgttcctaattttgtgaaaaatgtagatatatgtgtgtgtatatatgtatgttgtgtgtatgtaactatatctatttacatgtattactggaaaagtataccaacggttaatagtggtgtggcaggtttatggtttacctttaaaatttattatcattaaaatgtcatttcaagaaaaaaagtggactcatagagctacaagagcccttcgagagatcatttagcccaaattcttcatttcacagataaggaaattgagacttgaggaaggaaatgattttcctaaagttccatggccagtgatttatgatataaattgtgcatcttcaaaattctcttatccatcatcatgacatttaatgtttcagatttcagattcttctttggcactttgggcctgctctttaggtacaaactctattttaggttattcaagaagcccaagcgaaagacctgctgagaagaccatttgatttaatgttggttgtgtgtctcctcctggcaactggattttgcctgttcagaggtttggtaagcataacagatcataataacgtaacattgtgatactactcacatttccaaatggaaaaaaacttagaaatatgtttttgtttttccatcagacttcttagcaaactaacaaaccattcctcccatcaaagcctggagccctggacctgcttcctgctgctcccaaccccagcctcctgctgtcacctcctcctgtccttagatcaagctctactcagaagcatcttcctccccgttttagggcatctaaaaaatcagccatcagagtctctcttttttattcttttgatgtttctgatttaaatgtaaatatctttggtaaggatggcaccctaggactgcaacacaactgtggcacagagcatccctgtgttctcaggagtaggggcaatggggttgaggaaggcgtaccagttcaacaattcacgtgtatgtagggtcatgggaatgtctcactggtaagagtagtgttgagtaaattcatctcacgcctggagtctttgtattgatgtgactgaaatacattaagggcacatgggcatttcatgttttctattttctctttattaatattttactgcagaggttaggaaaaagactcacaggctttgtagttagaatcctggccacttactagctgtgtggccttggaaaaactacttaacctcttggactctgttttcctctctgtaaaataacactacctaccttaacagtattgttttggagattaaataatgtacatcaaacacttggtagaggctcttatacatagtaaatgattactgttaggatttttattgatcagtgatccttcacaatgccccaatttgatgatttcttcttagtagaaatgaatttgggaagtttagaattatattgttaattatattcagcttcagtgacaatttctattcgaagcctgttggcgcgcgtaacagttggacagtagagtggcaagtgtaagcccatgcaggtgacttttatcatttcagggtcttgggctactgggggcctgtgcagcaggctgggttcagggtgagaagctgttttaagagttatctttatctgtgaaatgtcaagaaactttctggaggagagctggctaacaggaggaggggcatggggaagagaagtaaagaaggcaaggccatagctttgcttagaccacagggccactgaaactgttctttggttagtttgttgtaattcttaaagttcaaacaacaaaaaatagtgggccccacctgtattcttgcacggccatatccccttccctgtgcacgagaaaaatgtgtgcatgtgtgggggtgcatgcaaggtgggtagggcttttggattggggccatttttaccaactctgtcattggcctgtgttcatatatgccatctaggtgggacaacatttatggccaaagacatgaggaatggtgcctgaggggaggaaggtgactcagaggggacctagtaaagtgccaaaaagactttccagcaagaggaccctgctttcaaatcatcttttactgcctccaaaggccatatacgctatgatgcactggagacaggaaggtgctattttcaaatcttgcaatgcatagtaagatgaatttggtgtagaaatatacttttcttcctgtagggaatagggggctagttatttccaagaaaagtgaaactcataatttaaagcaagctgtgctttggctagccaaacctagatacttaaactctgaatatctgaaaaatacccaagaatagggcattagtttccatttcctgcaccataattaacctttgcttagtctccttagaacaaatctgcaaaatatttccatcattgatgagcctctacaatgcatacgttttgttaaacagcaaagcagcttgtgactaaacctggcacatttagccttatcagcaaacctaagaaccagatgtgattgtatttttataatgagtttatttttgtccttagattgctttggattgcccatctgagctctgccgattatatacgcaatttcaagagccctatctaaaggatcctgctgcttatcctaaaattcaggtcaagtagttatgaagcctaagatttttctaaaattaattttctttttaaaaaatgggtcccagctgggtgcggtggctcacgcctgtaatcccagcactttgggaggccgaggcaggttgatcacgaggtcaggagtttgaaaccagcctggccagcatggtgaaaccccatctctactgaaaaaatacaaaaaactagccgggcatggtggcacatgcctgtaatcccagctactcaggaggctgaggcaggagaattgcttgaacccgggaggtggaggttgcagtgagccgagattgcgccactgcactccagcctgagtgacagagtgagactccacctaaaaaaataaataaataaaaataaaagtaaaaaaaaaaaaagagtcccatataggaaataggaattaatattttcaaagatgaaaatgtttacttttttgtactttttagtcaggccaagttaactgccaatttgctgatgatgttatttctctgttcaatacagatgctggcatatatgttctattctgttccttactttgtgactgcactgtatggcttagtggttcctggatgttcctggatgcctgacatcacattgatacatgctggaggtctggctcaggtactaagaatattctgttgagaaggtttacttgtggtctaggtgtcaattgttgaatatatgaaaaacttctctgctcagtgttttagactaggagatagctattagacatgtcaccttttgttttgcagttcttcagaagacatttctgcaagtacattttatttcaatctcacaataactatatggtagatgtgccatccagttacacagatgaggaagttatctgtggtccagtgaagttaaatgatttgcccaaggttacacacccagcatgtggcattgttgttttattggactgtttcacaatctctgaataccatggctactaaaaaaggattgagagctgtcaccttcaaaatgtccatccaaatttaagacttcagaattccactacgctatgctatacagaaccagggaaactggtttaaaaaatgttctgggcctgtcatttcattccttttccgctggcaccttgccaaatatttggcctagagtaggtgttcagtgaatgcttactgcgtttaactgaaaatgaaattatctatggagaacttcacacataacataaagcacatttttacaagataattagcaaaacaaatcaatcttctgaacaaggaagaaaattaatttttcttactagaaataaaacaaatgaacttatcatttaaaaacattagcttcatcttgttcttttcaagcagttataagaatgaggttcatctagaaactgtaggcttgtacagtcaattatatgcatggtataataatcatgatcgtaagacatactagaattcacacggttgaaaaatatagtatttaaggggtcaatgcattaaatcctttcagtttgaggtaattcttaattataaaattagcatagtagtatcgaaaaagttgatgtagcatccagaagtaatggttcctgtcctttccttgaggggcttaagaaggaagagaactaacatttattgctctttgctggttgtttttcctttgcagacctctaaatacctgattcctcagtccttggggtttatttctgtattttaggtctttatctttgtatctttcaataccaactataagctgataacttccagttttctaccttcggcccacaccgttcccagactcctgtatttcattccaaactcagtctttttacttgcatgcctcactagcacctcagatttaatatataaaataggacctgatcctccccacaacctctcttccattttttcattatctgtttaaatagtccaattgcatccagcaactcaagccagaaacttggagtaattatttacactcctcatcctctacatctagaccaccactaagtccttttttttttcttttaaagagacagggtcttgctccatctcccaggctggagtgtgatggcacagtcatagctcaccgcagcctcggactcctaggctcaagcaatcctcctgcctctgtctccagagtagctgggactacagacatacaccaccgcacacagctaatttttaaattttttaaagagatgggatcttattttgttgcccagcttattctcaaatgcctgcttcaagtaatcctcctgcctcagcctcccaaagtggtaggattacaggtgtgagccaccacacccaaccaggtccagttagttttactccagtgattctccaacccattttttttttccagctccgctgcccctacactagtctgagctctcattaccttacttcatgccaggcaaaccacgttaaaagttttacttacctatttgtctaaggataggctatgtgctctgctgctgtaacaaatactcagagtagcttaacacaattaaaattttaattcttttttatgcaaagatcatgtgggatattttcaaggtccaggcctggcaccaggtcaactgaggggaggctggtgactgtggtcttcctgcctgcctcagaataaacagcacaatggacacataataatatcttttgtaatagctctgggaaaaaaaccccaatttaaagatgaggaggctgaggctcagtccacctgaaattatttgcctaagattacagttattaaatggcagaataggtttatgaaatcctgtctgactccaaagctcatattcttctccattgtgttatctcacccaccccatgcaaacaatgaactatggcacagagtcctacagcacaaaagactgtatgtagtacgaggtgctggagaaccttgtgggtggaaggcagtgacattccgagttggactctgagggccaagtggggctttattaggctgagcctctccagggaataacccagggaaacactgaggtgtgggcatatgcagcaggtctgagggcagagtaagccttgcctttttttttggcctggttcctctgccttattctcctgtatccttcagaacagatggccgcatacccacttcactcttgccagccctttctttagaggattagactgttcagtttgacagctgttcagtttgacacctattacctgtgtcaattgtgctttgcctgcacaatcaggcctcctctgcctgccatgtgcctggtcggcctggtaccagtccctgatgcaggaatgctaagtgtcatcagccagcaggctggttaaagagaccagatgttggacctggtcaagtctcaggagacaaatggaaacagcaggaaaacctaggcaaaagcctagtcacatggccagggtcaacagtcaggaagcttaggaaggtcatagcttagaggaaaatgggtgtggtaagcctgtagcaataagacaaaccctaatctgttggtgaagctaagcttgcaggtgggcacttattactccagccaagtggttctgagaagggcagtgtggactacagagcagctggcagccgcaggggcattacctcattcatgtcagacgtcaggcatcctggggcttatccatcactgcccagttgataaggcagcctgaagcccctctcttgatggtgaatgcccagatccagagcctaaggctaaggaccagatcctgtaaatgtcagaaggatgtttctcccagcccagcaggtgaagacagactgagtaaagaattatgggtctgattcccacagctcttggctgagctttaatatctacccacttatagtgtgtaggctaaggaaaagttagaagccatgccgcaacaaaacaatagatatgaccagaatactgaattacgttatttgttttgtacttagcaaatactcgcttatgaaatggagtctcatcttatgggagtatctgacacattcatcacagaaagcactctccagcaaggcacggtggctcacacctgtaatcccagcactttgggagcccgaggtgggtggactgcttgaagtcaggagtttgaaaccagcctgggcaacatggtaaaaccccatctctacaaaaaatacaaaaattaggctggcgtgatggcatatgcctgcagtcccagctactaggaaggctgaggtgggaggatcacttgaaccaggaggcagaggttgcagtgagccgagactgtgtcactgcactctccagcccaggtgacagagagagaccctgtctctcccaccaccacaaaaaaacaaaacaaaacaaaaataggcatttttctgtaactttaatcagcatctttgcttgctaaaattgccattcttatttagaaaccttatgcattcatgatcccactaactttactaaaacttacttttactgaaacatctagtaaactctcaagaatctatgcaacttagtaagggaaaaaaaaaccacctttgaaaagttctagatcagtataggccaatggaagaaatattgagtagtggccaggcgcagtggctcacacatgtaaccctagcactttgggaggaccaggcaggtggatcacctgaggtcaggagtttgagaccagcctggccaacatgacgaaaccccgtctctactaaaaatacaaaaaattagctgggtgtggtggtgggcatctataatcccagctacttgggaggctgaggcaggagaatcgcttgaacctgggaggcagaggctgcagtgtgccaagatcacgcccactacactgcagcctgggtgacagagcaagactgtctcaaaaaaaagaaagaaaaaagagtgagtagttattggggccttgatttcagaccatgtaggagtctgccaaatctgctgccttcagaaatcaaaagatcaaggaaagagtaaaagaagattgaataaaatgaaaccaggacacattttagaccaaagagttccactggggacttactcataacccaggtatcttttcatataaaatgctaaccataggattaaagctgcaagtgtaatctgaaaggcattataggctgcttagatccacttattagcatttcctatcaattgaagcattttctctgctaaaatatcaatgaaaatgaaaaaaagccaaagccagtagagttcatatagttaggaacataagctctggaggtgaactggttcagattctagcctgttgctgatgagcacaatgaccttggctactttacctctctgatcctcagtttcctcttctgtaaagtgaggataataacagtagctttctcatggaattgctgttagggttggatgaggtaatacatgtaaagggcttaaaacagtgtctggcacataacagctatgtaaccctttgttgctactattactggtagaagattcccagtaagaatttggagatatgccttatgttgttccgaagattaacctgaagacaaactaattaaattaagtgtattgtatataattaccaagaaaacaaagaaactgggtgaaagctttgggacagactcaccatgggcttggtaaggagcctgccatcccacagccagcgaaggaggttcagttacttcagtcaggtgctgccctcagactctctaactccctggctatgtaggtgctatgtcatgtctttttctcacaaagagatatggaaacttacgtgtgaataatttggttgtgaagagtttactgaagtaaatttatcattttttttttaacttgagacagggtcttgctatgttgcccaggctggtctcaaactcctggactcaagtgaccctcccgccttggcatcccaaagtgctgggattataggtatgagccaccacgctcagcctggaagtaaatttcatacggtttttccctcatggagacgttaagaaaaatctgaaagtaacagtttaggaagaacacggatagttgggatactaatgcaaatcttgttttcttcatttgcttctggtgtgattcattgctaaacatctttatttagtattaaattatactgatttaacatcttttatgtacttatcctttcatggagacactcacagtaaaaaggtcaaaaggtcaagagaatctaaaaacaaagggcccagattttctacagtcgagcaccagatcatgaatgggtatttcagttttgtacttgtgtctacagaatagccccaagtgcttgacactgtctaagcatgtcacaaacatcacctcactgaaccctcataacaacctatgaggtgggttccacacctcacccgaggccatacggctggtttgtggtggagctgtgatttgactctggatgtctagttccaaagtcagtgttctgaaccaatgaactatgttgctcagaaaactctaagaaaagataacacagttctagattagctatttatactgtattagcaaaagaccctggctatcatcccaatggtcacctaagttttctgcctataacattcacatggacatataacactctttcagttcctccttgtggaaccacgattaacttttttagttatcctttacagattgtctctatacatgtaagaaaacagctcttaaaatttaacctttgttcaccttattgtctcatttgccattccaatcatccattcttaaaaaaaaatcagagtatatctcttaattatttctgtaaggtgaaaatgatttagaatgaagtggaagaaaaattattagggactcaacctcacattgctaaattctggagaaatttctaggatcaacaactcatatctgtaatcctgggcctcctgttaattcagcagcattgagttcactgagccacctgaccccagcacaggctcaggctgagctcttcaggtcctgccatgagaggccttgtgctgctgggaacatcacccaggagaaaacctgcagccctttattagctatgtgcttgggaagagaaacctcctcaggtgagactgtttttctgaacttcagaaccctgaacacttaacatcctatgccttaggagaaagctatggtcaggtgctcactcagctggaagtgtggccaccataagtacatccattaggactatgagcagtactgggagctgcacaccactggccttagagttcttctctcacatacaaatgcctcttttgattatgaatgttaaaatttttgtgccttgtttaataattctgaataaagaggcctactaaaatacatacaaaactagagaaatgctttgtagaccctttttgtattttgacagtcacaagtccattgttgttgaacgtttattgagctctaacaatgtgacaggtgccacacaaaacattagacacagtacctgcccagtgggcttacaatctaatctaaggacatgaatctttttttttttttaaagacagagtctcactctgtcacccaggctggagtgcagtggcacaatcttggctcactgcaacctccactccccgggttcaagcaattctcctgcctcagcctcccgagcagctgagattacaggcgtctgccaccacgcccggctaattttttgtattttttagtagagatggggtttcactatgttggccaggctcgtcttgaactcctgacctcaggtgatccacccgccttggcctcccaaagtactgggattacaggcgtgagccactgcgcccggccatgattcacttaatgttgccatgagtttgctgttcatgaaagtgaggtattaactgcactggttagtgcaggaaaagagcctacggaatcactgactttttacacaggctcccctatgcaagtaggcacaactgctcatatttattctctcaaagtatggttggcatttccccaaatttggtgattttgtgatgtgtacaagtatctataaagacagaaccaccaaacccagatttctgagaaccagggatcaaatgtggcttccagtccagagaaaatgcttggttatatattcagaaaaacactattattcaaaacaggccctaaggaaaaacagtatgggagccatgctcctgctcagagttcctagaatgtccagaaagcacctcctcagggcagccctgaaagtgccctttactctcaaggcattttgtcctcagagcccagagatgcatatacatttgctgggttctgcctgggcatctacccaggggagttgtatctgagggccgagtcctctcagtgcctcatggatcacaatgtagacaatccacgtgctggtccttggcaatacatcatgctaatttaatttatatctccagagtagcaaaaatgtaccacaggtctccagaatatatcaggaatttgtaaaaatgcagcccattaaaatatctgccactgataaaaaattcataaagatgctgcttaaaaaaacttgtccttttcttgtcatggtgaagtcaagtaagtaacacctttatctgtgaaatcactcagcagaataaattggtttcatatggaagaaatgtaaaataacttatatgtatttaaagcaaattatctagttcttcattcttgttacttctatgccttctctatagtgcagtcttttgtctctttgatcctgatgaactgataatttactacttattacatttagattcccaatcctttattcatgtgtatcttgaatttcagcaagatatgaaaatgcagactccaggggtacattttgtaatgatacaagccttctgaggaaattttctgacaggagcttttaatcctgctgtggtctgttttaccctttccaatacggttttcctctgtgcttgcgaaaaatatcaaaaaagaccaattggcacattctgaatgtgttttctgaataagtatataagtagagagggaggccattttgcaaatgcggataatgctgacatgtcgtacttctaaataaattataatttgatttaaaaaggttgcctgcatgtacatttgccattttacaaagagcaaccgtactcctacctccacccaagttggtaacaaccttatcttacaaacaacccttaatattttaaaagctgcagaaaaaacaaatacatgaataaatgaataaacaaaaaacacatagggaaagggtatgagctcttgctgcaaggagtagatgaaagactgataaatgaagctgaggtccccccagtgcttccctttcaatagtttatgctaaaaatatttgttttttaaaactctgcgctttcttcatttttattggaacgcaatttgtgaaccacaactgagtctgtatgcaggatctccagaacgcaaatcagaaaaaaatttgagattttattcagatttttctattagattgagccactaatgttcggtaaggggcacttgatggttaaaaaacacaactggcatgataaaactacactaaataatatctactttatttgaacagtcatatcaagaatggccctaaatttaatcaaggactaaatttaatgaaagactctgacattaaagactctggattgtttgaaggtattttgcctgcaggtgagactggttttgagggcacagaaacgtagcctgaatgaaccattcagaactcatcatgcatccaactgaacacgtttcatgcttactcaattttttttttttaaatgcaacaggctcagttttctcacattggtgcatctcttcatgctagaactgcttatgtctacagagtccctgaagaagcaaaaatcctttttttagcattaaacatagcatatggagttcttcctcagctcttggcctatcgttgtatctacaaaccagagttcttcataaaaacaaaggcagaagaaaaagtggaataaaaatattacttcatgttcctcctttctaaattactaacttttgttatactggtactgatattttgtcccatttcactctcttctcatacgtgagtacttaagaatatgtacattcttgctctgcactgtatgtgtgagctatatggtattgtgtaaattttttttgaaggaaaatggaaattcttgagaaacagtttgtttaaagaaatatattcaaaatcatttgtgaataaacttgatcatccatctcaatattgtttgacatataaaataattataagtgtaaaaaattacaatttagtgccaacagtagtgagcatgaaatgaaactattcaaaagagaatatggcctgtgcatattaaaaaattcaaaacagtgaatgcagactggaggagtaacttttgcaaataagatgaatatgcttcattattaaactcaatataaaaggcaaatcatcagaatatttttaaatgttgtttgaaaaatgttttcccaaggaaagtttattatttgctgctgtttcaagaaaattacttttactaaatttttttgtgtgaatttaaacagctaaatagggatcagtaactttatctctatccttaatgaacatttgttttattggtggctggaaatatttctattgtatttctgtgtatatttttaataaaattatttttggcctcttataaagacaaatcttattaaatttgaaacatttcatatatacacataaaa

SEQ ID NO: 14511 - DNA, 1885 bp, Homo sapiens
gggatgcggtgaagggcgagcggcgcggcggctgcgatgagtgcctctgcggccaccggggtcttcgtgctgtccctctcggccatcccggtcacctatgtcttcaaccacctggcggcccagcatgattcctggactattgtaggggttgctgccctcatcctgttcctggtagcactgctggctcgtgtcctcgtcaaaagaaaaccaccccgggacccactgttctatgtgtatgcagtttttggatttaccagcgtggtgaacctcatcataggactggagcaagatggaatcattgacgggttcatgacacactacttgagagagggtgaaccgtatctgaacaccgcatatgggcacatgatctgctactgggatggctctgctcattatctgatgtacctggtgatggtggcagccatagcatgggaggaaacttatagaaccattggcctatattgggttggatctattattatgagtgttgttgtttttgtgccaggaaacattgtagggaagtatggaacacgaatttgccctgcttttttcttaagcataccatatacttgtcttcctgtctgggctggtttcagaatctataatcagccatcagaaaattataattacccctcaaaggttattcaagaagcccaagcgaaagacctgctgagaagaccatttgatttaatgttggttgtgtgtctcctcctggcaactggattttgcctgttcagaggtttgattgctttggattgcccatctgagctctgccgattatatacgcaatttcaagagccctatctaaaggatcctgctgcttatcctaaaattcagatgctggcatatatgttctattctgttccttactttgtgactgcactgtatggcttagtggttcctggatgttcctggatgcctgacatcacattgatacatgctggaggtctggctcaggctcagttttctcacattggtgcatctcttcatgctagaactgcttatgtctacagagtccctgaagaagcaaaaatcctttttttagcattaaacatagcatatggagttcttcctcagctcttggcctatcgttgtatctacaaaccagagttcttcataaaaacaaaggcagaagaaaaagtggaataaaaatattacttcatgttcctcctttctaaattactaacttttgttatactggtactgatattttgtcccatttcactctcttctcatacgtgagtacttaagaatatgtacattcttgctctgcactgtatgtgtgagctatatggtattgtgtaaattttttttgaaggaaaatggaaattcttgagaaacagtttgtttaaagaaatatattcaaaatcatttgtgaataaacttgatcatccatctcaatattgtttgacatataaaataattataagtgtaaaaaattacaatttagtgccaacagtagtgagcatgaaatgaaactattcaaaagagaatatggcctgtgcatattaaaaaattcaaaacagtgaatgcagactggaggagtaacttttgcaaataagatgaatatgcttcattattaaactcaatataaaaggcaaatcatcagaatatttttaaatgttgtttgaaaaatgttttcccaaggaaagtttattatttgctgctgtttcaagaaaattacttttactaaatttttttgtgtgaatttaaacagctaaatagggatcagtaactttatctctatccttaatgaacatttgttttattggtggctggaaatatttctattgtatttctgtgtatatttttaataaaattatttttggcctcttataaagacaaatcttattaaatttgaaacatttcatatatacacataaaa

SEQ ID NO: 14512 - DNA, 29634 bp, Homo sapiens
atgcggtgaagggcgagcggcgcggcggctgcgatgagtgcctctgcggccaccggggtcttcgtgctgtccctctcggccatcccggtcacctatgtcttcaaccacctggcggcccagcatgagtgagtgagccggcgcggcgggggtcgcgccgaggggcggcgggagttggctcgccgcgacgggagcctcgcaacttttccgagggggctgggaccgtccgccgcgggacagaggttcgtggccgcaggggctccccgcgcctggccagactaggggggcgccccaggggtcgcacgggccgggtcttggagccgggccctgaggtgcccaggctggcgcatttcgggatgttggtgccagcaccgcgccaggtgcccggggtcacaggcgtcaatacggccatgcccctgccctggaggggcccaggggccggtggggagcggaacaaacacggacactacgaacctggccgtgtcagctcgtttgtgccttgttctttttgcatctcacgggaacgtttccatgtatggactttcgcatacttatcatttcttattaattttagaaactgttgtgaatgactagcagaaatagcccggaaccaacaggcagagacgtgggttctaggcctggctttggcactgacggtgtctggcctgacggtgtttggcactgacggtgtggtctggcctcggttttccggtcaagtggactttgtgtgcgtcctattgtaaggttccaccgagacctctttgtgaaggggcgttgtgaatggagaagtgcttcccagtgcctgcgctggggtaggatggggacaggcagcagaggcagaacacttcaatgtgaaggaaatgggtggggctgatggagggggacagggcttgggttcgaagccctgcctcccactccactgcagggatcacggactaacctgcagccggcagctgaaggcctgagggtcgccgggtgttgggacaggcgccagcctctgttcctgctgatgttggttgctgtctggagggaggaggaagtaacctgctatgtctctcagctgttggtgctaaggaaattgcatcagtctgtaggctgcaaacccccttcagctggtcaggccgtggagtgtctgtacatagggtggtaacttcctcctctccagctgcctggccgcctgatacaggcagcacccacactgagtgctcaccaggcaccagcagtgtctacccttggtctggcccagtctctggaggcatcccctggaggcagctgctctgggccaccgaatattacatgcctgtcaatatagtgcatgggggaccctgtgctccaaaaaatggcattacgggtagttcagtgaagatatactgagtgcctactgtgtgtttggcactgttccaagtgttggtgacatagctatgaacaagccagaagaggctgtggaggcaggtaatgagatagacatcaacaaacattaatacatcgatagtgacatgctatgaagataataaaatagggtgactggggagggggctggtggccagggaaggcttctaggaggaggtaacacttgagctatgggaagatctgggaatggagcctgtcgggcaggaaaatggagcagtgcaggggaaggaattggatgggcgtagtaggtattttggaaggtgaacagatggggcttactgaagagggttgcatggcagcagaggatttgaggatgagccctaggttttggcctcagccactgggaagatggtgatggcatttactgaatacagactgaactatgtattgctgtgcatgatggagcgcactggcaagcactacagcattttgaataattagtgtcagccattcttcctgtcctcttgcaggttaaaacccccgtggcctttgattcctctcttctttctccactcccttcctcctactgtctgcttccccataagtcctggggctctagtgtctgttccctcctttcagttctccctggcactggccctttctgacctggactgtggcaaaggctccggtgcaagtctcgctgcccagccccgctgcgtgtttctcggcctcggccccccagtcccagcccacgcactagtgctcctgccgcaccagcctgcctttgctccttgaccattcctcctcctctccagcctctagcccggactcctgctgctccctgacagggatgctgccttcctcctatcgcagactgttgaagccgcacctggactttatggccacttctaccttctgcagaccctccctctctctcctttgagctccctcagtcccttgtttgcacctttctcccgagagttactttcctgtggtaagaacttacctgccccggctatagctcacccctctgtactgtcctgcccaggccagcgccgtgtgcatcgtaggcactcaggtatgtttgactttgttgaatcgagtttccttcccaccaaaccttttatgcaactctgaaaaccagaaaaagaaaattagattgagaggtcaggaaaggattgagcgtgttctgtctccctctctcactgagagagacacactgctcacactcatccttgcatgtcccctctcagtaggtgtctgttcatagaagggcatcagcagcccttcccaccccccaagactagcaactttctcatcctggggttagtcgcagcccttacctgtccctgagtccctgcaggacctgtttcttcctgtggtgagcaggtcctgcacttggctgttgtaggagggtctctggggacagtgccaagagtcagagacaatctgctgccctagtttcccttcattcttccctcctctcctggagctaagagcatgagaggacgctgtgaaccagttcacactgctctgtcctgctccagaagagcaccaaccacgcgatcctgctggcagtgagtgcaggcccttggtaggagtgaagactggagttgtcacctgaccaccacctgcctcaggctgttcaccattaaaatgcctgtcagctgacccagcacacccacctcttccctcatgggattcttcagcccagcatcatactcttgacccacactggcttcctccttcttcagctcatccccacaggaggagcctggagcaaccactgaagtgcaatcaccagaaacctcctatttttcagtttctcacctggacattgaaacagccaccctcattcttttttaaaaaatgtaattaattgttattattttttgagacggactcttgctctgtcatccaagcgggactgcagtggtgcaatcttggctcactgcagcctccaacccccaggttcaagcaattctactgcctcagcctcccaagtagcggggattacaggcatccgccacctcgcctggctaattttttgtatttttagtagagacggggtttcaccatgttggccaggctggtctccaactcctgacctcgggtgatccacccgcctcgacctcccaaagtgcttggattacaggtgtgagccactgcgcccggcctcattcttatcatagaattgatccatctatcatttatccatccatcctccatacattcacccatactccatccatccactcatcatcatctatccatccatttatccatcatcctccatcatccatcaattcatccatcatccatccatccatttatccatcatcctccatcatccatcaattcatccatcatccatccatctattcacccatcatccacccattcacccatcatccatccatccattcatccatcatctatccattcatccatcatctatccatcctttcatccatcatccatccaaccattcacccatcatccatccatctatccatccactcatcgtctatttgttccccccttccctccctccttctattcttatctttctctctcctaggggacggtgatagttatccaaaggtcccgatgttgggctgtggtggtgtggaggggtctcagttgaggagtggtgcttgtagctgctccaatctgaagaggtcctggtgtagcaggccattggagtgggccaggtagtattttgtctagaattggaagccctgtcagtgctggaggtgtgagagggagagtattgctgttggactgcaggagaactcctagtgggtagagctcagagtccattgagataggttcctccatgtaggcagggacttctcttatttatccagtctcctagggcctgcaacaatggctaccacataggggtgcagaatacatttttttgcttgctatgtttttgaattaattaataaacagatagatgcaatgatgtgactttcctagggtgacacagttagcaacagaatgggtaccaggatcccggtttcctgactgataactctaccaagcctcgtgccctatcgctgccccactgagtagcggctttggcccctgctgtccttggtgccactccctttcctgtagaacatccaggggatgtactcaactaagcttcaccttggtttctatggtttggggttggatgctggtctgttggccctggttctggggtgttgggctatcttcattctggcctcaggtctagtccagactccttctccatggatttcctggcctcattctctggcccatttgactatacacataacataaggtctttcttgtcccctggaaggcatgtttagttgtaatgcctatatattccttggagctcagtctgagggtttctgactggccctgagggaggtggcagagtcagtggtgaggcctgtcagctgctagggagcaggggttagaggaacgtgtaagtggaggcagtggggcagtggccataggtgcagcagggtggggtgaggcagagggagctccagacgtgtcatctgtgcacatgagacaggataagaggagaatgaggaggacctgatggcttcggtccctgaaagtcatgggctgcagcccagatgggccaaagagctgcagataaacttcactaactctacagtgctgggagctgcaggcagaggcagaattatggatgaattatgcagcactaggagggaatgcattcaatagtcaggaaattccaggcaccaatgtgtttattttgatagtgaccacctccctgttctggtcgttgcagttcctggactattgtaggggttgctgccctcatcctgttcctggtagcactgctggctcgtgtcctcgtcaaaagaaaaccaccccgggacccactgttctatggtacgtctccacaaagggaaatcttttgtatctgattaataacacaatactttcagcctcagtcacatattcctccttggttgtgaatactctgagccctttggtaacagtggctgcaagtgtaggggtgtttcaggacaatctggccctcgcctctggctattgcctctcaggcagtggactccaccctctcccaggtggcatcccggtggagagttactgccaggccaggcagggcaccctgccaaccccagcatgctttgacctctgacctctgacctcgactctcatgctagctccttcctgggcttcctgtcttcagcctgctactagcagtcccccccacttagtgcagaacttaactgtgtggtgtctgggtctgcacatatgcatgaagaggaaaataatggaacctgccatagagacaagcacctatagtgcaccttgtatgaccctgagcactttagcagcaggctttcacctaatcctcaccatccctccacttgaaagtgaagcagctggcttggagatgctaagaaatgtggcaaaggtcgtgtggctgttgacccctaaagcccatgcccttccatcatgcatgctgccccagccaagctgctaccggcctttgagcacttcctgtgccaggtaccttgctgggcattttgttctgtagtttctgcttcagtaatgctgcatatcaaatgcaccccaagtcctacagcaacaaacatttatttttcttgctcacaggtctgtgggttggggccactctgcatcaggctgtgggttgatttcagggctgttctctgactccttgttcttggaccagcagctcccaggcatgcccttctcatggcagatacagaggcacagtggggctagaaggaagaaagtggtggctcttaaggccttggcttggagctgccccatcttactcccacccatattccaatggctgagatgaggcatagggccaagcccatcagcaacagcatagggagcattctctgcctacagtgggccttgggaaaggtggggtgggaaggaagaattgtgagtaactagtttctcccaatccacatataagaagctctgaagcttcagaaatgatgtaatttgcctaaggttttacagccagtcattagatgagctgggtccgtctgctttcaaggcccacatgccttttcctggctctctccactagcctgtgctctgacccttgcacacctttccagatgagtttcctgctgctgtctgtccctcctgttcctccccactccatggagcctgtattaactgtactgatgtctctcctgactcttcaaggctgggcaccctttctcctgtaccctcagccctctgtcctggtctgttacaactttgagtacactgcagcctcagggtgaggctcaaggccagactcctcacgtactagaaggcagagaccatgtccttgtcattgctaacacagtgtctgacacttgtgttgtcatcagcaatcattggcagattatgtgccgaacacttcctttcttggagacatatgatggctaatcacctgggaggcttctggaaaatgagtatcaggaagtgacactgccaatgagaactgggccaaaggcccccatggaggcgtggggaaggcacatctgcaaaacagggcacatgtggccttttgttccttctggggagaatgtgaatgctggactcctggctgctgactccaggcaaggccggcttcccttctctgtgaattaaccatccccacactcctctccatttcttttttcacagcttttcttatattcaccatcagatttttcttctgtccatgtccatcccatagtctaaggcaccaatctgttacaacttgaaaatgcagctttgacaaactaacatgcactaaatttgatcacctgctgtttaaaaagtattatttcttagttatttgtgctagtagttttaagcccatttaggagatgctcacaactctggtaagattctctgacaggtatagctttccttctgtcatattcaattataccctcttgtattcatttttaacatcactagtcttttttctgaaagccattgtcacttgcacatcagccacctgtctgtctctaggatacgccatgtggaatagggtaaccacactggacacgctgtgaggtggcctgcttgggaatcattgagatgaatcacttcgtcaagtcattgtctttttttttttttgagacagagtcttgttctgtcgcccaggctggagtgcagtggtgtgatctcggctcactgcaacctccgcctcctgggttcaagcaattcacttgtctcagcctctggagtagctgggattacaggcgtgcaccaccacacccagaaaatttttgtatttttagtagagacggggtttcaatatgttggccaggctggtcttgaactcctgacctcaggtgatctgcctgcttcagcctcccaaagtgctgggattacagacttgagccaccatgcccagcctgaatcattgtcttaaacttagtggtcacttctatgcttccttggccactcagttactggctttgctcccactgcccatgtgggatgtgggtttgattctgggcagccacttgtaggggagtggaggatgggtggagttggcctgctagaatcttctgtgactgagccggcagtgaccatcattctccactcctgtgatgagtgttcccttgatgagagtacttaggcagggatggggagagctgcgaacacaggtggaggtccagctgggtgtgtagaaggggtattctgttagtctatctcgataattgtccacagcatcttctggaaaacatgaaaaacattccattattattagctgatgccaagcttgtagtaattgtctcctgagctattgctttttaaactgctgctttctttgctctagtgtatgcagtttttggatttaccagcgtggtgaacctcatcataggactggagcaagatggaatcattgacgggttcatgacacactacttgagagaggtatgggatcacttagtgattatgaggtttcaaccaaaaggccacaacccagatcacattactcagagacagaaatcctctcatttagtgtgaacaggtacgctacgcaggctttcatttcctataatagccttaggtcgcttagtcacatggaaagtggagcagaaaggacggttagatcacgagaggcaattctctccaacattcagctctcacggcttctctcactcatgaccgcacacatgacctgcttttcccctttatctgtatttaatataaataaggtaccttaaatggatttagtatttatgtgtctgttaatacatgactatctcagaaaccccaagtcagtcttaaatttgtaaagtacccaacacagaggcacttgatgaagtcatttgattgtgatggcttgcactctccaccatgctgcccaaatcatagctttgatactacctggtactcgagagagctagtcctattttcttattttatggtgggctgaacccagccccagagaggttaagtgacttattcaaggtgacacaggaaatgaggaaaagggctcaaagcagattcttcatccatgttcagataatggggagctttgtatgtacgctgtgggagtttgggttttatcctgtctgtgagggaagattttaagtcagtgaagaatacaggcagctctgggaaggatgggcttgcagggaagggtccgtgccatgagctggggcaccagtcaggaggcttcctcgggaccagcaggggcataaacgtggctggatggaggcagcgcatgggaagtagagagagggatgaactttagagaatcggagtggctggaatgaataagacttggggacaaattgggagtgatgggaaggatgaggcctaagacagtgtcctgattcctgctttggaatttggaagaatgctgctgtttttacaccagagagggatgacaggaggaatttatttctgcagacatttgttgaaggggactctgtggtcagaagacctgctccctgccccctgggagctccctgcctgaaagggtggggagatggaattgtcccaggcacagtgagagactcactccaggcacagaagtactcagaggaggaattaagtctgggtgcagtcggggaaggcttattgagttggtgacactgctgtagcattttaaaaatggtcatggcagtggaagatggacatttccagatggaccagggaggtagggggaattccggagagaagggacagcttgggcaaaggcttggagaggagaaagagcatgtgcctctccctggggcaccaatctgcaaggatgaggctgagtttctatggggaggtggagtttcagatgctggcagggctttgcaggtcttgagctctgaggagcagtcctggaagagagagtcacgggccatcggagtgcagttggtacctgaatgtctgagaggagaagggcttgcctatgagaaggtagagagagaaaagggctgagcttgggactttagagaccatggccagaagaagagaagcccctgaagtggaccatggggggcaggccaagaggcagaaggaaaacctggagagtgggggccatggagcccagaggagggaggttttaggaaggaggcggctgacgagagggctggaggctgagttggcaagggtggtaagcattggggcagacggggtatcagaagggggactggggtgtaactgtggtggcaaggtctgcagggccaggctctggggacccagctgtgatagagaggagatggggcttggtccagcaggctgtgacaagttttggggagttttagagtagaggaacaacatgccaagagccaggccttgagaatctttatctggcaggaggagtgtcatgggttggaaggaggggacaaaggtagggagaccatttgggaacatagctgtggtccagtgagggacactgagggctagacctaatgctgtgaagaagagggagaattgccggggtgacatcgtagcaataaagttgatagatttgctgagagactgcataggagaatgaggaatgaaaaaatgaccatgtggttttgaccttggtaagccgaatggtttcaccattaatatagagaggccatggctggcctggtggctcatgcctgtaatctcagtgctttggaagacaaaggcgggaggatcgcttgacgccaggagttgagactgcagtgagcaatgatcaccactgcactctagaccgggtgacagagtgagaccctgtctctgtacgtacacacacacacacacacacacacacacacacacatacagagagagcaagagagagagaggcaagatggaaggctggttgaggggagaagctgatgaattaagagttcaggcgagttgaaaggacctgtggcctgtgcaccatgcagttaaagatgctcatcaagctaccaggagaggccagcactggctcagagagccaggtgtgttagcaatggaagtctgaaaccataaatcggatgtattcttcagtcagagcaagtccaagagaagggacgtgggcctggcatgggtgtagaagcagaaccttgattctgtttcctgcttctctgattttaatttgatttgatctgtgggagagatgacagagcagtccttgccccaggggagcatgaagcttaagagaaagccctgcttgcttggctgattgatgggctggttgatctgcactcttccttgttgtagaaaggacttaaggcatcttacagcgtgaaacaagccaggacagcatgaacgtgggagaaagaggaaaggaaaacaaggtggggccaaaacaacagtaaaaatgcacggaaaattgatgacagtgattttctagaagccacctggaaatgtaaccacctagaaaagggaaatgtagttcgtcatataatcttgtgttcataacattaacatttgcccaggagaagtatggctcttcttggtctctgctaggtatactagctacgtgaccttaggaaagtcttgtaatctcagagcatctgtttcctcatctgtaaaatggactcaatcctgtccatcccactgggttgttgggaaggtagaaggaggggttgggtgtgaagctccgagttcggtgcctgcctgcctatgtgtcagtatgtggggaatgagtgttgtgccatgcccagcccagcaagccacgggatcagcatgaattattaaggccagccactggttctggaaagcagggtcatccctggccacctctctggtcactgccaagcaccttgtgtcaaagatttggcttggtctccatgagtttgccatacagccaggattgcctatcatgccatctgccttcgcatcacagtacaaacctatgttgatgcatcatgggccaattggccaggcattctctaattccatcctctgtggccagaccctggttttggcagctccagcgtaaagttgtattttcatgttcctaccaattttgaagaaatagtttcatcttagcagatgaacacaagttagttctgctgttttattttacttgcaatacaggtctgatgttctgcatttacaggtcttatttaaagtggacttctttttaatgctttctttagggtgaaccgtatctgaacaccgcatatgggcacatgatctgctactgggatggctctgctcattatctgatgtacctggtgatggtggcagccatagcatgggagtaagtcagttcacctggtgtgtgcctttgccaccttagcaaccgataagcgggtatgtaaggaaacgttatgcatagaggcaaatacacaagcaggtatactggacatgaatataagttccatgggtgcacgtcagacgtggctttatcctccttgtaccactgccttttgaatatgtccttctgaattgctccctagcatggtgacagctcgggcagaccctttaagctttctgattatgttgtcttacaagaataatttttattttcagcaattaaagctaagcacatcttaaacttcatttcaaaacttcaaaatttccaaacagcaatctcatttcggttcaaagcttctgtccttccccagatcaggcacagctctgcggcttggctcgcactaaggcttggctacatggcttgtccgttcactcctcctgtctcactctgcggctggccccttggcagtggatgtgtatgtacaagggattaaaggaacaggagccgagtctgatgtgaaaggtgctggtttttgggtattggtacccccatcatgatatgctagcttggtcttgggaggcacacatgtgagttctttagagaccccaaccacaggagcttctgcattgcactaatccctgaagtgaacgacgtgctcttgggctgaatttctgcccatggtggcacacccacagctttttttctgctggggcccctgtaacccagaaggtacaccctttggggaggggtcttttcaaaacatttcaagtccggccatcttctcaggcctccacttgcttctgggttacagaaagtcatgcattcttgccccatacaaggttgaaatgtagtttacccaagtatctccctcactcccaacatgcactcaaggtcagctccagctaattctttttttttttttttttttttgagacaggctggagtgcaatggcacaatctcagctcactgcaatctccgcctcccaggttcaagcgattctcaggcctcagctgggactacaggcgtgtgtcactatacccgcaaattttgtatttttagtacacaaatctaaacatttttttcaccatgttggccaggctggtctcaaactcctgacctctggtgatctgcccgcctcagcctcccaaagtgctgggattacaggcgtgaaccaccgtgcccggctccagctcattcttatctgttctcctgcttataatcccagtcattatgaatgggcctcttggggtctggttacatttggcttgagggcgggggtggggcaggacgcacacagtattctcgtttcccttcagagaatttccttttgaatttctcatagcctgttacatagtgtggagtttgggttattggggttatcaattgaaggaactttttttttttattttgagacggagtctcgctctgtcacccaggctggagtgcagtggtgcgatcttggctcgctgtaacctctgcctcccaggttcaaccatttctcctgcctcagcctcccaagtagctggaattacaggtgcatgccaccatgcccagctaattttttttttttttttgtacttttagtagagatggcgtttcaccatgttggccaggctggtttcaaactcctgacctcaagtgatctgcccacctcagcttctcaaagtgctgggattacaggcatgagccaccatgctcggcctgaaggaagtttttgtcagcattgaagatttggggtatatgtctagcagctcctttgcaacatggggtacatgtcacttgtcttcacctttggggctttggccaaaattctgtgaccccagaaaaagtccatttaacattatcattgtaagtataactcatacttataatgattaaaaatatggatccaatttcatttcttctttcaactttctttttcctttcatgctgttgagtttcacacacaatagggaaatgcaggagtcctgtggcagggatgatcatgttgtagtttaacagaagacatagcaggcgtaatttcctatttaaaaggacacgaagaaggttctatagtatatcacatggcaatgaagttacataaccagggctccttgtgtttgatttattcctctcaattcaatatgttttgattgatgtactttactagtttgaatacaaaataatattgaagatcattttttgcttagtattctaagacaaacataccaagtcaagatttttttgttgttgttgttacagggaaacttatagaaccattggcctatattgggttggatctattattatgagtgttgttgtttttgtgccaggaaacattgtaggtaagaaactttatcttaaagttcactttccttttctaaaacaatggggcttgtttttaaatagagaagctcttttagttataatagaaccaagtgattccaagcttactaaaaacctgttttgcagaataattcctttttctcacctttaaaaaaagtactttttaagaagtgctttgagcaattttcagatgtgtgcattgaacaatttggcagtcaagttatcagggattcctgtttttttagaaggatcttgagggagtgagtatggtgtttatggctatatttagtgtgcaaatatgttaactcctgacacactatgagaactccaaaaatgtacttggaaattacaagtacattattaatgtatgcaggaaatcaggatatataggtagatagatagatagatagatatagatatagggagatagatatatacaaacatatatagatacctatctagatgtattttttgagacaggatctcactctgttgcccaggctggcttgcagtggtacagccatagctcactgcagccttgatctcctgggctcaagcagattactgtagataggacatgcctgttaatacacatctagtattttaaattgacctttttaatttggcctcattaaaaatattgtctggcccatagcaaaattttagatgacctgagatggggaggtatcctaaatattacttgtgttagatatgcttttggtaacttctttctctttctctcttttaaatagggaagtatggaacacgaatttgccctgcttttttcttaagcataccatatacttgtcttcctgtctgggctggtttcagaatctataatcagccatcagaaaattataattacccctcaaaggtgattttattaagctttgatgtaccctgttctcaaactcatagggttctttcgcatccactggccactgaattgaaccatgcctctgtggactggagcatttggggcatccaaacagtgcgactgttttgattatgtagcattagcttacgtattaattaatgtaggcaagaaggtctgtttctgtctgaatacatctgcttctgttggcaaggccatactttggggagcttcctgtgccagtggtcacactggctctaactatcagattctgcattagtgtgtcaagtgaagtccatagtgtgtggttcatctaggattgttaatggcctggacgttgaacacctgggttcctctgtgacacctatgcatttactaccccaagaggacactggagggatactgctcctcaaggtagtctacacagccatacaatcttgactccagagatccaggcccatagagactggctacaggacatctgagacacctcccttccattcacagccaaggtagtcaaggtgaaacagcactggcctggcagatactctgttaaggccttcatttctaagctagtttctctctgtttcttttacttttctaggtattagatcatttagcaagatcttttaagcaaaactgatatatgaaaatatgaattactagagataatcagaatacgactattcattttacaaaagattttcagtataattcattaaaatacattttaattgacaaatacttcatttgtaaacatttagacaccttctatgtaaactcaggctggcacactgacagctggtactaacttccctctgaggaaagaggtggctgttaaaaagaaaaagcaaatagtcagtccacccttagtcccagctccactgcttttaaaggttccatgtcagtgtgtcaacagagtaggtatgccatgaggcatgcagaattacttatcattatttttaatgtgaaaacacagtgacagccagggccaagcaggcattgtcatacagtgctgacagaaacataaattcagaattgctctgcaaagcaatttggcaatgttatcaaccttaataattctggaacccaataattctgctcctagagccctatcttcaggaaatcatcacacagataccaccaaagatttacaaagttgttcatcattacattaagtataacagtgaaaaatgcctaaatatccaacagtgggagaatggctaaagtgtggtgtttccatatggtattcagtttgagaaaatttttaaacatgtgggaaagtgcttataatataggcagatgttgagagcaaaaagaacaaatacagaattgtttatatacaggaataattttatatataaaattgttcctaattttgtgaaaaatgtagatatatgtgtgtgtatatatgtatgttgtgtgtatgtaactatatctatttacatgtattactggaaaagtataccaacggttaatagtggtgtggcaggtttatggtttacctttaaaatttattatcattaaaatgtcatttcaagaaaaaaagtggactcatagagctacaagagcccttcgagagatcatttagcccaaattcttcatttcacagataaggaaattgagacttgaggaaggaaatgattttcctaaagttccatggccagtgatttatgatataaattgtgcatcttcaaaattctcttatccatcatcatgacatttaatgtttcagatttcagattcttctttggcactttgggcctgctctttaggtacaaactctattttaggttattcaagaagcccaagcgaaagacctgctgagaagaccatttgatttaatgttggttgtgtgtctcctcctggcaactggattttgcctgttcagaggtttggtaagcataacagatcataataacgtaacattgtgatactactcacatttccaaatggaaaaaaacttagaaatatgtttttgtttttccatcagacttcttagcaaactaacaaaccattcctcccatcaaagcctggagccctggacctgcttcctgctgctcccaaccccagcctcctgctgtcacctcctcctgtccttagatcaagctctactcagaagcatcttcctccccgttttagggcatctaaaaaatcagccatcagagtctctcttttttattcttttgatgtttctgatttaaatgtaaatatctttggtaaggatggcaccctaggactgcaacacaactgtggcacagagcatccctgtgttctcaggagtaggggcaatggggttgaggaaggcgtaccagttcaacaattcacgtgtatgtagggtcatgggaatgtctcactggtaagagtagtgttgagtaaattcatctcacgcctggagtctttgtattgatgtgactgaaatacattaagggcacatgggcatttcatgttttctattttctctttattaatattttactgcagaggttaggaaaaagactcacaggctttgtagttagaatcctggccacttactagctgtgtggccttggaaaaactacttaacctcttggactctgttttcctctctgtaaaataacactacctaccttaacagtattgttttggagattaaataatgtacatcaaacacttggtagaggctcttatacatagtaaatgattactgttaggatttttattgatcagtgatccttcacaatgccccaatttgatgatttcttcttagtagaaatgaatttgggaagtttagaattatattgttaattatattcagcttcagtgacaatttctattcgaagcctgttggcgcgcgtaacagttggacagtagagtggcaagtgtaagcccatgcaggtgacttttatcatttcagggtcttgggctactgggggcctgtgcagcaggctgggttcagggtgagaagctgttttaagagttatctttatctgtgaaatgtcaagaaactttctggaggagagctggctaacaggaggaggggcatggggaagagaagtaaagaaggcaaggccatagctttgcttagaccacagggccactgaaactgttctttggttagtttgttgtaattcttaaagttcaaacaacaaaaaatagtgggccccacctgtattcttgcacggccatatccccttccctgtgcacgagaaaaatgtgtgcatgtgtgggggtgcatgcaaggtgggtagggcttttggattggggccatttttaccaactctgtcattggcctgtgttcatatatgccatctaggtgggacaacatttatggccaaagacatgaggaatggtgcctgaggggaggaaggtgactcagaggggacctagtaaagtgccaaaaagactttccagcaagaggaccctgctttcaaatcatcttttactgcctccaaaggccatatacgctatgatgcactggagacaggaaggtgctattttcaaatcttgcaatgcatagtaagatgaatttggtgtagaaatatacttttcttcctgtagggaatagggggctagttatttccaagaaaagtgaaactcataatttaaagcaagctgtgctttggctagccaaacctagatacttaaactctgaatatctgaaaaatacccaagaatagggcattagtttccatttcctgcaccataattaacctttgcttagtctccttagaacaaatctgcaaaatatttccatcattgatgagcctctacaatgcatacgttttgttaaacagcaaagcagcttgtgactaaacctggcacatttagccttatcagcaaacctaagaaccagatgtgattgtatttttataatgagtttatttttgtccttagattgctttggattgcccatctgagctctgccgattatatacgcaatttcaagagccctatctaaaggatcctgctgcttatcctaaaattcaggtcaagtagttatgaagcctaagatttttctaaaattaattttctttttaaaaaatgggtcccagctgggtgcggtggctcacgcctgtaatcccagcactttgggaggccgaggcaggttgatcacgaggtcaggagtttgaaaccagcctggccagcatggtgaaaccccatctctactgaaaaaatacaaaaaactagccgggcatggtggcacatgcctgtaatcccagctactcaggaggctgaggcaggagaattgcttgaacccgggaggtggaggttgcagtgagccgagattgcgccactgcactccagcctgagtgacagagtgagactccacctaaaaaaataaataaataaaaataaaagtaaaaaaaaaaaaagagtcccatataggaaataggaattaatattttcaaagatgaaaatgtttacttttttgtactttttagtcaggccaagttaactgccaatttgctgatgatgttatttctctgttcaatacagatgctggcatatatgttctattctgttccttactttgtgactgcactgtatggcttagtggttcctggatgttcctggatgcctgacatcacattgatacatgctggaggtctggctcaggtactaagaatattctgttgagaaggtttacttgtggtctaggtgtcaattgttgaatatatgaaaaacttctctgctcagtgttttagactaggagatagctattagacatgtcaccttttgttttgcagttcttcagaagacatttctgcaagtacattttatttcaatctcacaataactatatggtagatgtgccatccagttacacagatgaggaagttatctgtggtccagtgaagttaaatgatttgcccaaggttacacacccagcatgtggcattgttgttttattggactgtttcacaatctctgaataccatggctactaaaaaaggattgagagctgtcaccttcaaaatgtccatccaaatttaagacttcagaattccactacgctatgctatacagaaccagggaaactggtttaaaaaatgttctgggcctgtcatttcattccttttccgctggcaccttgccaaatatttggcctagagtaggtgttcagtgaatgcttactgcgtttaactgaaaatgaaattatctatggagaacttcacacataacataaagcacatttttacaagataattagcaaaacaaatcaatcttctgaacaaggaagaaaattaatttttcttactagaaataaaacaaatgaacttatcatttaaaaacattagcttcatcttgttcttttcaagcagttataagaatgaggttcatctagaaactgtaggcttgtacagtcaattatatgcatggtataataatcatgatcgtaagacatactagaattcacacggttgaaaaatatagtatttaaggggtcaatgcattaaatcctttcagtttgaggtaattcttaattataaaattagcatagtagtatcgaaaaagttgatgtagcatccagaagtaatggttcctgtcctttccttgaggggcttaagaaggaagagaactaacatttattgctctttgctggttgtttttcctttgcagacctctaaatacctgattcctcagtccttggggtttatttctgtattttaggtctttatctttgtatctttcaataccaactataagctgataacttccagttttctaccttcggcccacaccgttcccagactcctgtatttcattccaaactcagtctttttacttgcatgcctcactagcacctcagatttaatatataaaataggacctgatcctccccacaacctctcttccattttttcattatctgtttaaatagtccaattgcatccagcaactcaagccagaaacttggagtaattatttacactcctcatcctctacatctagaccaccactaagtccttttttttttcttttaaagagacagggtcttgctccatctcccaggctggagtgtgatggcacagtcatagctcaccgcagcctcggactcctaggctcaagcaatcctcctgcctctgtctccagagtagctgggactacagacatacaccaccgcacacagctaatttttaaattttttaaagagatgggatcttattttgttgcccagcttattctcaaatgcctgcttcaagtaatcctcctgcctcagcctcccaaagtggtaggattacaggtgtgagccaccacacccaaccaggtccagttagttttactccagtgattctccaacccattttttttttccagctccgctgcccctacactagtctgagctctcattaccttacttcatgccaggcaaaccacgttaaaagttttacttacctatttgtctaaggataggctatgtgctctgctgctgtaacaaatactcagagtagcttaacacaattaaaattttaattcttttttatgcaaagatcatgtgggatattttcaaggtccaggcctggcaccaggtcaactgaggggaggctggtgactgtggtcttcctgcctgcctcagaataaacagcacaatggacacataataatatcttttgtaatagctctgggaaaaaaaccccaatttaaagatgaggaggctgaggctcagtccacctgaaattatttgcctaagattacagttattaaatggcagaataggtttatgaaatcctgtctgactccaaagctcatattcttctccattgtgttatctcacccaccccatgcaaacaatgaactatggcacagagtcctacagcacaaaagactgtatgtagtacgaggtgctggagaaccttgtgggtggaaggcagtgacattccgagttggactctgagggccaagtggggctttattaggctgagcctctccagggaataacccagggaaacactgaggtgtgggcatatgcagcaggtctgagggcagagtaagccttgcctttttttttggcctggttcctctgccttattctcctgtatccttcagaacagatggccgcatacccacttcactcttgccagccctttctttagaggattagactgttcagtttgacagctgttcagtttgacacctattacctgtgtcaattgtgctttgcctgcacaatcaggcctcctctgcctgccatgtgcctggtcggcctggtaccagtccctgatgcaggaatgctaagtgtcatcagccagcaggctggttaaagagaccagatgttggacctggtcaagtctcaggagacaaatggaaacagcaggaaaacctaggcaaaagcctagtcacatggccagggtcaacagtcaggaagcttaggaaggtcatagcttagaggaaaatgggtgtggtaagcctgtagcaataagacaaaccctaatctgttggtgaagctaagcttgcaggtgggcacttattactccagccaagtggttctgagaagggcagtgtggactacagagcagctggcagccgcaggggcattacctcattcatgtcagacgtcaggcatcctggggcttatccatcactgcccagttgataaggcagcctgaagcccctctcttgatggtgaatgcccagatccagagcctaaggctaaggaccagatcctgtaaatgtcagaaggatgtttctcccagcccagcaggtgaagacagactgagtaaagaattatgggtctgattcccacagctcttggctgagctttaatatctacccacttatagtgtgtaggctaaggaaaagttagaagccatgccgcaacaaaacaatagatatgaccagaatactgaattacgttatttgttttgtacttagcaaatactcgcttatgaaatggagtctcatcttatgggagtatctgacacattcatcacagaaagcactctccagcaaggcacggtggctcacacctgtaatcccagcactttgggagcccgaggtgggtggactgcttgaagtcaggagtttgaaaccagcctgggcaacatggtaaaaccccatctctacaaaaaatacaaaaattaggctggcgtgatggcatatgcctgcagtcccagctactaggaaggctgaggtgggaggatcacttgaaccaggaggcagaggttgcagtgagccgagactgtgtcactgcactctccagcccaggtgacagagagagaccctgtctctcccaccaccacaaaaaaacaaaacaaaacaaaaataggcatttttctgtaactttaatcagcatctttgcttgctaaaattgccattcttatttagaaaccttatgcattcatgatcccactaactttactaaaacttacttttactgaaacatctagtaaactctcaagaatctatgcaacttagtaagggaaaaaaaaaccacctttgaaaagttctagatcagtataggccaatggaagaaatattgagtagtggccaggcgcagtggctcacacatgtaaccctagcactttgggaggaccaggcaggtggatcacctgaggtcaggagtttgagaccagcctggccaacatgacgaaaccccgtctctactaaaaatacaaaaaattagctgggtgtggtggtgggcatctataatcccagctacttgggaggctgaggcaggagaatcgcttgaacctgggaggcagaggctgcagtgtgccaagatcacgcccactacactgcagcctgggtgacagagcaagactgtctcaaaaaaaagaaagaaaaaagagtgagtagttattggggccttgatttcagaccatgtaggagtctgccaaatctgctgccttcagaaatcaaaagatcaaggaaagagtaaaagaagattgaataaaatgaaaccaggacacattttagaccaaagagttccactggggacttactcataacccaggtatcttttcatataaaatgctaaccataggattaaagctgcaagtgtaatctgaaaggcattataggctgcttagatccacttattagcatttcctatcaattgaagcattttctctgctaaaatatcaatgaaaatgaaaaaaagccaaagccagtagagttcatatagttaggaacataagctctggaggtgaactggttcagattctagcctgttgctgatgagcacaatgaccttggctactttacctctctgatcctcagtttcctcttctgtaaagtgaggataataacagtagctttctcatggaattgctgttagggttggatgaggtaatacatgtaaagggcttaaaacagtgtctggcacataacagctatgtaaccctttgttgctactattactggtagaagattcccagtaagaatttggagatatgccttatgttgttccgaagattaacctgaagacaaactaattaaattaagtgtattgtatataattaccaagaaaacaaagaaactgggtgaaagctttgggacagactcaccatgggcttggtaaggagcctgccatcccacagccagcgaaggaggttcagttacttcagtcaggtgctgccctcagactctctaactccctggctatgtaggtgctatgtcatgtctttttctcacaaagagatatggaaacttacgtgtgaataatttggttgtgaagagtttactgaagtaaatttatcattttttttttaacttgagacagggtcttgctatgttgcccaggctggtctcaaactcctggactcaagtgaccctcccgccttggcatcccaaagtgctgggattataggtatgagccaccacgctcagcctggaagtaaatttcatacggtttttccctcatggagacgttaagaaaaatctgaaagtaacagtttaggaagaacacggatagttgggatactaatgcaaatcttgttttcttcatttgcttctggtgtgattcattgctaaacatctttatttagtattaaattatactgatttaacatcttttatgtacttatcctttcatggagacactcacagtaaaaaggtcaaaaggtcaagagaatctaaaaacaaagggcccagattttctacagtcgagcaccagatcatgaatgggtatttcagttttgtacttgtgtctacagaatagccccaagtgcttgacactgtctaagcatgtcacaaacatcacctcactgaaccctcataacaacctatgaggtgggttccacacctcacccgaggccatacggctggtttgtggtggagctgtgatttgactctggatgtctagttccaaagtcagtgttctgaaccaatgaactatgttgctcagaaaactctaagaaaagataacacagttctagattagctatttatactgtattagcaaaagaccctggctatcatcccaatggtcacctaagttttctgcctataacattcacatggacatataacactctttcagttcctccttgtggaaccacgattaacttttttagttatcctttacagattgtctctatacatgtaagaaaacagctcttaaaatttaacctttgttcaccttattgtctcatttgccattccaatcatccattcttaaaaaaaaatcagagtatatctcttaattatttctgtaaggtgaaaatgatttagaatgaagtggaagaaaaattattagggactcaacctcacattgctaaattctggagaaatttctaggatcaacaactcatatctgtaatcctgggcctcctgttaattcagcagcattgagttcactgagccacctgaccccagcacaggctcaggctgagctcttcaggtcctgccatgagaggccttgtgctgctgggaacatcacccaggagaaaacctgcagccctttattagctatgtgcttgggaagagaaacctcctcaggtgagactgtttttctgaacttcagaaccctgaacacttaacatcctatgccttaggagaaagctatggtcaggtgctcactcagctggaagtgtggccaccataagtacatccattaggactatgagcagtactgggagctgcacaccactggccttagagttcttctctcacatacaaatgcctcttttgattatgaatgttaaaatttttgtgccttgtttaataattctgaataaagaggcctactaaaatacatacaaaactagagaaatgctttgtagaccctttttgtattttgacagtcacaagtccattgttgttgaacgtttattgagctctaacaatgtgacaggtgccacacaaaacattagacacagtacctgcccagtgggcttacaatctaatctaaggacatgaatctttttttttttttaaagacagagtctcactctgtcacccaggctggagtgcagtggcacaatcttggctcactgcaacctccactccccgggttcaagcaattctcctgcctcagcctcccgagcagctgagattacaggcgtctgccaccacgcccggctaattttttgtattttttagtagagatggggtttcactatgttggccaggctcgtcttgaactcctgacctcaggtgatccacccgccttggcctcccaaagtactgggattacaggcgtgagccactgcgcccggccatgattcacttaatgttgccatgagtttgctgttcatgaaagtgaggtattaactgcactggttagtgcaggaaaagagcctacggaatcactgactttttacacaggctcccctatgcaagtaggcacaactgctcatatttattctctcaaagtatggttggcatttccccaaatttggtgattttgtgatgtgtacaagtatctataaagacagaaccaccaaacccagatttctgagaaccagggatcaaatgtggcttccagtccagagaaaatgcttggttatatattcagaaaaacactattattcaaaacaggccctaaggaaaaacagtatgggagccatgctcctgctcagagttcctagaatgtccagaaagcacctcctcagggcagccctgaaagtgccctttactctcaaggcattttgtcctcagagcccagagatgcatatacatttgctgggttctgcctgggcatctacccaggggagttgtatctgagggccgagtcctctcagtgcctcatggatcacaatgtagacaatccacgtgctggtccttggcaatacatcatgctaatttaatttatatctccagagtagcaaaaatgtaccacaggtctccagaatatatcaggaatttgtaaaaatgcagcccattaaaatatctgccactgataaaaaattcataaagatgctgcttaaaaaaacttgtccttttcttgtcatggtgaagtcaagtaagtaacacctttatctgtgaaatcactcagcagaataaattggtttcatatggaagaaatgtaaaataacttatatgtatttaaagcaaattatctagttcttcattcttgttacttctatgccttctctatagtgcagtcttttgtctctttgatcctgatgaactgataatttactacttattacatttagattcccaatcctttattcatgtgtatcttgaatttcagcaagatatgaaaatgcagactccaggggtacattttgtaatgatacaagccttctgaggaaattttctgacaggagcttttaatcctgctgtggtctgttttaccctttccaatacggttttcctctgtgcttgcgaaaaatatcaaaaaagaccaattggcacattctgaatgtgttttctgaataagtatataagtagagagggaggccattttgcaaatgcggataatgctgacatgtcgtacttctaaataaattataatttgatttaaaaaggttgcctgcatgtacatttgccattttacaaagagcaaccgtactcctacctccacccaagttggtaacaaccttatcttacaaacaacccttaatattttaaaagctgcagaaaaaacaaatacatgaataaatgaataaacaaaaaacacatagggaaagggtatgagctcttgctgcaaggagtagatgaaagactgataaatgaagctgaggtccccccagtgcttccctttcaatagtttatgctaaaaatatttgttttttaaaactctgcgctttcttcatttttattggaacgcaatttgtgaaccacaactgagtctgtatgcaggatctccagaacgcaaatcagaaaaaaatttgagattttattcagatttttctattagattgagccactaatgttcggtaaggggcacttgatggttaaaaaacacaactggcatgataaaactacactaaataatatctactttatttgaacagtcatatcaagaatggccctaaatttaatcaaggactaaatttaatgaaagactctgacattaaagactctggattgtttgaaggtattttgcctgcaggtgagactggttttgagggcacagaaacgtagcctgaatgaaccattcagaactcatcatgcatccaactgaacacgtttcatgcttactcaattttttttttttaaatgcaacaggctcagttttctcacattggtgcatctcttcatgctagaactgcttatgtctacagagtccctgaagaagcaaaaatcctttttttagcattaaacatagcatatggagttcttcctcagctcttggcctatcgttgtatctacaaaccagagttcttcataaaaacaaaggcagaagaaaaagtggaataaaaatattacttcatgttcctcctttctaaattactaacttttgttatactggtactgatattttgtcccatttcactctcttctcatacgtgagtacttaagaatatgtacattcttgctctgcactgtatgtgtgagctatatggtattgtgtaaattttttttgaaggaaaatggaaattcttgagaaacagtttgtttaaagaaatatattcaaaatcatttgtgaataaacttgatcatccatctcaatattgtttgacatataaaataattataagtgtaaaaaattacaatttagtgccaacagtagtgagcatgaaatgaaactattcaaaagagaatatggcctgtgcatattaaaaaattcaaaacagtgaatgcagactggaggagtaacttttgcaaataagatgaatatgcttcattattaaactcaatataaaaggcaaatcatcagaatatttttaaatgttgtttgaaaaatgttttcccaaggaaagtttattatttgctgctgtttcaagaaaattacttttactaaatttttttgtgtgaatttaaacagctaaatagggatcagtaactttatctctatccttaatgaac

SEQ ID NO: 14513 - DNA, 1808 bp, Homo sapiens
atgcggtgaagggcgagcggcgcggcggctgcgatgagtgcctctgcggccaccggggtcttcgtgctgtccctctcggccatcccggtcacctatgtcttcaaccacctggcggcccagcatgattcctggactattgtaggggttgctgccctcatcctgttcctggtagcactgctggctcgtgtcctcgtcaaaagaaaaccaccccgggacccactgttctatgtgtatgcagtttttggatttaccagcgtggtgaacctcatcataggactggagcaagatggaatcattgacgggttcatgacacactacttgagagagggtgaaccgtatctgaacaccgcatatgggcacatgatctgctactgggatggctctgctcattatctgatgtacctggtgatggtggcagccatagcatgggagtaagtcagttcacctggtgtgtgcctttgccaccttagcaaccgataagcggggaaacttatagaaccattggcctatattgggttggatctattattatgagtgttgttgtttttgtgccaggaaacattgtagggaagtatggaacacgaatttgccctgcttttttcttaagcataccatatacttgtcttcctgtctgggctggtttcagaatctataatcagccatcagaaaattataattacccctcaaaggttattcaagaagcccaagcgaaagacctgctgagaagaccatttgatttaatgttggttgtgtgtctcctcctggcaactggattttgcctgttcagaggtttgattgctttggattgcccatctgagctctgccgattatatacgcaatttcaagagccctatctaaaggatcctgctgcttatcctaaaattcagatgctggcatatatgttctattctgttccttactttgtgactgcactgtatggcttagtggttcctggatgttcctggatgcctgacatcacattgatacatgctggaggtctggctcaggctcagttttctcacattggtgcatctcttcatgctagaactgcttatgtctacagagtccctgaagaagcaaaaatcctttttttagcattaaacatagcatatggagttcttcctcagctcttggcctatcgttgtatctacaaaccagagttcttcataaaaacaaaggcagaagaaaaagtggaataaaaatattacttcatgttcctcctttctaaattactaacttttgttatactggtactgatattttgtcccatttcactctcttctcatacgtgagtacttaagaatatgtacattcttgctctgcactgtatgtgtgagctatatggtattgtgtaaattttttttgaaggaaaatggaaattcttgagaaacagtttgtttaaagaaatatattcaaaatcatttgtgaataaacttgatcatccatctcaatattgtttgacatataaaataattataagtgtaaaaaattacaatttagtgccaacagtagtgagcatgaaatgaaactattcaaaagagaatatggcctgtgcatattaaaaaattcaaaacagtgaatgcagactggaggagtaacttttgcaaataagatgaatatgcttcattattaaactcaatataaaaggcaaatcatcagaatatttttaaatgttgtttgaaaaatgttttcccaaggaaagtttattatttgctgctgtttcaagaaaattacttttactaaatttttttgtgtgaatttaaacagctaaatagggatcagtaactttatctctatccttaatgaac

SEQ ID NO: 14514 - DNA, 29837 bp, Homo sapiens
cggctgaggcgcctcgaagggcaagcgccaagggggcgcgggcgccgccggaagctggggcggggcgcccagcgggatgcggtgaagggcgagcggcgcggcggctgcgatgagtgcctctgcggccaccggggtcttcgtgctgtccctctcggccatcccggtcacctatgtcttcaaccacctggcggcccagcatgagtgagtgagccggcgcggcgggggtcgcgccgaggggcggcgggagttggctcgccgcgacgggagcctcgcaacttttccgagggggctgggaccgtccgccgcgggacagaggttcgtggccgcaggggctccccgcgcctggccagactaggggggcgccccaggggtcgcacgggccgggtcttggagccgggccctgaggtgcccaggctggcgcatttcgggatgttggtgccagcaccgcgccaggtgcccggggtcacaggcgtcaatacggccatgcccctgccctggaggggcccaggggccggtggggagcggaacaaacacggacactacgaacctggccgtgtcagctcgtttgtgccttgttctttttgcatctcacgggaacgtttccatgtatggactttcgcatacttatcatttcttattaattttagaaactgttgtgaatgactagcagaaatagcccggaaccaacaggcagagacgtgggttctaggcctggctttggcactgacggtgtctggcctgacggtgtttggcactgacggtgtggtctggcctcggttttccggtcaagtggactttgtgtgcgtcctattgtaaggttccaccgagacctctttgtgaaggggcgttgtgaatggagaagtgcttcccagtgcctgcgctggggtaggatggggacaggcagcagaggcagaacacttcaatgtgaaggaaatgggtggggctgatggagggggacagggcttgggttcgaagccctgcctcccactccactgcagggatcacggactaacctgcagccggcagctgaaggcctgagggtcgccgggtgttgggacaggcgccagcctctgttcctgctgatgttggttgctgtctggagggaggaggaagtaacctgctatgtctctcagctgttggtgctaaggaaattgcatcagtctgtaggctgcaaacccccttcagctggtcaggccgtggagtgtctgtacatagggtggtaacttcctcctctccagctgcctggccgcctgatacaggcagcacccacactgagtgctcaccaggcaccagcagtgtctacccttggtctggcccagtctctggaggcatcccctggaggcagctgctctgggccaccgaatattacatgcctgtcaatatagtgcatgggggaccctgtgctccaaaaaatggcattacgggtagttcagtgaagatatactgagtgcctactgtgtgtttggcactgttccaagtgttggtgacatagctatgaacaagccagaagaggctgtggaggcaggtaatgagatagacatcaacaaacattaatacatcgatagtgacatgctatgaagataataaaatagggtgactggggagggggctggtggccagggaaggcttctaggaggaggtaacacttgagctatgggaagatctgggaatggagcctgtcgggcaggaaaatggagcagtgcaggggaaggaattggatgggcgtagtaggtattttggaaggtgaacagatggggcttactgaagagggttgcatggcagcagaggatttgaggatgagccctaggttttggcctcagccactgggaagatggtgatggcatttactgaatacagactgaactatgtattgctgtgcatgatggagcgcactggcaagcactacagcattttgaataattagtgtcagccattcttcctgtcctcttgcaggttaaaacccccgtggcctttgattcctctcttctttctccactcccttcctcctactgtctgcttccccataagtcctggggctctagtgtctgttccctcctttcagttctccctggcactggccctttctgacctggactgtggcaaaggctccggtgcaagtctcgctgcccagccccgctgcgtgtttctcggcctcggccccccagtcccagcccacgcactagtgctcctgccgcaccagcctgcctttgctccttgaccattcctcctcctctccagcctctagcccggactcctgctgctccctgacagggatgctgccttcctcctatcgcagactgttgaagccgcacctggactttatggccacttctaccttctgcagaccctccctctctctcctttgagctccctcagtcccttgtttgcacctttctcccgagagttactttcctgtggtaagaacttacctgccccggctatagctcacccctctgtactgtcctgcccaggccagcgccgtgtgcatcgtaggcactcaggtatgtttgactttgttgaatcgagtttccttcccaccaaaccttttatgcaactctgaaaaccagaaaaagaaaattagattgagaggtcaggaaaggattgagcgtgttctgtctccctctctcactgagagagacacactgctcacactcatccttgcatgtcccctctcagtaggtgtctgttcatagaagggcatcagcagcccttcccaccccccaagactagcaactttctcatcctggggttagtcgcagcccttacctgtccctgagtccctgcaggacctgtttcttcctgtggtgagcaggtcctgcacttggctgttgtaggagggtctctggggacagtgccaagagtcagagacaatctgctgccctagtttcccttcattcttccctcctctcctggagctaagagcatgagaggacgctgtgaaccagttcacactgctctgtcctgctccagaagagcaccaaccacgcgatcctgctggcagtgagtgcaggcccttggtaggagtgaagactggagttgtcacctgaccaccacctgcctcaggctgttcaccattaaaatgcctgtcagctgacccagcacacccacctcttccctcatgggattcttcagcccagcatcatactcttgacccacactggcttcctccttcttcagctcatccccacaggaggagcctggagcaaccactgaagtgcaatcaccagaaacctcctatttttcagtttctcacctggacattgaaacagccaccctcattcttttttaaaaaatgtaattaattgttattattttttgagacggactcttgctctgtcatccaagcgggactgcagtggtgcaatcttggctcactgcagcctccaacccccaggttcaagcaattctactgcctcagcctcccaagtagcggggattacaggcatccgccacctcgcctggctaattttttgtatttttagtagagacggggtttcaccatgttggccaggctggtctccaactcctgacctcgggtgatccacccgcctcgacctcccaaagtgcttggattacaggtgtgagccactgcgcccggcctcattcttatcatagaattgatccatctatcatttatccatccatcctccatacattcacccatactccatccatccactcatcatcatctatccatccatttatccatcatcctccatcatccatcaattcatccatcatccatccatccatttatccatcatcctccatcatccatcaattcatccatcatccatccatctattcacccatcatccacccattcacccatcatccatccatccattcatccatcatctatccattcatccatcatctatccatcctttcatccatcatccatccaaccattcacccatcatccatccatctatccatccactcatcgtctatttgttccccccttccctccctccttctattcttatctttctctctcctaggggacggtgatagttatccaaaggtcccgatgttgggctgtggtggtgtggaggggtctcagttgaggagtggtgcttgtagctgctccaatctgaagaggtcctggtgtagcaggccattggagtgggccaggtagtattttgtctagaattggaagccctgtcagtgctggaggtgtgagagggagagtattgctgttggactgcaggagaactcctagtgggtagagctcagagtccattgagataggttcctccatgtaggcagggacttctcttatttatccagtctcctagggcctgcaacaatggctaccacataggggtgcagaatacatttttttgcttgctatgtttttgaattaattaataaacagatagatgcaatgatgtgactttcctagggtgacacagttagcaacagaatgggtaccaggatcccggtttcctgactgataactctaccaagcctcgtgccctatcgctgccccactgagtagcggctttggcccctgctgtccttggtgccactccctttcctgtagaacatccaggggatgtactcaactaagcttcaccttggtttctatggtttggggttggatgctggtctgttggccctggttctggggtgttgggctatcttcattctggcctcaggtctagtccagactccttctccatggatttcctggcctcattctctggcccatttgactatacacataacataaggtctttcttgtcccctggaaggcatgtttagttgtaatgcctatatattccttggagctcagtctgagggtttctgactggccctgagggaggtggcagagtcagtggtgaggcctgtcagctgctagggagcaggggttagaggaacgtgtaagtggaggcagtggggcagtggccataggtgcagcagggtggggtgaggcagagggagctccagacgtgtcatctgtgcacatgagacaggataagaggagaatgaggaggacctgatggcttcggtccctgaaagtcatgggctgcagcccagatgggccaaagagctgcagataaacttcactaactctacagtgctgggagctgcaggcagaggcagaattatggatgaattatgcagcactaggagggaatgcattcaatagtcaggaaattccaggcaccaatgtgtttattttgatagtgaccacctccctgttctggtcgttgcagttcctggactattgtaggggttgctgccctcatcctgttcctggtagcactgctggctcgtgtcctcgtcaaaagaaaaccaccccgggacccactgttctatggtacgtctccacaaagggaaatcttttgtatctgattaataacacaatactttcagcctcagtcacatattcctccttggttgtgaatactctgagccctttggtaacagtggctgcaagtgtaggggtgtttcaggacaatctggccctcgcctctggctattgcctctcaggcagtggactccaccctctcccaggtggcatcccggtggagagttactgccaggccaggcagggcaccctgccaaccccagcatgctttgacctctgacctctgacctcgactctcatgctagctccttcctgggcttcctgtcttcagcctgctactagcagtcccccccacttagtgcagaacttaactgtgtggtgtctgggtctgcacatatgcatgaagaggaaaataatggaacctgccatagagacaagcacctatagtgcaccttgtatgaccctgagcactttagcagcaggctttcacctaatcctcaccatccctccacttgaaagtgaagcagctggcttggagatgctaagaaatgtggcaaaggtcgtgtggctgttgacccctaaagcccatgcccttccatcatgcatgctgccccagccaagctgctaccggcctttgagcacttcctgtgccaggtaccttgctgggcattttgttctgtagtttctgcttcagtaatgctgcatatcaaatgcaccccaagtcctacagcaacaaacatttatttttcttgctcacaggtctgtgggttggggccactctgcatcaggctgtgggttgatttcagggctgttctctgactccttgttcttggaccagcagctcccaggcatgcccttctcatggcagatacagaggcacagtggggctagaaggaagaaagtggtggctcttaaggccttggcttggagctgccccatcttactcccacccatattccaatggctgagatgaggcatagggccaagcccatcagcaacagcatagggagcattctctgcctacagtgggccttgggaaaggtggggtgggaaggaagaattgtgagtaactagtttctcccaatccacatataagaagctctgaagcttcagaaatgatgtaatttgcctaaggttttacagccagtcattagatgagctgggtccgtctgctttcaaggcccacatgccttttcctggctctctccactagcctgtgctctgacccttgcacacctttccagatgagtttcctgctgctgtctgtccctcctgttcctccccactccatggagcctgtattaactgtactgatgtctctcctgactcttcaaggctgggcaccctttctcctgtaccctcagccctctgtcctggtctgttacaactttgagtacactgcagcctcagggtgaggctcaaggccagactcctcacgtactagaaggcagagaccatgtccttgtcattgctaacacagtgtctgacacttgtgttgtcatcagcaatcattggcagattatgtgccgaacacttcctttcttggagacatatgatggctaatcacctgggaggcttctggaaaatgagtatcaggaagtgacactgccaatgagaactgggccaaaggcccccatggaggcgtggggaaggcacatctgcaaaacagggcacatgtggccttttgttccttctggggagaatgtgaatgctggactcctggctgctgactccaggcaaggccggcttcccttctctgtgaattaaccatccccacactcctctccatttcttttttcacagcttttcttatattcaccatcagatttttcttctgtccatgtccatcccatagtctaaggcaccaatctgttacaacttgaaaatgcagctttgacaaactaacatgcactaaatttgatcacctgctgtttaaaaagtattatttcttagttatttgtgctagtagttttaagcccatttaggagatgctcacaactctggtaagattctctgacaggtatagctttccttctgtcatattcaattataccctcttgtattcatttttaacatcactagtcttttttctgaaagccattgtcacttgcacatcagccacctgtctgtctctaggatacgccatgtggaatagggtaaccacactggacacgctgtgaggtggcctgcttgggaatcattgagatgaatcacttcgtcaagtcattgtctttttttttttttgagacagagtcttgttctgtcgcccaggctggagtgcagtggtgtgatctcggctcactgcaacctccgcctcctgggttcaagcaattcacttgtctcagcctctggagtagctgggattacaggcgtgcaccaccacacccagaaaatttttgtatttttagtagagacggggtttcaatatgttggccaggctggtcttgaactcctgacctcaggtgatctgcctgcttcagcctcccaaagtgctgggattacagacttgagccaccatgcccagcctgaatcattgtcttaaacttagtggtcacttctatgcttccttggccactcagttactggctttgctcccactgcccatgtgggatgtgggtttgattctgggcagccacttgtaggggagtggaggatgggtggagttggcctgctagaatcttctgtgactgagccggcagtgaccatcattctccactcctgtgatgagtgttcccttgatgagagtacttaggcagggatggggagagctgcgaacacaggtggaggtccagctgggtgtgtagaaggggtattctgttagtctatctcgataattgtccacagcatcttctggaaaacatgaaaaacattccattattattagctgatgccaagcttgtagtaattgtctcctgagctattgctttttaaactgctgctttctttgctctagtgtatgcagtttttggatttaccagcgtggtgaacctcatcataggactggagcaagatggaatcattgacgggttcatgacacactacttgagagaggtatgggatcacttagtgattatgaggtttcaaccaaaaggccacaacccagatcacattactcagagacagaaatcctctcatttagtgtgaacaggtacgctacgcaggctttcatttcctataatagccttaggtcgcttagtcacatggaaagtggagcagaaaggacggttagatcacgagaggcaattctctccaacattcagctctcacggcttctctcactcatgaccgcacacatgacctgcttttcccctttatctgtatttaatataaataaggtaccttaaatggatttagtatttatgtgtctgttaatacatgactatctcagaaaccccaagtcagtcttaaatttgtaaagtacccaacacagaggcacttgatgaagtcatttgattgtgatggcttgcactctccaccatgctgcccaaatcatagctttgatactacctggtactcgagagagctagtcctattttcttattttatggtgggctgaacccagccccagagaggttaagtgacttattcaaggtgacacaggaaatgaggaaaagggctcaaagcagattcttcatccatgttcagataatggggagctttgtatgtacgctgtgggagtttgggttttatcctgtctgtgagggaagattttaagtcagtgaagaatacaggcagctctgggaaggatgggcttgcagggaagggtccgtgccatgagctggggcaccagtcaggaggcttcctcgggaccagcaggggcataaacgtggctggatggaggcagcgcatgggaagtagagagagggatgaactttagagaatcggagtggctggaatgaataagacttggggacaaattgggagtgatgggaaggatgaggcctaagacagtgtcctgattcctgctttggaatttggaagaatgctgctgtttttacaccagagagggatgacaggaggaatttatttctgcagacatttgttgaaggggactctgtggtcagaagacctgctccctgccccctgggagctccctgcctgaaagggtggggagatggaattgtcccaggcacagtgagagactcactccaggcacagaagtactcagaggaggaattaagtctgggtgcagtcggggaaggcttattgagttggtgacactgctgtagcattttaaaaatggtcatggcagtggaagatggacatttccagatggaccagggaggtagggggaattccggagagaagggacagcttgggcaaaggcttggagaggagaaagagcatgtgcctctccctggggcaccaatctgcaaggatgaggctgagtttctatggggaggtggagtttcagatgctggcagggctttgcaggtcttgagctctgaggagcagtcctggaagagagagtcacgggccatcggagtgcagttggtacctgaatgtctgagaggagaagggcttgcctatgagaaggtagagagagaaaagggctgagcttgggactttagagaccatggccagaagaagagaagcccctgaagtggaccatggggggcaggccaagaggcagaaggaaaacctggagagtgggggccatggagcccagaggagggaggttttaggaaggaggcggctgacgagagggctggaggctgagttggcaagggtggtaagcattggggcagacggggtatcagaagggggactggggtgtaactgtggtggcaaggtctgcagggccaggctctggggacccagctgtgatagagaggagatggggcttggtccagcaggctgtgacaagttttggggagttttagagtagaggaacaacatgccaagagccaggccttgagaatctttatctggcaggaggagtgtcatgggttggaaggaggggacaaaggtagggagaccatttgggaacatagctgtggtccagtgagggacactgagggctagacctaatgctgtgaagaagagggagaattgccggggtgacatcgtagcaataaagttgatagatttgctgagagactgcataggagaatgaggaatgaaaaaatgaccatgtggttttgaccttggtaagccgaatggtttcaccattaatatagagaggccatggctggcctggtggctcatgcctgtaatctcagtgctttggaagacaaaggcgggaggatcgcttgacgccaggagttgagactgcagtgagcaatgatcaccactgcactctagaccgggtgacagagtgagaccctgtctctgtacgtacacacacacacacacacacacacacacacacacatacagagagagcaagagagagagaggcaagatggaaggctggttgaggggagaagctgatgaattaagagttcaggcgagttgaaaggacctgtggcctgtgcaccatgcagttaaagatgctcatcaagctaccaggagaggccagcactggctcagagagccaggtgtgttagcaatggaagtctgaaaccataaatcggatgtattcttcagtcagagcaagtccaagagaagggacgtgggcctggcatgggtgtagaagcagaaccttgattctgtttcctgcttctctgattttaatttgatttgatctgtgggagagatgacagagcagtccttgccccaggggagcatgaagcttaagagaaagccctgcttgcttggctgattgatgggctggttgatctgcactcttccttgttgtagaaaggacttaaggcatcttacagcgtgaaacaagccaggacagcatgaacgtgggagaaagaggaaaggaaaacaaggtggggccaaaacaacagtaaaaatgcacggaaaattgatgacagtgattttctagaagccacctggaaatgtaaccacctagaaaagggaaatgtagttcgtcatataatcttgtgttcataacattaacatttgcccaggagaagtatggctcttcttggtctctgctaggtatactagctacgtgaccttaggaaagtcttgtaatctcagagcatctgtttcctcatctgtaaaatggactcaatcctgtccatcccactgggttgttgggaaggtagaaggaggggttgggtgtgaagctccgagttcggtgcctgcctgcctatgtgtcagtatgtggggaatgagtgttgtgccatgcccagcccagcaagccacgggatcagcatgaattattaaggccagccactggttctggaaagcagggtcatccctggccacctctctggtcactgccaagcaccttgtgtcaaagatttggcttggtctccatgagtttgccatacagccaggattgcctatcatgccatctgccttcgcatcacagtacaaacctatgttgatgcatcatgggccaattggccaggcattctctaattccatcctctgtggccagaccctggttttggcagctccagcgtaaagttgtattttcatgttcctaccaattttgaagaaatagtttcatcttagcagatgaacacaagttagttctgctgttttattttacttgcaatacaggtctgatgttctgcatttacaggtcttatttaaagtggacttctttttaatgctttctttagggtgaaccgtatctgaacaccgcatatgggcacatgatctgctactgggatggctctgctcattatctgatgtacctggtgatggtggcagccatagcatgggagtaagtcagttcacctggtgtgtgcctttgccaccttagcaaccgataagcgggtatgtaaggaaacgttatgcatagaggcaaatacacaagcaggtatactggacatgaatataagttccatgggtgcacgtcagacgtggctttatcctccttgtaccactgccttttgaatatgtccttctgaattgctccctagcatggtgacagctcgggcagaccctttaagctttctgattatgttgtcttacaagaataatttttattttcagcaattaaagctaagcacatcttaaacttcatttcaaaacttcaaaatttccaaacagcaatctcatttcggttcaaagcttctgtccttccccagatcaggcacagctctgcggcttggctcgcactaaggcttggctacatggcttgtccgttcactcctcctgtctcactctgcggctggccccttggcagtggatgtgtatgtacaagggattaaaggaacaggagccgagtctgatgtgaaaggtgctggtttttgggtattggtacccccatcatgatatgctagcttggtcttgggaggcacacatgtgagttctttagagaccccaaccacaggagcttctgcattgcactaatccctgaagtgaacgacgtgctcttgggctgaatttctgcccatggtggcacacccacagctttttttctgctggggcccctgtaacccagaaggtacaccctttggggaggggtcttttcaaaacatttcaagtccggccatcttctcaggcctccacttgcttctgggttacagaaagtcatgcattcttgccccatacaaggttgaaatgtagtttacccaagtatctccctcactcccaacatgcactcaaggtcagctccagctaattctttttttttttttttttttttgagacaggctggagtgcaatggcacaatctcagctcactgcaatctccgcctcccaggttcaagcgattctcaggcctcagctgggactacaggcgtgtgtcactatacccgcaaattttgtatttttagtacacaaatctaaacatttttttcaccatgttggccaggctggtctcaaactcctgacctctggtgatctgcccgcctcagcctcccaaagtgctgggattacaggcgtgaaccaccgtgcccggctccagctcattcttatctgttctcctgcttataatcccagtcattatgaatgggcctcttggggtctggttacatttggcttgagggcgggggtggggcaggacgcacacagtattctcgtttcccttcagagaatttccttttgaatttctcatagcctgttacatagtgtggagtttgggttattggggttatcaattgaaggaactttttttttttattttgagacggagtctcgctctgtcacccaggctggagtgcagtggtgcgatcttggctcgctgtaacctctgcctcccaggttcaaccatttctcctgcctcagcctcccaagtagctggaattacaggtgcatgccaccatgcccagctaattttttttttttttttgtacttttagtagagatggcgtttcaccatgttggccaggctggtttcaaactcctgacctcaagtgatctgcccacctcagcttctcaaagtgctgggattacaggcatgagccaccatgctcggcctgaaggaagtttttgtcagcattgaagatttggggtatatgtctagcagctcctttgcaacatggggtacatgtcacttgtcttcacctttggggctttggccaaaattctgtgaccccagaaaaagtccatttaacattatcattgtaagtataactcatacttataatgattaaaaatatggatccaatttcatttcttctttcaactttctttttcctttcatgctgttgagtttcacacacaatagggaaatgcaggagtcctgtggcagggatgatcatgttgtagtttaacagaagacatagcaggcgtaatttcctatttaaaaggacacgaagaaggttctatagtatatcacatggcaatgaagttacataaccagggctccttgtgtttgatttattcctctcaattcaatatgttttgattgatgtactttactagtttgaatacaaaataatattgaagatcattttttgcttagtattctaagacaaacataccaagtcaagatttttttgttgttgttgttacagggaaacttatagaaccattggcctatattgggttggatctattattatgagtgttgttgtttttgtgccaggaaacattgtaggtaagaaactttatcttaaagttcactttccttttctaaaacaatggggcttgtttttaaatagagaagctcttttagttataatagaaccaagtgattccaagcttactaaaaacctgttttgcagaataattcctttttctcacctttaaaaaaagtactttttaagaagtgctttgagcaattttcagatgtgtgcattgaacaatttggcagtcaagttatcagggattcctgtttttttagaaggatcttgagggagtgagtatggtgtttatggctatatttagtgtgcaaatatgttaactcctgacacactatgagaactccaaaaatgtacttggaaattacaagtacattattaatgtatgcaggaaatcaggatatataggtagatagatagatagatagatatagatatagggagatagatatatacaaacatatatagatacctatctagatgtattttttgagacaggatctcactctgttgcccaggctggcttgcagtggtacagccatagctcactgcagccttgatctcctgggctcaagcagattactgtagataggacatgcctgttaatacacatctagtattttaaattgacctttttaatttggcctcattaaaaatattgtctggcccatagcaaaattttagatgacctgagatggggaggtatcctaaatattacttgtgttagatatgcttttggtaacttctttctctttctctcttttaaatagggaagtatggaacacgaatttgccctgcttttttcttaagcataccatatacttgtcttcctgtctgggctggtttcagaatctataatcagccatcagaaaattataattacccctcaaaggtgattttattaagctttgatgtaccctgttctcaaactcatagggttctttcgcatccactggccactgaattgaaccatgcctctgtggactggagcatttggggcatccaaacagtgcgactgttttgattatgtagcattagcttacgtattaattaatgtaggcaagaaggtctgtttctgtctgaatacatctgcttctgttggcaaggccatactttggggagcttcctgtgccagtggtcacactggctctaactatcagattctgcattagtgtgtcaagtgaagtccatagtgtgtggttcatctaggattgttaatggcctggacgttgaacacctgggttcctctgtgacacctatgcatttactaccccaagaggacactggagggatactgctcctcaaggtagtctacacagccatacaatcttgactccagagatccaggcccatagagactggctacaggacatctgagacacctcccttccattcacagccaaggtagtcaaggtgaaacagcactggcctggcagatactctgttaaggccttcatttctaagctagtttctctctgtttcttttacttttctaggtattagatcatttagcaagatcttttaagcaaaactgatatatgaaaatatgaattactagagataatcagaatacgactattcattttacaaaagattttcagtataattcattaaaatacattttaattgacaaatacttcatttgtaaacatttagacaccttctatgtaaactcaggctggcacactgacagctggtactaacttccctctgaggaaagaggtggctgttaaaaagaaaaagcaaatagtcagtccacccttagtcccagctccactgcttttaaaggttccatgtcagtgtgtcaacagagtaggtatgccatgaggcatgcagaattacttatcattatttttaatgtgaaaacacagtgacagccagggccaagcaggcattgtcatacagtgctgacagaaacataaattcagaattgctctgcaaagcaatttggcaatgttatcaaccttaataattctggaacccaataattctgctcctagagccctatcttcaggaaatcatcacacagataccaccaaagatttacaaagttgttcatcattacattaagtataacagtgaaaaatgcctaaatatccaacagtgggagaatggctaaagtgtggtgtttccatatggtattcagtttgagaaaatttttaaacatgtgggaaagtgcttataatataggcagatgttgagagcaaaaagaacaaatacagaattgtttatatacaggaataattttatatataaaattgttcctaattttgtgaaaaatgtagatatatgtgtgtgtatatatgtatgttgtgtgtatgtaactatatctatttacatgtattactggaaaagtataccaacggttaatagtggtgtggcaggtttatggtttacctttaaaatttattatcattaaaatgtcatttcaagaaaaaaagtggactcatagagctacaagagcccttcgagagatcatttagcccaaattcttcatttcacagataaggaaattgagacttgaggaaggaaatgattttcctaaagttccatggccagtgatttatgatataaattgtgcatcttcaaaattctcttatccatcatcatgacatttaatgtttcagatttcagattcttctttggcactttgggcctgctctttaggtacaaactctattttaggttattcaagaagcccaagcgaaagacctgctgagaagaccatttgatttaatgttggttgtgtgtctcctcctggcaactggattttgcctgttcagaggtttggtaagcataacagatcataataacgtaacattgtgatactactcacatttccaaatggaaaaaaacttagaaatatgtttttgtttttccatcagacttcttagcaaactaacaaaccattcctcccatcaaagcctggagccctggacctgcttcctgctgctcccaaccccagcctcctgctgtcacctcctcctgtccttagatcaagctctactcagaagcatcttcctccccgttttagggcatctaaaaaatcagccatcagagtctctcttttttattcttttgatgtttctgatttaaatgtaaatatctttggtaaggatggcaccctaggactgcaacacaactgtggcacagagcatccctgtgttctcaggagtaggggcaatggggttgaggaaggcgtaccagttcaacaattcacgtgtatgtagggtcatgggaatgtctcactggtaagagtagtgttgagtaaattcatctcacgcctggagtctttgtattgatgtgactgaaatacattaagggcacatgggcatttcatgttttctattttctctttattaatattttactgcagaggttaggaaaaagactcacaggctttgtagttagaatcctggccacttactagctgtgtggccttggaaaaactacttaacctcttggactctgttttcctctctgtaaaataacactacctaccttaacagtattgttttggagattaaataatgtacatcaaacacttggtagaggctcttatacatagtaaatgattactgttaggatttttattgatcagtgatccttcacaatgccccaatttgatgatttcttcttagtagaaatgaatttgggaagtttagaattatattgttaattatattcagcttcagtgacaatttctattcgaagcctgttggcgcgcgtaacagttggacagtagagtggcaagtgtaagcccatgcaggtgacttttatcatttcagggtcttgggctactgggggcctgtgcagcaggctgggttcagggtgagaagctgttttaagagttatctttatctgtgaaatgtcaagaaactttctggaggagagctggctaacaggaggaggggcatggggaagagaagtaaagaaggcaaggccatagctttgcttagaccacagggccactgaaactgttctttggttagtttgttgtaattcttaaagttcaaacaacaaaaaatagtgggccccacctgtattcttgcacggccatatccccttccctgtgcacgagaaaaatgtgtgcatgtgtgggggtgcatgcaaggtgggtagggcttttggattggggccatttttaccaactctgtcattggcctgtgttcatatatgccatctaggtgggacaacatttatggccaaagacatgaggaatggtgcctgaggggaggaaggtgactcagaggggacctagtaaagtgccaaaaagactttccagcaagaggaccctgctttcaaatcatcttttactgcctccaaaggccatatacgctatgatgcactggagacaggaaggtgctattttcaaatcttgcaatgcatagtaagatgaatttggtgtagaaatatacttttcttcctgtagggaatagggggctagttatttccaagaaaagtgaaactcataatttaaagcaagctgtgctttggctagccaaacctagatacttaaactctgaatatctgaaaaatacccaagaatagggcattagtttccatttcctgcaccataattaacctttgcttagtctccttagaacaaatctgcaaaatatttccatcattgatgagcctctacaatgcatacgttttgttaaacagcaaagcagcttgtgactaaacctggcacatttagccttatcagcaaacctaagaaccagatgtgattgtatttttataatgagtttatttttgtccttagattgctttggattgcccatctgagctctgccgattatatacgcaatttcaagagccctatctaaaggatcctgctgcttatcctaaaattcaggtcaagtagttatgaagcctaagatttttctaaaattaattttctttttaaaaaatgggtcccagctgggtgcggtggctcacgcctgtaatcccagcactttgggaggccgaggcaggttgatcacgaggtcaggagtttgaaaccagcctggccagcatggtgaaaccccatctctactgaaaaaatacaaaaaactagccgggcatggtggcacatgcctgtaatcccagctactcaggaggctgaggcaggagaattgcttgaacccgggaggtggaggttgcagtgagccgagattgcgccactgcactccagcctgagtgacagagtgagactccacctaaaaaaataaataaataaaaataaaagtaaaaaaaaaaaaagagtcccatataggaaataggaattaatattttcaaagatgaaaatgtttacttttttgtactttttagtcaggccaagttaactgccaatttgctgatgatgttatttctctgttcaatacagatgctggcatatatgttctattctgttccttactttgtgactgcactgtatggcttagtggttcctggatgttcctggatgcctgacatcacattgatacatgctggaggtctggctcaggtactaagaatattctgttgagaaggtttacttgtggtctaggtgtcaattgttgaatatatgaaaaacttctctgctcagtgttttagactaggagatagctattagacatgtcaccttttgttttgcagttcttcagaagacatttctgcaagtacattttatttcaatctcacaataactatatggtagatgtgccatccagttacacagatgaggaagttatctgtggtccagtgaagttaaatgatttgcccaaggttacacacccagcatgtggcattgttgttttattggactgtttcacaatctctgaataccatggctactaaaaaaggattgagagctgtcaccttcaaaatgtccatccaaatttaagacttcagaattccactacgctatgctatacagaaccagggaaactggtttaaaaaatgttctgggcctgtcatttcattccttttccgctggcaccttgccaaatatttggcctagagtaggtgttcagtgaatgcttactgcgtttaactgaaaatgaaattatctatggagaacttcacacataacataaagcacatttttacaagataattagcaaaacaaatcaatcttctgaacaaggaagaaaattaatttttcttactagaaataaaacaaatgaacttatcatttaaaaacattagcttcatcttgttcttttcaagcagttataagaatgaggttcatctagaaactgtaggcttgtacagtcaattatatgcatggtataataatcatgatcgtaagacatactagaattcacacggttgaaaaatatagtatttaaggggtcaatgcattaaatcctttcagtttgaggtaattcttaattataaaattagcatagtagtatcgaaaaagttgatgtagcatccagaagtaatggttcctgtcctttccttgaggggcttaagaaggaagagaactaacatttattgctctttgctggttgtttttcctttgcagacctctaaatacctgattcctcagtccttggggtttatttctgtattttaggtctttatctttgtatctttcaataccaactataagctgataacttccagttttctaccttcggcccacaccgttcccagactcctgtatttcattccaaactcagtctttttacttgcatgcctcactagcacctcagatttaatatataaaataggacctgatcctccccacaacctctcttccattttttcattatctgtttaaatagtccaattgcatccagcaactcaagccagaaacttggagtaattatttacactcctcatcctctacatctagaccaccactaagtccttttttttttcttttaaagagacagggtcttgctccatctcccaggctggagtgtgatggcacagtcatagctcaccgcagcctcggactcctaggctcaagcaatcctcctgcctctgtctccagagtagctgggactacagacatacaccaccgcacacagctaatttttaaattttttaaagagatgggatcttattttgttgcccagcttattctcaaatgcctgcttcaagtaatcctcctgcctcagcctcccaaagtggtaggattacaggtgtgagccaccacacccaaccaggtccagttagttttactccagtgattctccaacccattttttttttccagctccgctgcccctacactagtctgagctctcattaccttacttcatgccaggcaaaccacgttaaaagttttacttacctatttgtctaaggataggctatgtgctctgctgctgtaacaaatactcagagtagcttaacacaattaaaattttaattcttttttatgcaaagatcatgtgggatattttcaaggtccaggcctggcaccaggtcaactgaggggaggctggtgactgtggtcttcctgcctgcctcagaataaacagcacaatggacacataataatatcttttgtaatagctctgggaaaaaaaccccaatttaaagatgaggaggctgaggctcagtccacctgaaattatttgcctaagattacagttattaaatggcagaataggtttatgaaatcctgtctgactccaaagctcatattcttctccattgtgttatctcacccaccccatgcaaacaatgaactatggcacagagtcctacagcacaaaagactgtatgtagtacgaggtgctggagaaccttgtgggtggaaggcagtgacattccgagttggactctgagggccaagtggggctttattaggctgagcctctccagggaataacccagggaaacactgaggtgtgggcatatgcagcaggtctgagggcagagtaagccttgcctttttttttggcctggttcctctgccttattctcctgtatccttcagaacagatggccgcatacccacttcactcttgccagccctttctttagaggattagactgttcagtttgacagctgttcagtttgacacctattacctgtgtcaattgtgctttgcctgcacaatcaggcctcctctgcctgccatgtgcctggtcggcctggtaccagtccctgatgcaggaatgctaagtgtcatcagccagcaggctggttaaagagaccagatgttggacctggtcaagtctcaggagacaaatggaaacagcaggaaaacctaggcaaaagcctagtcacatggccagggtcaacagtcaggaagcttaggaaggtcatagcttagaggaaaatgggtgtggtaagcctgtagcaataagacaaaccctaatctgttggtgaagctaagcttgcaggtgggcacttattactccagccaagtggttctgagaagggcagtgtggactacagagcagctggcagccgcaggggcattacctcattcatgtcagacgtcaggcatcctggggcttatccatcactgcccagttgataaggcagcctgaagcccctctcttgatggtgaatgcccagatccagagcctaaggctaaggaccagatcctgtaaatgtcagaaggatgtttctcccagcccagcaggtgaagacagactgagtaaagaattatgggtctgattcccacagctcttggctgagctttaatatctacccacttatagtgtgtaggctaaggaaaagttagaagccatgccgcaacaaaacaatagatatgaccagaatactgaattacgttatttgttttgtacttagcaaatactcgcttatgaaatggagtctcatcttatgggagtatctgacacattcatcacagaaagcactctccagcaaggcacggtggctcacacctgtaatcccagcactttgggagcccgaggtgggtggactgcttgaagtcaggagtttgaaaccagcctgggcaacatggtaaaaccccatctctacaaaaaatacaaaaattaggctggcgtgatggcatatgcctgcagtcccagctactaggaaggctgaggtgggaggatcacttgaaccaggaggcagaggttgcagtgagccgagactgtgtcactgcactctccagcccaggtgacagagagagaccctgtctctcccaccaccacaaaaaaacaaaacaaaacaaaaataggcatttttctgtaactttaatcagcatctttgcttgctaaaattgccattcttatttagaaaccttatgcattcatgatcccactaactttactaaaacttacttttactgaaacatctagtaaactctcaagaatctatgcaacttagtaagggaaaaaaaaaccacctttgaaaagttctagatcagtataggccaatggaagaaatattgagtagtggccaggcgcagtggctcacacatgtaaccctagcactttgggaggaccaggcaggtggatcacctgaggtcaggagtttgagaccagcctggccaacatgacgaaaccccgtctctactaaaaatacaaaaaattagctgggtgtggtggtgggcatctataatcccagctacttgggaggctgaggcaggagaatcgcttgaacctgggaggcagaggctgcagtgtgccaagatcacgcccactacactgcagcctgggtgacagagcaagactgtctcaaaaaaaagaaagaaaaaagagtgagtagttattggggccttgatttcagaccatgtaggagtctgccaaatctgctgccttcagaaatcaaaagatcaaggaaagagtaaaagaagattgaataaaatgaaaccaggacacattttagaccaaagagttccactggggacttactcataacccaggtatcttttcatataaaatgctaaccataggattaaagctgcaagtgtaatctgaaaggcattataggctgcttagatccacttattagcatttcctatcaattgaagcattttctctgctaaaatatcaatgaaaatgaaaaaaagccaaagccagtagagttcatatagttaggaacataagctctggaggtgaactggttcagattctagcctgttgctgatgagcacaatgaccttggctactttacctctctgatcctcagtttcctcttctgtaaagtgaggataataacagtagctttctcatggaattgctgttagggttggatgaggtaatacatgtaaagggcttaaaacagtgtctggcacataacagctatgtaaccctttgttgctactattactggtagaagattcccagtaagaatttggagatatgccttatgttgttccgaagattaacctgaagacaaactaattaaattaagtgtattgtatataattaccaagaaaacaaagaaactgggtgaaagctttgggacagactcaccatgggcttggtaaggagcctgccatcccacagccagcgaaggaggttcagttacttcagtcaggtgctgccctcagactctctaactccctggctatgtaggtgctatgtcatgtctttttctcacaaagagatatggaaacttacgtgtgaataatttggttgtgaagagtttactgaagtaaatttatcattttttttttaacttgagacagggtcttgctatgttgcccaggctggtctcaaactcctggactcaagtgaccctcccgccttggcatcccaaagtgctgggattataggtatgagccaccacgctcagcctggaagtaaatttcatacggtttttccctcatggagacgttaagaaaaatctgaaagtaacagtttaggaagaacacggatagttgggatactaatgcaaatcttgttttcttcatttgcttctggtgtgattcattgctaaacatctttatttagtattaaattatactgatttaacatcttttatgtacttatcctttcatggagacactcacagtaaaaaggtcaaaaggtcaagagaatctaaaaacaaagggcccagattttctacagtcgagcaccagatcatgaatgggtatttcagttttgtacttgtgtctacagaatagccccaagtgcttgacactgtctaagcatgtcacaaacatcacctcactgaaccctcataacaacctatgaggtgggttccacacctcacccgaggccatacggctggtttgtggtggagctgtgatttgactctggatgtctagttccaaagtcagtgttctgaaccaatgaactatgttgctcagaaaactctaagaaaagataacacagttctagattagctatttatactgtattagcaaaagaccctggctatcatcccaatggtcacctaagttttctgcctataacattcacatggacatataacactctttcagttcctccttgtggaaccacgattaacttttttagttatcctttacagattgtctctatacatgtaagaaaacagctcttaaaatttaacctttgttcaccttattgtctcatttgccattccaatcatccattcttaaaaaaaaatcagagtatatctcttaattatttctgtaaggtgaaaatgatttagaatgaagtggaagaaaaattattagggactcaacctcacattgctaaattctggagaaatttctaggatcaacaactcatatctgtaatcctgggcctcctgttaattcagcagcattgagttcactgagccacctgaccccagcacaggctcaggctgagctcttcaggtcctgccatgagaggccttgtgctgctgggaacatcacccaggagaaaacctgcagccctttattagctatgtgcttgggaagagaaacctcctcaggtgagactgtttttctgaacttcagaaccctgaacacttaacatcctatgccttaggagaaagctatggtcaggtgctcactcagctggaagtgtggccaccataagtacatccattaggactatgagcagtactgggagctgcacaccactggccttagagttcttctctcacatacaaatgcctcttttgattatgaatgttaaaatttttgtgccttgtttaataattctgaataaagaggcctactaaaatacatacaaaactagagaaatgctttgtagaccctttttgtattttgacagtcacaagtccattgttgttgaacgtttattgagctctaacaatgtgacaggtgccacacaaaacattagacacagtacctgcccagtgggcttacaatctaatctaaggacatgaatctttttttttttttaaagacagagtctcactctgtcacccaggctggagtgcagtggcacaatcttggctcactgcaacctccactccccgggttcaagcaattctcctgcctcagcctcccgagcagctgagattacaggcgtctgccaccacgcccggctaattttttgtattttttagtagagatggggtttcactatgttggccaggctcgtcttgaactcctgacctcaggtgatccacccgccttggcctcccaaagtactgggattacaggcgtgagccactgcgcccggccatgattcacttaatgttgccatgagtttgctgttcatgaaagtgaggtattaactgcactggttagtgcaggaaaagagcctacggaatcactgactttttacacaggctcccctatgcaagtaggcacaactgctcatatttattctctcaaagtatggttggcatttccccaaatttggtgattttgtgatgtgtacaagtatctataaagacagaaccaccaaacccagatttctgagaaccagggatcaaatgtggcttccagtccagagaaaatgcttggttatatattcagaaaaacactattattcaaaacaggccctaaggaaaaacagtatgggagccatgctcctgctcagagttcctagaatgtccagaaagcacctcctcagggcagccctgaaagtgccctttactctcaaggcattttgtcctcagagcccagagatgcatatacatttgctgggttctgcctgggcatctacccaggggagttgtatctgagggccgagtcctctcagtgcctcatggatcacaatgtagacaatccacgtgctggtccttggcaatacatcatgctaatttaatttatatctccagagtagcaaaaatgtaccacaggtctccagaatatatcaggaatttgtaaaaatgcagcccattaaaatatctgccactgataaaaaattcataaagatgctgcttaaaaaaacttgtccttttcttgtcatggtgaagtcaagtaagtaacacctttatctgtgaaatcactcagcagaataaattggtttcatatggaagaaatgtaaaataacttatatgtatttaaagcaaattatctagttcttcattcttgttacttctatgccttctctatagtgcagtcttttgtctctttgatcctgatgaactgataatttactacttattacatttagattcccaatcctttattcatgtgtatcttgaatttcagcaagatatgaaaatgcagactccaggggtacattttgtaatgatacaagccttctgaggaaattttctgacaggagcttttaatcctgctgtggtctgttttaccctttccaatacggttttcctctgtgcttgcgaaaaatatcaaaaaagaccaattggcacattctgaatgtgttttctgaataagtatataagtagagagggaggccattttgcaaatgcggataatgctgacatgtcgtacttctaaataaattataatttgatttaaaaaggttgcctgcatgtacatttgccattttacaaagagcaaccgtactcctacctccacccaagttggtaacaaccttatcttacaaacaacccttaatattttaaaagctgcagaaaaaacaaatacatgaataaatgaataaacaaaaaacacatagggaaagggtatgagctcttgctgcaaggagtagatgaaagactgataaatgaagctgaggtccccccagtgcttccctttcaatagtttatgctaaaaatatttgttttttaaaactctgcgctttcttcatttttattggaacgcaatttgtgaaccacaactgagtctgtatgcaggatctccagaacgcaaatcagaaaaaaatttgagattttattcagatttttctattagattgagccactaatgttcggtaaggggcacttgatggttaaaaaacacaactggcatgataaaactacactaaataatatctactttatttgaacagtcatatcaagaatggccctaaatttaatcaaggactaaatttaatgaaagactctgacattaaagactctggattgtttgaaggtattttgcctgcaggtgagactggttttgagggcacagaaacgtagcctgaatgaaccattcagaactcatcatgcatccaactgaacacgtttcatgcttactcaattttttttttttaaatgcaacaggctcagttttctcacattggtgcatctcttcatgctagaactgcttatgtctacagagtccctgaagaagcaaaaatcctttttttagcattaaacatagcatatggagttcttcctcagctcttggcctatcgttgtatctacaaaccagagttcttcataaaaacaaaggcagaagaaaaagtggaataaaaatattacttcatgttcctcctttctaaattactaacttttgttatactggtactgatattttgtcccatttcactctcttctcatacgtgagtacttaagaatatgtacattcttgctctgcactgtatgtgtgagctatatggtattgtgtaaattttttttgaaggaaaatggaaattcttgagaaacagtttgtttaaagaaatatattcaaaatcatttgtgaataaacttgatcatccatctcaatattgtttgacatataaaataattataagtgtaaaaaattacaatttagtgccaacagtagtgagcatgaaatgaaactattcaaaagagaatatggcctgtgcatattaaaaaattcaaaacagtgaatgcagactggaggagtaacttttgcaaataagatgaatatgcttcattattaaactcaatataaaaggcaaatcatcagaatatttttaaatgttgtttgaaaaatgttttcccaaggaaagtttattatttgctgctgtttcaagaaaattacttttactaaatttttttgtgtgaatttaaacagctaaatagggatcagtaactttatctctatccttaatgaacatttgttttattggtggctggaaatatttctattgtatttctgtgtatatttttaataaaattatttttggcctcttataaagacaaatcttattaaatttgaaacatttcatatatacacataaaa

SEQ ID NO: 14515 - DNA, 1638 bp, Homo sapiens
cggctgaggcgcctcgaagggcaagcgccaagggggcgcgggcgccgccggaagctggggcggggcgcccagcgggatgcggtgaagggcgagcggcgcggcggctgcgatgagtgcctctgcggccaccggggtcttcgtgctgtccctctcggccatcccggtcacctatgtcttcaaccacctggcggcccagcatgattcctggactattgtaggggttgctgccctcatcctgttcctggtagcactgctggctcgtgtcctcgtcaaaagaaaaccaccccgggacccactgttctatgtgtatgcagtttttggatttaccagcgtggtgaacctcatcataggactggagcaagatggaatcattgacgggttcatgacacactacttgagagagggtgaaccgtatctgaacaccgcatatgggcacatgatctgctactgggatggctctgctcattatctgatgtacctggtgatggtggcagccatagcatgggaggaaacttatagaaccattggcctatattgggttggatctattattatgagtgttgttgtttttgtgccaggaaacattgtagatgctggcatatatgttctattctgttccttactttgtgactgcactgtatggcttagtggttcctggatgttcctggatgcctgacatcacattgatacatgctggaggtctggctcaggctcagttttctcacattggtgcatctcttcatgctagaactgcttatgtctacagagtccctgaagaagcaaaaatcctttttttagcattaaacatagcatatggagttcttcctcagctcttggcctatcgttgtatctacaaaccagagttcttcataaaaacaaaggcagaagaaaaagtggaataaaaatattacttcatgttcctcctttctaaattactaacttttgttatactggtactgatattttgtcccatttcactctcttctcatacgtgagtacttaagaatatgtacattcttgctctgcactgtatgtgtgagctatatggtattgtgtaaattttttttgaaggaaaatggaaattcttgagaaacagtttgtttaaagaaatatattcaaaatcatttgtgaataaacttgatcatccatctcaatattgtttgacatataaaataattataagtgtaaaaaattacaatttagtgccaacagtagtgagcatgaaatgaaactattcaaaagagaatatggcctgtgcatattaaaaaattcaaaacagtgaatgcagactggaggagtaacttttgcaaataagatgaatatgcttcattattaaactcaatataaaaggcaaatcatcagaatatttttaaatgttgtttgaaaaatgttttcccaaggaaagtttattatttgctgctgtttcaagaaaattacttttactaaatttttttgtgtgaatttaaacagctaaatagggatcagtaactttatctctatccttaatgaacatttgttttattggtggctggaaatatttctattgtatttctgtgtatatttttaataaaattatttttggcctcttataaagacaaatcttattaaatttgaaacatttcatatatacacataaaa

SEQ ID NO: 14516 - DNA, 17451 bp, Homo sapiens
tgtatggcttagtggttcctggatgttcctggatgcctgacatcacattgatacatgctggaggtctggctcaggtactaagaatattctgttgagaaggtttacttgtggtctaggtgtcaattgttgaatatatgaaaaacttctctgctcagtgttttagactaggagatagctattagacatgtcaccttttgttttgcagttcttcagaagacatttctgcaagtacattttatttcaatctcacaataactatatggtagatgtgccatccagttacacagatgaggaagttatctgtggtccagtgaagttaaatgatttgcccaaggttacacacccagcatgtggcattgttgttttattggactgtttcacaatctctgaataccatggctactaaaaaaggattgagagctgtcaccttcaaaatgtccatccaaatttaagacttcagaattccactacgctatgctatacagaaccagggaaactggtttaaaaaatgttctgggcctgtcatttcattccttttccgctggcaccttgccaaatatttggcctagagtaggtgttcagtgaatgcttactgcgtttaactgaaaatgaaattatctatggagaacttcacacataacataaagcacatttttacaagataattagcaaaacaaatcaatcttctgaacaaggaagaaaattaatttttcttactagaaataaaacaaatgaacttatcatttaaaaacattagcttcatcttgttcttttcaagcagttataagaatgaggttcatctagaaactgtaggcttgtacagtcaattatatgcatggtataataatcatgatcgtaagacatactagaattcacacggttgaaaaatatagtatttaaggggtcaatgcattaaatcctttcagtttgaggtaattcttaattataaaattagcatagtagtatcgaaaaagttgatgtagcatccagaagtaatggttcctgtcctttccttgaggggcttaagaaggaagagaactaacatttattgctctttgctggttgtttttcctttgcagacctctaaatacctgattcctcagtccttggggtttatttctgtattttaggtctttatctttgtatctttcaataccaactataagctgataacttccagttttctaccttcggcccacaccgttcccagactcctgtatttcattccaaactcagtctttttacttgcatgcctcactagcacctcagatttaatatataaaataggacctgatcctccccacaacctctcttccattttttcattatctgtttaaatagtccaattgcatccagcaactcaagccagaaacttggagtaattatttacactcctcatcctctacatctagaccaccactaagtccttttttttttcttttaaagagacagggtcttgctccatctcccaggctggagtgtgatggcacagtcatagctcaccgcagcctcggactcctaggctcaagcaatcctcctgcctctgtctccagagtagctgggactacagacatacaccaccgcacacagctaatttttaaattttttaaagagatgggatcttattttgttgcccagcttattctcaaatgcctgcttcaagtaatcctcctgcctcagcctcccaaagtggtaggattacaggtgtgagccaccacacccaaccaggtccagttagttttactccagtgattctccaacccattttttttttccagctccgctgcccctacactagtctgagctctcattaccttacttcatgccaggcaaaccacgttaaaagttttacttacctatttgtctaaggataggctatgtgctctgctgctgtaacaaatactcagagtagcttaacacaattaaaattttaattcttttttatgcaaagatcatgtgggatattttcaaggtccaggcctggcaccaggtcaactgaggggaggctggtgactgtggtcttcctgcctgcctcagaataaacagcacaatggacacataataatatcttttgtaatagctctgggaaaaaaaccccaatttaaagatgaggaggctgaggctcagtccacctgaaattatttgcctaagattacagttattaaatggcagaataggtttatgaaatcctgtctgactccaaagctcatattcttctccattgtgttatctcacccaccccatgcaaacaatgaactatggcacagagtcctacagcacaaaagactgtatgtagtacgaggtgctggagaaccttgtgggtggaaggcagtgacattccgagttggactctgagggccaagtggggctttattaggctgagcctctccagggaataacccagggaaacactgaggtgtgggcatatgcagcaggtctgagggcagagtaagccttgcctttttttttggcctggttcctctgccttattctcctgtatccttcagaacagatggccgcatacccacttcactcttgccagccctttctttagaggattagactgttcagtttgacagctgttcagtttgacacctattacctgtgtcaattgtgctttgcctgcacaatcaggcctcctctgcctgccatgtgcctggtcggcctggtaccagtccctgatgcaggaatgctaagtgtcatcagccagcaggctggttaaagagaccagatgttggacctggtcaagtctcaggagacaaatggaaacagcaggaaaacctaggcaaaagcctagtcacatggccagggtcaacagtcaggaagcttaggaaggtcatagcttagaggaaaatgggtgtggtaagcctgtagcaataagacaaaccctaatctgttggtgaagctaagcttgcaggtgggcacttattactccagccaagtggttctgagaagggcagtgtggactacagagcagctggcagccgcaggggcattacctcattcatgtcagacgtcaggcatcctggggcttatccatcactgcccagttgataaggcagcctgaagcccctctcttgatggtgaatgcccagatccagagcctaaggctaaggaccagatcctgtaaatgtcagaaggatgtttctcccagcccagcaggtgaagacagactgagtaaagaattatgggtctgattcccacagctcttggctgagctttaatatctacccacttatagtgtgtaggctaaggaaaagttagaagccatgccgcaacaaaacaatagatatgaccagaatactgaattacgttatttgttttgtacttagcaaatactcgcttatgaaatggagtctcatcttatgggagtatctgacacattcatcacagaaagcactctccagcaaggcacggtggctcacacctgtaatcccagcactttgggagcccgaggtgggtggactgcttgaagtcaggagtttgaaaccagcctgggcaacatggtaaaaccccatctctacaaaaaatacaaaaattaggctggcgtgatggcatatgcctgcagtcccagctactaggaaggctgaggtgggaggatcacttgaaccaggaggcagaggttgcagtgagccgagactgtgtcactgcactctccagcccaggtgacagagagagaccctgtctctcccaccaccacaaaaaaacaaaacaaaacaaaaataggcatttttctgtaactttaatcagcatctttgcttgctaaaattgccattcttatttagaaaccttatgcattcatgatcccactaactttactaaaacttacttttactgaaacatctagtaaactctcaagaatctatgcaacttagtaagggaaaaaaaaaccacctttgaaaagttctagatcagtataggccaatggaagaaatattgagtagtggccaggcgcagtggctcacacatgtaaccctagcactttgggaggaccaggcaggtggatcacctgaggtcaggagtttgagaccagcctggccaacatgacgaaaccccgtctctactaaaaatacaaaaaattagctgggtgtggtggtgggcatctataatcccagctacttgggaggctgaggcaggagaatcgcttgaacctgggaggcagaggctgcagtgtgccaagatcacgcccactacactgcagcctgggtgacagagcaagactgtctcaaaaaaaagaaagaaaaaagagtgagtagttattggggccttgatttcagaccatgtaggagtctgccaaatctgctgccttcagaaatcaaaagatcaaggaaagagtaaaagaagattgaataaaatgaaaccaggacacattttagaccaaagagttccactggggacttactcataacccaggtatcttttcatataaaatgctaaccataggattaaagctgcaagtgtaatctgaaaggcattataggctgcttagatccacttattagcatttcctatcaattgaagcattttctctgctaaaatatcaatgaaaatgaaaaaaagccaaagccagtagagttcatatagttaggaacataagctctggaggtgaactggttcagattctagcctgttgctgatgagcacaatgaccttggctactttacctctctgatcctcagtttcctcttctgtaaagtgaggataataacagtagctttctcatggaattgctgttagggttggatgaggtaatacatgtaaagggcttaaaacagtgtctggcacataacagctatgtaaccctttgttgctactattactggtagaagattcccagtaagaatttggagatatgccttatgttgttccgaagattaacctgaagacaaactaattaaattaagtgtattgtatataattaccaagaaaacaaagaaactgggtgaaagctttgggacagactcaccatgggcttggtaaggagcctgccatcccacagccagcgaaggaggttcagttacttcagtcaggtgctgccctcagactctctaactccctggctatgtaggtgctatgtcatgtctttttctcacaaagagatatggaaacttacgtgtgaataatttggttgtgaagagtttactgaagtaaatttatcattttttttttaacttgagacagggtcttgctatgttgcccaggctggtctcaaactcctggactcaagtgaccctcccgccttggcatcccaaagtgctgggattataggtatgagccaccacgctcagcctggaagtaaatttcatacggtttttccctcatggagacgttaagaaaaatctgaaagtaacagtttaggaagaacacggatagttgggatactaatgcaaatcttgttttcttcatttgcttctggtgtgattcattgctaaacatctttatttagtattaaattatactgatttaacatcttttatgtacttatcctttcatggagacactcacagtaaaaaggtcaaaaggtcaagagaatctaaaaacaaagggcccagattttctacagtcgagcaccagatcatgaatgggtatttcagttttgtacttgtgtctacagaatagccccaagtgcttgacactgtctaagcatgtcacaaacatcacctcactgaaccctcataacaacctatgaggtgggttccacacctcacccgaggccatacggctggtttgtggtggagctgtgatttgactctggatgtctagttccaaagtcagtgttctgaaccaatgaactatgttgctcagaaaactctaagaaaagataacacagttctagattagctatttatactgtattagcaaaagaccctggctatcatcccaatggtcacctaagttttctgcctataacattcacatggacatataacactctttcagttcctccttgtggaaccacgattaacttttttagttatcctttacagattgtctctatacatgtaagaaaacagctcttaaaatttaacctttgttcaccttattgtctcatttgccattccaatcatccattcttaaaaaaaaatcagagtatatctcttaattatttctgtaaggtgaaaatgatttagaatgaagtggaagaaaaattattagggactcaacctcacattgctaaattctggagaaatttctaggatcaacaactcatatctgtaatcctgggcctcctgttaattcagcagcattgagttcactgagccacctgaccccagcacaggctcaggctgagctcttcaggtcctgccatgagaggccttgtgctgctgggaacatcacccaggagaaaacctgcagccctttattagctatgtgcttgggaagagaaacctcctcaggtgagactgtttttctgaacttcagaaccctgaacacttaacatcctatgccttaggagaaagctatggtcaggtgctcactcagctggaagtgtggccaccataagtacatccattaggactatgagcagtactgggagctgcacaccactggccttagagttcttctctcacatacaaatgcctcttttgattatgaatgttaaaatttttgtgccttgtttaataattctgaataaagaggcctactaaaatacatacaaaactagagaaatgctttgtagaccctttttgtattttgacagtcacaagtccattgttgttgaacgtttattgagctctaacaatgtgacaggtgccacacaaaacattagacacagtacctgcccagtgggcttacaatctaatctaaggacatgaatctttttttttttttaaagacagagtctcactctgtcacccaggctggagtgcagtggcacaatcttggctcactgcaacctccactccccgggttcaagcaattctcctgcctcagcctcccgagcagctgagattacaggcgtctgccaccacgcccggctaattttttgtattttttagtagagatggggtttcactatgttggccaggctcgtcttgaactcctgacctcaggtgatccacccgccttggcctcccaaagtactgggattacaggcgtgagccactgcgcccggccatgattcacttaatgttgccatgagtttgctgttcatgaaagtgaggtattaactgcactggttagtgcaggaaaagagcctacggaatcactgactttttacacaggctcccctatgcaagtaggcacaactgctcatatttattctctcaaagtatggttggcatttccccaaatttggtgattttgtgatgtgtacaagtatctataaagacagaaccaccaaacccagatttctgagaaccagggatcaaatgtggcttccagtccagagaaaatgcttggttatatattcagaaaaacactattattcaaaacaggccctaaggaaaaacagtatgggagccatgctcctgctcagagttcctagaatgtccagaaagcacctcctcagggcagccctgaaagtgccctttactctcaaggcattttgtcctcagagcccagagatgcatatacatttgctgggttctgcctgggcatctacccaggggagttgtatctgagggccgagtcctctcagtgcctcatggatcacaatgtagacaatccacgtgctggtccttggcaatacatcatgctaatttaatttatatctccagagtagcaaaaatgtaccacaggtctccagaatatatcaggaatttgtaaaaatgcagcccattaaaatatctgccactgataaaaaattcataaagatgctgcttaaaaaaacttgtccttttcttgtcatggtgaagtcaagtaagtaacacctttatctgtgaaatcactcagcagaataaattggtttcatatggaagaaatgtaaaataacttatatgtatttaaagcaaattatctagttcttcattcttgttacttctatgccttctctatagtgcagtcttttgtctctttgatcctgatgaactgataatttactacttattacatttagattcccaatcctttattcatgtgtatcttgaatttcagcaagatatgaaaatgcagactccaggggtacattttgtaatgatacaagccttctgaggaaattttctgacaggagcttttaatcctgctgtggtctgttttaccctttccaatacggttttcctctgtgcttgcgaaaaatatcaaaaaagaccaattggcacattctgaatgtgttttctgaataagtatataagtagagagggaggccattttgcaaatgcggataatgctgacatgtcgtacttctaaataaattataatttgatttaaaaaggttgcctgcatgtacatttgccattttacaaagagcaaccgtactcctacctccacccaagttggtaacaaccttatcttacaaacaacccttaatattttaaaagctgcagaaaaaacaaatacatgaataaatgaataaacaaaaaacacatagggaaagggtatgagctcttgctgcaaggagtagatgaaagactgataaatgaagctgaggtccccccagtgcttccctttcaatagtttatgctaaaaatatttgttttttaaaactctgcgctttcttcatttttattggaacgcaatttgtgaaccacaactgagtctgtatgcaggatctccagaacgcaaatcagaaaaaaatttgagattttattcagatttttctattagattgagccactaatgttcggtaaggggcacttgatggttaaaaaacacaactggcatgataaaactacactaaataatatctactttatttgaacagtcatatcaagaatggccctaaatttaatcaaggactaaatttaatgaaagactctgacattaaagactctggattgtttgaaggtattttgcctgcaggtgagactggttttgagggcacagaaacgtagcctgaatgaaccattcagaactcatcatgcatccaactgaacacgtttcatgcttactcaattttttttttttaaatgcaacaggctcagttttctcacattggtgcatctcttcatgctagaactgcttatgtctacagagtccctgaagaagcaaaaatcctttttttagcattaaacatagcatatggagttcttcctcagctcttggcctatcgttgtatctacaaaccagagttcttcataaaaacaaaggcagaagaaaaagtggaataaaaatattacttcatgttcctcctttctaaattactaacttttgttatactggtactgatattttgtcccatttcactctcttctcatacgtgagtacttaagaatatgtacattcttgctctgcactgtatgtgtgagctatatggtattgtgtaaattttttttgaaggaaaatggaaattcttgagaaacagtttgtttaaagaaatatattcaaaatcatttgtgaataaacttgatcatccatctcaatattgtttgacatataaaataattataagtgtaaaaaattacaatttagtgccaacagtagtgagcatgaaatgaaactattcaaaagagaatatggcctgtgcatattaaaaaattcaaaacagtgaatgcagactggaggagtaacttttgcaaataagatgaatatgcttcattattaaactcaatataaaaggcaaatcatcagaatatttttaaatgttgtttgaaaaatgttttcccaaggaaagtttattatttgctgctgtttcaagaaaattacttttactaaatttttttgtgtgaatttaaacagctaaatagggatcagtaactttatctctatccttaatgaacatttgttttattggtggctggaaatatttctattgtatttctgtgtatatttttaataaaattatttttggcctcttataaagacaaatcttattaaatttgaaacatttcatatatacacataaaacgcttttaaagaaaatttgtgagttgtatattccaattcaaaatgccatctacattccccttatgtttcagtgtgagcaatgaagaggtcttttgatgaattaaatttcattaattaaaaaatacattcaaatattcaaaattaaaaaggaccttttaaggaagaagtattagatcgacatccctactatctttttatgaacttttcatgtttgggattgtatgttgagtatactagagaaaatcagtattcactaaatgaaagaaacacaccaaaaatacaaacagccacctcctcactgtgccctggaatgataaatggactggtgctttcatacccttagctgccatcatcaccatcatcattattaacggccctaggcttttaggtctgctcacattttctcatgtttttattagctctcatcaagaaaaccaaaagaaaatgggatacaaatcaatgcatggataatatcaaattacaaaatctagggtccactgggctggtaaatatgtaagtgtaagcaaatcatgtagtcatctccccatcatcccctacagtgttttcaaataatctaaaacccagagagtgtttaaaaaaaaaaaaagaaagaaaaagaaaaaccctcacctgcacttgattctattgtcagcttgctgtgaacaatttttgctttaatatatgaattacattaatacctcacgttacatatatgaagccaaattacactaacttagtttgcttacaacctcaaatcttactcccagtacacattccaataaatttattctgtaaaaacaatacatttttttgtttttgatttttttacagtaaacttttcaactacaaaccgtgaatacgcgaaagatgttccaaggacaagcattaacaggattgataaaacccaaactgactaaatgtgttctcacaatataagctggcataaaaataaataaaattctctattatcacaatagcaacaataatgtacacataataatggtttaaggatgaatattaactattctaattgtagttccaaaagaaaacagtttattttaaaagtctacatttaaaagtcaatgctttgtctggtttcccatagggctgttgctgattccagctttaaaatgtaaagtatccaccttgagtgcttagctcaaaattgtattggcactgggaaaaaaataaatcattgcctttattttggagtaacacaaaaagactcactaacttcacatatagaaacttagtttgtgtacataacaatatgaattttgagaagtataagctgtcaactagctatttctaatacggaatagatattttacaatatggttaaactttacacatggcctcaaaactgaaggacaattttaatttcgtcttcaatataccaacgttatgtatttaggaattaattcctgggttctgtcacagagaggaaattccattcttaagcattatgttgagtggtcatctaaaaaatgttaatttatatttaactgagtgtttgatgatggtggggtcaaggcaggaaaacgatgatcataactgccttgataaaaggatcctagacatgtataagtctgcgcaaaaatcttgataatccttagtggttaagggcaacttcatgcaaccaaataacatgaaattaaatcagtaacttttaaaaaaggctaaaatgtcttttccccccgaaacacaacagagaggaatatgaataatgtacatacaaactggggttctgtcaatgacaacaaggactatgtgttggttcatatcaaatccaagaatattagacaaccaaacatataaccttcttgtggtttctcttaatatgcagcattcattatggtagttaggtctgtaaaaaaaaaaaaaagaaagaaaacaagcctttagatgatttaggatactaacaatgagagctatccacacctagatagtacataattgggttttctgaaattttaatatgcactgcagcattaacaatacttactgagcaagagcagcttctgtggctttgctttagacctgtcagtgcaaaaagttaaaggaaatcctagggtatttttagtgtcccatagaaaaaaattataaaccttgtctactgtctgttaggacagagtgcagcagtgcacattctacaattctaggactatgtttattgctggaatacatcatcagtggagaaattgatataatctatctttgtgaggacattcttcagaaagaaaggtaagctgtgtaaaatttaaaaagcacttagagtgtgcaccaattaatcttcagaatatttataacttaattacttgtgacacatagctcaaacaaatgtagaagttaatcatgatgtacaaagtctctgacttcttgcttttaaaaaaaacataaagaataagaggaagcctagatttcttttaaaatttagatggcatccgtgtgacaaacagaaaataaaacatttgtttcataaaagaattatgtttctatttgggtcccactttaaattgtgtctggttctatttccccaaaaggatgctattttttccccctcatcattaacccaaatatattaaaccccctagtaataccctcatgggatgaatgaaagagggaactcagccctcaaatattttttctgaaaacagcctgcttccactcttaatttcactaaatgaatgaacatgtttgtaagcacatgtgcacactgatgggtatgttctcattcagacagcccaacatgtatactaaatggtatatattataataaacgattccaggaccttcaaaggagagagagttaccaaaacttccatccccctaagatggcagaaatatactttttatccttctgtccctattaaaatgaggaagtaaatctttaaaaaaaaagtttgaaatttgtgaacttaaaaaatggagtgcctggtgactcctaattatttcttaacaaaaacaccagttataagattatactcacagatactttggaggatcttcctcccttgtgaaggaggaagacacccattagaacaatgaaaaattgttagtcaaccaaagaaagttttttttttttttttttgagacagagtctcgctctgtcacctaggctggagtacagtggcgtgatgtgagctcactgcaacctccacctccccggttcaagtgattctcctgcctcagcctcctgagtagctgggattacaggtgtgtgctaccatgcccggctaatttttgtatttttagtagagatgggatttcaccacgttggtcaggctggtctcaaactcctgaccttgtgatctgcctggctcggcggcctcccaaagtgctgggattacaggcgtgagccaccgtgcctggccgaaaccttctttaacaatgttttcttattattactgtgaaaggcaataaattctatgtttatcttggtagaataatcacagtaaaaactactcaatccacatcaaagaatatttttggaacaggtggtcccatggcagcctcagagtagtattaataccccaaacaaagtgaagggagcaccaagaatgtgactatagttttaaggacatgctttttgtggtctttaaacaaggtgctgtcaaatgggtgctttgtaaaagcaaattacaaaatctgagattaaaaaattctcataccataatcactttgcatctatgtattgaaaactgcatcttgctaattcatcatggtatatattctggacatggtactctgactgtctcctagatctgaagtctcctctgagtaagtagccacaagtggttccttatgcactggttgccatgcacccctatattagataatggctgaagaatccaatcggattctctctggaggtatctaaatgtgaggcacactgagaggctatagggtggtagcaaaactgaaggatacccagaacactgtaagcagaagctatgaaacaacagaagccgtaaggatcttttcaaggagtaccattttgatatgaaggaatgataatattcaatatggctatgcagactgggcaatttggcacgttataacaaataagtaacttattacttgcagaaaaacaactgttttttgccaatgataaaatttgagtgttcagtgaaaactagaatttcaaatcctccatgactgacagttttccaatatttaaagactttttttttagagacagggtcttgctcttgtgcccatgctaagtgtagcggtgtgatcacagctcactgcagccttgaactcctggcctcaagctatcctcctgcctcagcctatcaaagtgctggggttacaggtgtgagccaccaaacttggccccaatacttaaagacttttctgatgagataggtagtgatattaaaaatgtgattaaaaacattttgtactgaaatgagtgaatatttggaagacccaagtaattcagaaaacctatattttctaactgggggaaagctattcagagcgctagacaaacaggcatatgaagaaaagctcagtatcgctgatcattagagaaatgcaaatcaaaactgcagtgacataccatttcacacaactcaatggctattactaaaaagtcaaaaaataacagatgctggcaaggttgcagagaaaagggaacgcttatatgctgttggtgggagtgtaaattagttcaaccattgtggaaatcagtagggcaattcctcaaagagctaaaaatagaactaccattcaacccagcaatcccattactgcttatatacccaaagtaatataaatcattctaccataaagacacatgcatgagaatgttcactgcagcactcgctatatacaatagtaaagaaatggaatcaacctaaatgcccatcaatgacagattggataaagaaaatgtggtacatatataccatggaatactatgcagccattaaaaagagtgagagcatgtcttttgtgggaacatgcatagagctagaggccattatccttaacaaactaacacaggaacagaaaaccagataccgcgtgttcttgcttataagtggaagctaaataatgagaactcatggacacaaagaggggaacaatggacactagggcctactggagggtaaaggagaggaggaagaggatcagaaaaagtaactattggatactaggcttagaacccagggtaacaacaaacacctgtgacatgagttaacctttaataataaatctgcacatgtactccctgaagtttaaaaaaaaagcaagacgattaagatactcatatcaccatttttcaattaaatatctgtataataccagattttcttcatataccttcaaccacaattacatattacaataaagagaatgcagaaatagatatgaggatctagttgtcttctatcaaatcagacattaaaaagatttgcaaaaatgtaaaaatgtctttctgcaaacttttctgtgaaatgttattttcataaaaatgctatttaagtaatggatttattatattaaatgaattaagtatttttaaaatttgtttttatttctaattaaataaatatcattaacgatcacatatataaacaaagctctttggggcccttaataacttttttttttgagacggagtcttgctctgtcacccaggctggagtacagtggcacaatctcagctcactgcaatctccgcctcccaggtttaatcaattctgcctcagcttcctgagtagctgggattacgggcacatgccaccacgcccagctaattttgtattttttgtagagatggggtttcaccatgttggccaggctggtgttgaactcctgacctcaggtgacccacccaccttggcctcccaaagtgttgagattacaggccccttaaagggggccaggtgcagtgactcacgcctgtaatcgaagcactttgggaggttgaggcgggcgaatcacttgaggtctggagttcgagaccagcctggccaacgtggtgaaatcctaactacgaaaaacacaaaattggccaggcgtggtggcacgtgcctgcaatcccagctactcaggaggctgaggcaggaggatcgcttgaacccaggaggcggaggttgcagtgagctaagatcgtgccactgcactccagcctgggcgacagagcgaaactccatctcaaacaaacaaacttttaatggtattaaggaggtcctgagaccaagaataaatgagagtaaacggtgagaggtaagactgcaaagataaactggggtcagctgtgaaaggcattgtatgacggaataaggaacgcagacttaatcttgtggggcactggggagatataaggcagcagccactatactgtagaaagaacgggttcagggtcagaagaataaaggcatggccacatggtaaatcgttacagtaaacattgtagctatcattccaatgtttatcctctgtccctccctccagttgtgtggtagccttgtgttttttttgtttgtttgtttttaatgatataagactttattgtcatttgagggtctgttttccaaataatctctagtaaatatattggaataattacaaattttaagtcccaacttaccgatacggcacgattctcagaccttcccctccactgactgccaggcaatcgtcagcaccagacaaggctgcccaccactagtatctttcactgcagccctcctggactcaagcaattctcccgcctcagccccccaggtagttgggactacaggcggatgccatagctgtgtggtaaccttgtgatttagcgacctgaatccagctccaggggtgtggagaacctgaatggtgtgagccagttctaatcctcttgtatcagtagttggtttagggataggtagccttctgatatagtctccaatgattcctgcctccggtatctctacatcacattcttgtgtaatcaccgcccctttagtgtgggctggacctagtgacttgcttgtaataaacagaatgaagcaaaagtgatgggatgtcacttctgagattaggttacaaaagactgacttctgtttgccagcactctctcttactgacactttactgcttactctgatgaagccagctgccatgctgtgagctgcctcatggtgagatccatggggcaaggcatcagaggaggcctctgggaaacaactcatgaggaactgaggcctccagtccaacaaccgtgaggagctgaatcctgccaggaacaatttgagtgatcttagaagaggatccatccccagttgagccttaagatgatctgagttcctgctgacacctggactgcattttggtatctcagttccttttgcaagagacccagagccagaggatttagcaagttgcacctgaatggactgttgatgagtcttgaaaagatgagataataaatgctgctttaagtca

SEQ ID NO: 14517 - DNA, 407 bp, Homo sapiens
tgtatggcttagtggttcctggatgttcctggatgcctgacatcacattgatacatgctggaggtctggctcagccagctgccatgctgtgagctgcctcatggtgagatccatggggcaaggcatcagaggaggcctctgggaaacaactcatgaggaactgaggcctccagtccaacaaccgtgaggagctgaatcctgccaggaacaatttgagtgatcttagaagaggatccatccccagttgagccttaagatgatctgagttcctgctgacacctggactgcattttggtatctcagttccttttgcaagagacccagagccagaggatttagcaagttgcacctgaatggactgttgatgagtcttgaaaagatgagataataaatgctgctttaagtca

SEQ ID NO: 14518 - DNA, 12404 bp, Homo sapiens
gagtgcctctgcggccaccggggtcttcgtgctgtccctctcggccatcccggtcacctatgtcttcaaccacctggcggcccagcatgagtgagtgagccggcgcggcgggggtcgcgccgaggggcggcgggagttggctcgccgcgacgggagcctcgcaacttttccgagggggctgggaccgtccgccgcgggacagaggttcgtggccgcaggggctccccgcgcctggccagactaggggggcgccccaggggtcgcacgggccgggtcttggagccgggccctgaggtgcccaggctggcgcatttcgggatgttggtgccagcaccgcgccaggtgcccggggtcacaggcgtcaatacggccatgcccctgccctggaggggcccaggggccggtggggagcggaacaaacacggacactacgaacctggccgtgtcagctcgtttgtgccttgttctttttgcatctcacgggaacgtttccatgtatggactttcgcatacttatcatttcttattaattttagaaactgttgtgaatgactagcagaaatagcccggaaccaacaggcagagacgtgggttctaggcctggctttggcactgacggtgtctggcctgacggtgtttggcactgacggtgtggtctggcctcggttttccggtcaagtggactttgtgtgcgtcctattgtaaggttccaccgagacctctttgtgaaggggcgttgtgaatggagaagtgcttcccagtgcctgcgctggggtaggatggggacaggcagcagaggcagaacacttcaatgtgaaggaaatgggtggggctgatggagggggacagggcttgggttcgaagccctgcctcccactccactgcagggatcacggactaacctgcagccggcagctgaaggcctgagggtcgccgggtgttgggacaggcgccagcctctgttcctgctgatgttggttgctgtctggagggaggaggaagtaacctgctatgtctctcagctgttggtgctaaggaaattgcatcagtctgtaggctgcaaacccccttcagctggtcaggccgtggagtgtctgtacatagggtggtaacttcctcctctccagctgcctggccgcctgatacaggcagcacccacactgagtgctcaccaggcaccagcagtgtctacccttggtctggcccagtctctggaggcatcccctggaggcagctgctctgggccaccgaatattacatgcctgtcaatatagtgcatgggggaccctgtgctccaaaaaatggcattacgggtagttcagtgaagatatactgagtgcctactgtgtgtttggcactgttccaagtgttggtgacatagctatgaacaagccagaagaggctgtggaggcaggtaatgagatagacatcaacaaacattaatacatcgatagtgacatgctatgaagataataaaatagggtgactggggagggggctggtggccagggaaggcttctaggaggaggtaacacttgagctatgggaagatctgggaatggagcctgtcgggcaggaaaatggagcagtgcaggggaaggaattggatgggcgtagtaggtattttggaaggtgaacagatggggcttactgaagagggttgcatggcagcagaggatttgaggatgagccctaggttttggcctcagccactgggaagatggtgatggcatttactgaatacagactgaactatgtattgctgtgcatgatggagcgcactggcaagcactacagcattttgaataattagtgtcagccattcttcctgtcctcttgcaggttaaaacccccgtggcctttgattcctctcttctttctccactcccttcctcctactgtctgcttccccataagtcctggggctctagtgtctgttccctcctttcagttctccctggcactggccctttctgacctggactgtggcaaaggctccggtgcaagtctcgctgcccagccccgctgcgtgtttctcggcctcggccccccagtcccagcccacgcactagtgctcctgccgcaccagcctgcctttgctccttgaccattcctcctcctctccagcctctagcccggactcctgctgctccctgacagggatgctgccttcctcctatcgcagactgttgaagccgcacctggactttatggccacttctaccttctgcagaccctccctctctctcctttgagctccctcagtcccttgtttgcacctttctcccgagagttactttcctgtggtaagaacttacctgccccggctatagctcacccctctgtactgtcctgcccaggccagcgccgtgtgcatcgtaggcactcaggtatgtttgactttgttgaatcgagtttccttcccaccaaaccttttatgcaactctgaaaaccagaaaaagaaaattagattgagaggtcaggaaaggattgagcgtgttctgtctccctctctcactgagagagacacactgctcacactcatccttgcatgtcccctctcagtaggtgtctgttcatagaagggcatcagcagcccttcccaccccccaagactagcaactttctcatcctggggttagtcgcagcccttacctgtccctgagtccctgcaggacctgtttcttcctgtggtgagcaggtcctgcacttggctgttgtaggagggtctctggggacagtgccaagagtcagagacaatctgctgccctagtttcccttcattcttccctcctctcctggagctaagagcatgagaggacgctgtgaaccagttcacactgctctgtcctgctccagaagagcaccaaccacgcgatcctgctggcagtgagtgcaggcccttggtaggagtgaagactggagttgtcacctgaccaccacctgcctcaggctgttcaccattaaaatgcctgtcagctgacccagcacacccacctcttccctcatgggattcttcagcccagcatcatactcttgacccacactggcttcctccttcttcagctcatccccacaggaggagcctggagcaaccactgaagtgcaatcaccagaaacctcctatttttcagtttctcacctggacattgaaacagccaccctcattcttttttaaaaaatgtaattaattgttattattttttgagacggactcttgctctgtcatccaagcgggactgcagtggtgcaatcttggctcactgcagcctccaacccccaggttcaagcaattctactgcctcagcctcccaagtagcggggattacaggcatccgccacctcgcctggctaattttttgtatttttagtagagacggggtttcaccatgttggccaggctggtctccaactcctgacctcgggtgatccacccgcctcgacctcccaaagtgcttggattacaggtgtgagccactgcgcccggcctcattcttatcatagaattgatccatctatcatttatccatccatcctccatacattcacccatactccatccatccactcatcatcatctatccatccatttatccatcatcctccatcatccatcaattcatccatcatccatccatccatttatccatcatcctccatcatccatcaattcatccatcatccatccatctattcacccatcatccacccattcacccatcatccatccatccattcatccatcatctatccattcatccatcatctatccatcctttcatccatcatccatccaaccattcacccatcatccatccatctatccatccactcatcgtctatttgttccccccttccctccctccttctattcttatctttctctctcctaggggacggtgatagttatccaaaggtcccgatgttgggctgtggtggtgtggaggggtctcagttgaggagtggtgcttgtagctgctccaatctgaagaggtcctggtgtagcaggccattggagtgggccaggtagtattttgtctagaattggaagccctgtcagtgctggaggtgtgagagggagagtattgctgttggactgcaggagaactcctagtgggtagagctcagagtccattgagataggttcctccatgtaggcagggacttctcttatttatccagtctcctagggcctgcaacaatggctaccacataggggtgcagaatacatttttttgcttgctatgtttttgaattaattaataaacagatagatgcaatgatgtgactttcctagggtgacacagttagcaacagaatgggtaccaggatcccggtttcctgactgataactctaccaagcctcgtgccctatcgctgccccactgagtagcggctttggcccctgctgtccttggtgccactccctttcctgtagaacatccaggggatgtactcaactaagcttcaccttggtttctatggtttggggttggatgctggtctgttggccctggttctggggtgttgggctatcttcattctggcctcaggtctagtccagactccttctccatggatttcctggcctcattctctggcccatttgactatacacataacataaggtctttcttgtcccctggaaggcatgtttagttgtaatgcctatatattccttggagctcagtctgagggtttctgactggccctgagggaggtggcagagtcagtggtgaggcctgtcagctgctagggagcaggggttagaggaacgtgtaagtggaggcagtggggcagtggccataggtgcagcagggtggggtgaggcagagggagctccagacgtgtcatctgtgcacatgagacaggataagaggagaatgaggaggacctgatggcttcggtccctgaaagtcatgggctgcagcccagatgggccaaagagctgcagataaacttcactaactctacagtgctgggagctgcaggcagaggcagaattatggatgaattatgcagcactaggagggaatgcattcaatagtcaggaaattccaggcaccaatgtgtttattttgatagtgaccacctccctgttctggtcgttgcagttcctggactattgtaggggttgctgccctcatcctgttcctggtagcactgctggctcgtgtcctcgtcaaaagaaaaccaccccgggacccactgttctatggtacgtctccacaaagggaaatcttttgtatctgattaataacacaatactttcagcctcagtcacatattcctccttggttgtgaatactctgagccctttggtaacagtggctgcaagtgtaggggtgtttcaggacaatctggccctcgcctctggctattgcctctcaggcagtggactccaccctctcccaggtggcatcccggtggagagttactgccaggccaggcagggcaccctgccaaccccagcatgctttgacctctgacctctgacctcgactctcatgctagctccttcctgggcttcctgtcttcagcctgctactagcagtcccccccacttagtgcagaacttaactgtgtggtgtctgggtctgcacatatgcatgaagaggaaaataatggaacctgccatagagacaagcacctatagtgcaccttgtatgaccctgagcactttagcagcaggctttcacctaatcctcaccatccctccacttgaaagtgaagcagctggcttggagatgctaagaaatgtggcaaaggtcgtgtggctgttgacccctaaagcccatgcccttccatcatgcatgctgccccagccaagctgctaccggcctttgagcacttcctgtgccaggtaccttgctgggcattttgttctgtagtttctgcttcagtaatgctgcatatcaaatgcaccccaagtcctacagcaacaaacatttatttttcttgctcacaggtctgtgggttggggccactctgcatcaggctgtgggttgatttcagggctgttctctgactccttgttcttggaccagcagctcccaggcatgcccttctcatggcagatacagaggcacagtggggctagaaggaagaaagtggtggctcttaaggccttggcttggagctgccccatcttactcccacccatattccaatggctgagatgaggcatagggccaagcccatcagcaacagcatagggagcattctctgcctacagtgggccttgggaaaggtggggtgggaaggaagaattgtgagtaactagtttctcccaatccacatataagaagctctgaagcttcagaaatgatgtaatttgcctaaggttttacagccagtcattagatgagctgggtccgtctgctttcaaggcccacatgccttttcctggctctctccactagcctgtgctctgacccttgcacacctttccagatgagtttcctgctgctgtctgtccctcctgttcctccccactccatggagcctgtattaactgtactgatgtctctcctgactcttcaaggctgggcaccctttctcctgtaccctcagccctctgtcctggtctgttacaactttgagtacactgcagcctcagggtgaggctcaaggccagactcctcacgtactagaaggcagagaccatgtccttgtcattgctaacacagtgtctgacacttgtgttgtcatcagcaatcattggcagattatgtgccgaacacttcctttcttggagacatatgatggctaatcacctgggaggcttctggaaaatgagtatcaggaagtgacactgccaatgagaactgggccaaaggcccccatggaggcgtggggaaggcacatctgcaaaacagggcacatgtggccttttgttccttctggggagaatgtgaatgctggactcctggctgctgactccaggcaaggccggcttcccttctctgtgaattaaccatccccacactcctctccatttcttttttcacagcttttcttatattcaccatcagatttttcttctgtccatgtccatcccatagtctaaggcaccaatctgttacaacttgaaaatgcagctttgacaaactaacatgcactaaatttgatcacctgctgtttaaaaagtattatttcttagttatttgtgctagtagttttaagcccatttaggagatgctcacaactctggtaagattctctgacaggtatagctttccttctgtcatattcaattataccctcttgtattcatttttaacatcactagtcttttttctgaaagccattgtcacttgcacatcagccacctgtctgtctctaggatacgccatgtggaatagggtaaccacactggacacgctgtgaggtggcctgcttgggaatcattgagatgaatcacttcgtcaagtcattgtctttttttttttttgagacagagtcttgttctgtcgcccaggctggagtgcagtggtgtgatctcggctcactgcaacctccgcctcctgggttcaagcaattcacttgtctcagcctctggagtagctgggattacaggcgtgcaccaccacacccagaaaatttttgtatttttagtagagacggggtttcaatatgttggccaggctggtcttgaactcctgacctcaggtgatctgcctgcttcagcctcccaaagtgctgggattacagacttgagccaccatgcccagcctgaatcattgtcttaaacttagtggtcacttctatgcttccttggccactcagttactggctttgctcccactgcccatgtgggatgtgggtttgattctgggcagccacttgtaggggagtggaggatgggtggagttggcctgctagaatcttctgtgactgagccggcagtgaccatcattctccactcctgtgatgagtgttcccttgatgagagtacttaggcagggatggggagagctgcgaacacaggtggaggtccagctgggtgtgtagaaggggtattctgttagtctatctcgataattgtccacagcatcttctggaaaacatgaaaaacattccattattattagctgatgccaagcttgtagtaattgtctcctgagctattgctttttaaactgctgctttctttgctctagtgtatgcagtttttggatttaccagcgtggtgaacctcatcataggactggagcaagatggaatcattgacgggttcatgacacactacttgagagaggtatgggatcacttagtgattatgaggtttcaaccaaaaggccacaacccagatcacattactcagagacagaaatcctctcatttagtgtgaacaggtacgctacgcaggctttcatttcctataatagccttaggtcgcttagtcacatggaaagtggagcagaaaggacggttagatcacgagaggcaattctctccaacattcagctctcacggcttctctcactcatgaccgcacacatgacctgcttttcccctttatctgtatttaatataaataaggtaccttaaatggatttagtatttatgtgtctgttaatacatgactatctcagaaaccccaagtcagtcttaaatttgtaaagtacccaacacagaggcacttgatgaagtcatttgattgtgatggcttgcactctccaccatgctgcccaaatcatagctttgatactacctggtactcgagagagctagtcctattttcttattttatggtgggctgaacccagccccagagaggttaagtgacttattcaaggtgacacaggaaatgaggaaaagggctcaaagcagattcttcatccatgttcagataatggggagctttgtatgtacgctgtgggagtttgggttttatcctgtctgtgagggaagattttaagtcagtgaagaatacaggcagctctgggaaggatgggcttgcagggaagggtccgtgccatgagctggggcaccagtcaggaggcttcctcgggaccagcaggggcataaacgtggctggatggaggcagcgcatgggaagtagagagagggatgaactttagagaatcggagtggctggaatgaataagacttggggacaaattgggagtgatgggaaggatgaggcctaagacagtgtcctgattcctgctttggaatttggaagaatgctgctgtttttacaccagagagggatgacaggaggaatttatttctgcagacatttgttgaaggggactctgtggtcagaagacctgctccctgccccctgggagctccctgcctgaaagggtggggagatggaattgtcccaggcacagtgagagactcactccaggcacagaagtactcagaggaggaattaagtctgggtgcagtcggggaaggcttattgagttggtgacactgctgtagcattttaaaaatggtcatggcagtggaagatggacatttccagatggaccagggaggtagggggaattccggagagaagggacagcttgggcaaaggcttggagaggagaaagagcatgtgcctctccctggggcaccaatctgcaaggatgaggctgagtttctatggggaggtggagtttcagatgctggcagggctttgcaggtcttgagctctgaggagcagtcctggaagagagagtcacgggccatcggagtgcagttggtacctgaatgtctgagaggagaagggcttgcctatgagaaggtagagagagaaaagggctgagcttgggactttagagaccatggccagaagaagagaagcccctgaagtggaccatggggggcaggccaagaggcagaaggaaaacctggagagtgggggccatggagcccagaggagggaggttttaggaaggaggcggctgacgagagggctggaggctgagttggcaagggtggtaagcattggggcagacggggtatcagaagggggactggggtgtaactgtggtggcaaggtctgcagggccaggctctggggacccagctgtgatagagaggagatggggcttggtccagcaggctgtgacaagttttggggagttttagagtagaggaacaacatgccaagagccaggccttgagaatctttatctggcaggaggagtgtcatgggttggaaggaggggacaaaggtagggagaccatttgggaacatagctgtggtccagtgagggacactgagggctagacctaatgctgtgaagaagagggagaattgccggggtgacatcgtagcaataaagttgatagatttgctgagagactgcataggagaatgaggaatgaaaaaatgaccatgtggttttgaccttggtaagccgaatggtttcaccattaatatagagaggccatggctggcctggtggctcatgcctgtaatctcagtgctttggaagacaaaggcgggaggatcgcttgacgccaggagttgagactgcagtgagcaatgatcaccactgcactctagaccgggtgacagagtgagaccctgtctctgtacgtacacacacacacacacacacacacacacacacacatacagagagagcaagagagagagaggcaagatggaaggctggttgaggggagaagctgatgaattaagagttcaggcgagttgaaaggacctgtggcctgtgcaccatgcagttaaagatgctcatcaagctaccaggagaggccagcactggctcagagagccaggtgtgttagcaatggaagtctgaaaccataaatcggatgtattcttcagtcagagcaagtccaagagaagggacgtgggcctggcatgggtgtagaagcagaaccttgattctgtttcctgcttctctgattttaatttgatttgatctgtgggagagatgacagagcagtccttgccccaggggagcatgaagcttaagagaaagccctgcttgcttggctgattgatgggctggttgatctgcactcttccttgttgtagaaaggacttaaggcatcttacagcgtgaaacaagccaggacagcatgaacgtgggagaaagaggaaaggaaaacaaggtggggccaaaacaacagtaaaaatgcacggaaaattgatgacagtgattttctagaagccacctggaaatgtaaccacctagaaaagggaaatgtagttcgtcatataatcttgtgttcataacattaacatttgcccaggagaagtatggctcttcttggtctctgctaggtatactagctacgtgaccttaggaaagtcttgtaatctcagagcatctgtttcctcatctgtaaaatggactcaatcctgtccatcccactgggttgttgggaaggtagaaggaggggttgggtgtgaagctccgagttcggtgcctgcctgcctatgtgtcagtatgtggggaatgagtgttgtgccatgcccagcccagcaagccacgggatcagcatgaattattaaggccagccactggttctggaaagcagggtcatccctggccacctctctggtcactgccaagcaccttgtgtcaaagatttggcttggtctccatgagtttgccatacagccaggattgcctatcatgccatctgccttcgcatcacagtacaaacctatgttgatgcatcatgggccaattggccaggcattctctaattccatcctctgtggccagaccctggttttggcagctccagcgtaaagttgtattttcatgttcctaccaattttgaagaaatagtttcatcttagcagatgaacacaagttagttctgctgttttattttacttgcaatacaggtctgatgttctgcatttacaggtcttatttaaagtggacttctttttaatgctttctttagggtgaaccgtatctgaacaccgcatatgggcacatgatctgctactgggatggctctgctcattatctgatgtacctggtgatggtggcagccatagcatgggagtaagtcagttcacctggtgtgtgcctttgccaccttagcaaccgataagcgggtatgtaaggaaacgttatgcatagaggcaaatacacaagcaggtatactggacatgaatataagttccatgggtgcacgtcagacgtggctttatcctccttgtaccactgccttttgaatatgtccttctgaattgctccctagcatggtgacagctcgggcagaccctttaagctttctgattatgttgtcttacaagaataatttttattttcagcaattaaagctaagcacatcttaaacttcatttcaaaacttcaaaatttccaaacagcaatctcatttcggttcaaagcttctgtccttccccagatcaggcacagctctgcggcttggctcgcactaaggct

SEQ ID NO: 14519 - DNA, 548 bp, Homo sapiens
gagtgcctctgcggccaccggggtcttcgtgctgtccctctcggccatcccggtcacctatgtcttcaaccacctggcggcccagcatgagtgagtgagccggcgcggcgggggtcgcgccgaggggcggcgggagttggctcgccgcgacgggagcctcgcaacttttccgagggggctgggaccgtccgccgcgggacagagttcctggactattgtaggggttgctgccctcatcctgttcctggtagcactgctggctcgtgtcctcgtcaaaagaaaaccaccccgggacccactgttctatgtgtatgcagtttttggatttaccagcgtggtgaacctcatcataggactggagcaagatggaatcattgacgggttcatgacacactacttgagagagggtgaaccgtatctgaacaccgcatatgggcacatgatctgctactgggatggctctgctcattatctgatgtacctggtgatggtggcagccatagcatgggaatcaggcacagctctgcggcttggctcgcactaaggct

SEQ ID NO: 14520 - DNA, 28992 bp, Homo sapiens
atgagtgcctctgcggccaccggggtcttcgtgctgtccctctcggccatcccggtcacctatgtcttcaaccacctggcggcccagcatgagtgagtgagccggcgcggcgggggtcgcgccgaggggcggcgggagttggctcgccgcgacgggagcctcgcaacttttccgagggggctgggaccgtccgccgcgggacagaggttcgtggccgcaggggctccccgcgcctggccagactaggggggcgccccaggggtcgcacgggccgggtcttggagccgggccctgaggtgcccaggctggcgcatttcgggatgttggtgccagcaccgcgccaggtgcccggggtcacaggcgtcaatacggccatgcccctgccctggaggggcccaggggccggtggggagcggaacaaacacggacactacgaacctggccgtgtcagctcgtttgtgccttgttctttttgcatctcacgggaacgtttccatgtatggactttcgcatacttatcatttcttattaattttagaaactgttgtgaatgactagcagaaatagcccggaaccaacaggcagagacgtgggttctaggcctggctttggcactgacggtgtctggcctgacggtgtttggcactgacggtgtggtctggcctcggttttccggtcaagtggactttgtgtgcgtcctattgtaaggttccaccgagacctctttgtgaaggggcgttgtgaatggagaagtgcttcccagtgcctgcgctggggtaggatggggacaggcagcagaggcagaacacttcaatgtgaaggaaatgggtggggctgatggagggggacagggcttgggttcgaagccctgcctcccactccactgcagggatcacggactaacctgcagccggcagctgaaggcctgagggtcgccgggtgttgggacaggcgccagcctctgttcctgctgatgttggttgctgtctggagggaggaggaagtaacctgctatgtctctcagctgttggtgctaaggaaattgcatcagtctgtaggctgcaaacccccttcagctggtcaggccgtggagtgtctgtacatagggtggtaacttcctcctctccagctgcctggccgcctgatacaggcagcacccacactgagtgctcaccaggcaccagcagtgtctacccttggtctggcccagtctctggaggcatcccctggaggcagctgctctgggccaccgaatattacatgcctgtcaatatagtgcatgggggaccctgtgctccaaaaaatggcattacgggtagttcagtgaagatatactgagtgcctactgtgtgtttggcactgttccaagtgttggtgacatagctatgaacaagccagaagaggctgtggaggcaggtaatgagatagacatcaacaaacattaatacatcgatagtgacatgctatgaagataataaaatagggtgactggggagggggctggtggccagggaaggcttctaggaggaggtaacacttgagctatgggaagatctgggaatggagcctgtcgggcaggaaaatggagcagtgcaggggaaggaattggatgggcgtagtaggtattttggaaggtgaacagatggggcttactgaagagggttgcatggcagcagaggatttgaggatgagccctaggttttggcctcagccactgggaagatggtgatggcatttactgaatacagactgaactatgtattgctgtgcatgatggagcgcactggcaagcactacagcattttgaataattagtgtcagccattcttcctgtcctcttgcaggttaaaacccccgtggcctttgattcctctcttctttctccactcccttcctcctactgtctgcttccccataagtcctggggctctagtgtctgttccctcctttcagttctccctggcactggccctttctgacctggactgtggcaaaggctccggtgcaagtctcgctgcccagccccgctgcgtgtttctcggcctcggccccccagtcccagcccacgcactagtgctcctgccgcaccagcctgcctttgctccttgaccattcctcctcctctccagcctctagcccggactcctgctgctccctgacagggatgctgccttcctcctatcgcagactgttgaagccgcacctggactttatggccacttctaccttctgcagaccctccctctctctcctttgagctccctcagtcccttgtttgcacctttctcccgagagttactttcctgtggtaagaacttacctgccccggctatagctcacccctctgtactgtcctgcccaggccagcgccgtgtgcatcgtaggcactcaggtatgtttgactttgttgaatcgagtttccttcccaccaaaccttttatgcaactctgaaaaccagaaaaagaaaattagattgagaggtcaggaaaggattgagcgtgttctgtctccctctctcactgagagagacacactgctcacactcatccttgcatgtcccctctcagtaggtgtctgttcatagaagggcatcagcagcccttcccaccccccaagactagcaactttctcatcctggggttagtcgcagcccttacctgtccctgagtccctgcaggacctgtttcttcctgtggtgagcaggtcctgcacttggctgttgtaggagggtctctggggacagtgccaagagtcagagacaatctgctgccctagtttcccttcattcttccctcctctcctggagctaagagcatgagaggacgctgtgaaccagttcacactgctctgtcctgctccagaagagcaccaaccacgcgatcctgctggcagtgagtgcaggcccttggtaggagtgaagactggagttgtcacctgaccaccacctgcctcaggctgttcaccattaaaatgcctgtcagctgacccagcacacccacctcttccctcatgggattcttcagcccagcatcatactcttgacccacactggcttcctccttcttcagctcatccccacaggaggagcctggagcaaccactgaagtgcaatcaccagaaacctcctatttttcagtttctcacctggacattgaaacagccaccctcattcttttttaaaaaatgtaattaattgttattattttttgagacggactcttgctctgtcatccaagcgggactgcagtggtgcaatcttggctcactgcagcctccaacccccaggttcaagcaattctactgcctcagcctcccaagtagcggggattacaggcatccgccacctcgcctggctaattttttgtatttttagtagagacggggtttcaccatgttggccaggctggtctccaactcctgacctcgggtgatccacccgcctcgacctcccaaagtgcttggattacaggtgtgagccactgcgcccggcctcattcttatcatagaattgatccatctatcatttatccatccatcctccatacattcacccatactccatccatccactcatcatcatctatccatccatttatccatcatcctccatcatccatcaattcatccatcatccatccatccatttatccatcatcctccatcatccatcaattcatccatcatccatccatctattcacccatcatccacccattcacccatcatccatccatccattcatccatcatctatccattcatccatcatctatccatcctttcatccatcatccatccaaccattcacccatcatccatccatctatccatccactcatcgtctatttgttccccccttccctccctccttctattcttatctttctctctcctaggggacggtgatagttatccaaaggtcccgatgttgggctgtggtggtgtggaggggtctcagttgaggagtggtgcttgtagctgctccaatctgaagaggtcctggtgtagcaggccattggagtgggccaggtagtattttgtctagaattggaagccctgtcagtgctggaggtgtgagagggagagtattgctgttggactgcaggagaactcctagtgggtagagctcagagtccattgagataggttcctccatgtaggcagggacttctcttatttatccagtctcctagggcctgcaacaatggctaccacataggggtgcagaatacatttttttgcttgctatgtttttgaattaattaataaacagatagatgcaatgatgtgactttcctagggtgacacagttagcaacagaatgggtaccaggatcccggtttcctgactgataactctaccaagcctcgtgccctatcgctgccccactgagtagcggctttggcccctgctgtccttggtgccactccctttcctgtagaacatccaggggatgtactcaactaagcttcaccttggtttctatggtttggggttggatgctggtctgttggccctggttctggggtgttgggctatcttcattctggcctcaggtctagtccagactccttctccatggatttcctggcctcattctctggcccatttgactatacacataacataaggtctttcttgtcccctggaaggcatgtttagttgtaatgcctatatattccttggagctcagtctgagggtttctgactggccctgagggaggtggcagagtcagtggtgaggcctgtcagctgctagggagcaggggttagaggaacgtgtaagtggaggcagtggggcagtggccataggtgcagcagggtggggtgaggcagagggagctccagacgtgtcatctgtgcacatgagacaggataagaggagaatgaggaggacctgatggcttcggtccctgaaagtcatgggctgcagcccagatgggccaaagagctgcagataaacttcactaactctacagtgctgggagctgcaggcagaggcagaattatggatgaattatgcagcactaggagggaatgcattcaatagtcaggaaattccaggcaccaatgtgtttattttgatagtgaccacctccctgttctggtcgttgcagttcctggactattgtaggggttgctgccctcatcctgttcctggtagcactgctggctcgtgtcctcgtcaaaagaaaaccaccccgggacccactgttctatggtacgtctccacaaagggaaatcttttgtatctgattaataacacaatactttcagcctcagtcacatattcctccttggttgtgaatactctgagccctttggtaacagtggctgcaagtgtaggggtgtttcaggacaatctggccctcgcctctggctattgcctctcaggcagtggactccaccctctcccaggtggcatcccggtggagagttactgccaggccaggcagggcaccctgccaaccccagcatgctttgacctctgacctctgacctcgactctcatgctagctccttcctgggcttcctgtcttcagcctgctactagcagtcccccccacttagtgcagaacttaactgtgtggtgtctgggtctgcacatatgcatgaagaggaaaataatggaacctgccatagagacaagcacctatagtgcaccttgtatgaccctgagcactttagcagcaggctttcacctaatcctcaccatccctccacttgaaagtgaagcagctggcttggagatgctaagaaatgtggcaaaggtcgtgtggctgttgacccctaaagcccatgcccttccatcatgcatgctgccccagccaagctgctaccggcctttgagcacttcctgtgccaggtaccttgctgggcattttgttctgtagtttctgcttcagtaatgctgcatatcaaatgcaccccaagtcctacagcaacaaacatttatttttcttgctcacaggtctgtgggttggggccactctgcatcaggctgtgggttgatttcagggctgttctctgactccttgttcttggaccagcagctcccaggcatgcccttctcatggcagatacagaggcacagtggggctagaaggaagaaagtggtggctcttaaggccttggcttggagctgccccatcttactcccacccatattccaatggctgagatgaggcatagggccaagcccatcagcaacagcatagggagcattctctgcctacagtgggccttgggaaaggtggggtgggaaggaagaattgtgagtaactagtttctcccaatccacatataagaagctctgaagcttcagaaatgatgtaatttgcctaaggttttacagccagtcattagatgagctgggtccgtctgctttcaaggcccacatgccttttcctggctctctccactagcctgtgctctgacccttgcacacctttccagatgagtttcctgctgctgtctgtccctcctgttcctccccactccatggagcctgtattaactgtactgatgtctctcctgactcttcaaggctgggcaccctttctcctgtaccctcagccctctgtcctggtctgttacaactttgagtacactgcagcctcagggtgaggctcaaggccagactcctcacgtactagaaggcagagaccatgtccttgtcattgctaacacagtgtctgacacttgtgttgtcatcagcaatcattggcagattatgtgccgaacacttcctttcttggagacatatgatggctaatcacctgggaggcttctggaaaatgagtatcaggaagtgacactgccaatgagaactgggccaaaggcccccatggaggcgtggggaaggcacatctgcaaaacagggcacatgtggccttttgttccttctggggagaatgtgaatgctggactcctggctgctgactccaggcaaggccggcttcccttctctgtgaattaaccatccccacactcctctccatttcttttttcacagcttttcttatattcaccatcagatttttcttctgtccatgtccatcccatagtctaaggcaccaatctgttacaacttgaaaatgcagctttgacaaactaacatgcactaaatttgatcacctgctgtttaaaaagtattatttcttagttatttgtgctagtagttttaagcccatttaggagatgctcacaactctggtaagattctctgacaggtatagctttccttctgtcatattcaattataccctcttgtattcatttttaacatcactagtcttttttctgaaagccattgtcacttgcacatcagccacctgtctgtctctaggatacgccatgtggaatagggtaaccacactggacacgctgtgaggtggcctgcttgggaatcattgagatgaatcacttcgtcaagtcattgtctttttttttttttgagacagagtcttgttctgtcgcccaggctggagtgcagtggtgtgatctcggctcactgcaacctccgcctcctgggttcaagcaattcacttgtctcagcctctggagtagctgggattacaggcgtgcaccaccacacccagaaaatttttgtatttttagtagagacggggtttcaatatgttggccaggctggtcttgaactcctgacctcaggtgatctgcctgcttcagcctcccaaagtgctgggattacagacttgagccaccatgcccagcctgaatcattgtcttaaacttagtggtcacttctatgcttccttggccactcagttactggctttgctcccactgcccatgtgggatgtgggtttgattctgggcagccacttgtaggggagtggaggatgggtggagttggcctgctagaatcttctgtgactgagccggcagtgaccatcattctccactcctgtgatgagtgttcccttgatgagagtacttaggcagggatggggagagctgcgaacacaggtggaggtccagctgggtgtgtagaaggggtattctgttagtctatctcgataattgtccacagcatcttctggaaaacatgaaaaacattccattattattagctgatgccaagcttgtagtaattgtctcctgagctattgctttttaaactgctgctttctttgctctagtgtatgcagtttttggatttaccagcgtggtgaacctcatcataggactggagcaagatggaatcattgacgggttcatgacacactacttgagagaggtatgggatcacttagtgattatgaggtttcaaccaaaaggccacaacccagatcacattactcagagacagaaatcctctcatttagtgtgaacaggtacgctacgcaggctttcatttcctataatagccttaggtcgcttagtcacatggaaagtggagcagaaaggacggttagatcacgagaggcaattctctccaacattcagctctcacggcttctctcactcatgaccgcacacatgacctgcttttcccctttatctgtatttaatataaataaggtaccttaaatggatttagtatttatgtgtctgttaatacatgactatctcagaaaccccaagtcagtcttaaatttgtaaagtacccaacacagaggcacttgatgaagtcatttgattgtgatggcttgcactctccaccatgctgcccaaatcatagctttgatactacctggtactcgagagagctagtcctattttcttattttatggtgggctgaacccagccccagagaggttaagtgacttattcaaggtgacacaggaaatgaggaaaagggctcaaagcagattcttcatccatgttcagataatggggagctttgtatgtacgctgtgggagtttgggttttatcctgtctgtgagggaagattttaagtcagtgaagaatacaggcagctctgggaaggatgggcttgcagggaagggtccgtgccatgagctggggcaccagtcaggaggcttcctcgggaccagcaggggcataaacgtggctggatggaggcagcgcatgggaagtagagagagggatgaactttagagaatcggagtggctggaatgaataagacttggggacaaattgggagtgatgggaaggatgaggcctaagacagtgtcctgattcctgctttggaatttggaagaatgctgctgtttttacaccagagagggatgacaggaggaatttatttctgcagacatttgttgaaggggactctgtggtcagaagacctgctccctgccccctgggagctccctgcctgaaagggtggggagatggaattgtcccaggcacagtgagagactcactccaggcacagaagtactcagaggaggaattaagtctgggtgcagtcggggaaggcttattgagttggtgacactgctgtagcattttaaaaatggtcatggcagtggaagatggacatttccagatggaccagggaggtagggggaattccggagagaagggacagcttgggcaaaggcttggagaggagaaagagcatgtgcctctccctggggcaccaatctgcaaggatgaggctgagtttctatggggaggtggagtttcagatgctggcagggctttgcaggtcttgagctctgaggagcagtcctggaagagagagtcacgggccatcggagtgcagttggtacctgaatgtctgagaggagaagggcttgcctatgagaaggtagagagagaaaagggctgagcttgggactttagagaccatggccagaagaagagaagcccctgaagtggaccatggggggcaggccaagaggcagaaggaaaacctggagagtgggggccatggagcccagaggagggaggttttaggaaggaggcggctgacgagagggctggaggctgagttggcaagggtggtaagcattggggcagacggggtatcagaagggggactggggtgtaactgtggtggcaaggtctgcagggccaggctctggggacccagctgtgatagagaggagatggggcttggtccagcaggctgtgacaagttttggggagttttagagtagaggaacaacatgccaagagccaggccttgagaatctttatctggcaggaggagtgtcatgggttggaaggaggggacaaaggtagggagaccatttgggaacatagctgtggtccagtgagggacactgagggctagacctaatgctgtgaagaagagggagaattgccggggtgacatcgtagcaataaagttgatagatttgctgagagactgcataggagaatgaggaatgaaaaaatgaccatgtggttttgaccttggtaagccgaatggtttcaccattaatatagagaggccatggctggcctggtggctcatgcctgtaatctcagtgctttggaagacaaaggcgggaggatcgcttgacgccaggagttgagactgcagtgagcaatgatcaccactgcactctagaccgggtgacagagtgagaccctgtctctgtacgtacacacacacacacacacacacacacacacacacatacagagagagcaagagagagagaggcaagatggaaggctggttgaggggagaagctgatgaattaagagttcaggcgagttgaaaggacctgtggcctgtgcaccatgcagttaaagatgctcatcaagctaccaggagaggccagcactggctcagagagccaggtgtgttagcaatggaagtctgaaaccataaatcggatgtattcttcagtcagagcaagtccaagagaagggacgtgggcctggcatgggtgtagaagcagaaccttgattctgtttcctgcttctctgattttaatttgatttgatctgtgggagagatgacagagcagtccttgccccaggggagcatgaagcttaagagaaagccctgcttgcttggctgattgatgggctggttgatctgcactcttccttgttgtagaaaggacttaaggcatcttacagcgtgaaacaagccaggacagcatgaacgtgggagaaagaggaaaggaaaacaaggtggggccaaaacaacagtaaaaatgcacggaaaattgatgacagtgattttctagaagccacctggaaatgtaaccacctagaaaagggaaatgtagttcgtcatataatcttgtgttcataacattaacatttgcccaggagaagtatggctcttcttggtctctgctaggtatactagctacgtgaccttaggaaagtcttgtaatctcagagcatctgtttcctcatctgtaaaatggactcaatcctgtccatcccactgggttgttgggaaggtagaaggaggggttgggtgtgaagctccgagttcggtgcctgcctgcctatgtgtcagtatgtggggaatgagtgttgtgccatgcccagcccagcaagccacgggatcagcatgaattattaaggccagccactggttctggaaagcagggtcatccctggccacctctctggtcactgccaagcaccttgtgtcaaagatttggcttggtctccatgagtttgccatacagccaggattgcctatcatgccatctgccttcgcatcacagtacaaacctatgttgatgcatcatgggccaattggccaggcattctctaattccatcctctgtggccagaccctggttttggcagctccagcgtaaagttgtattttcatgttcctaccaattttgaagaaatagtttcatcttagcagatgaacacaagttagttctgctgttttattttacttgcaatacaggtctgatgttctgcatttacaggtcttatttaaagtggacttctttttaatgctttctttagggtgaaccgtatctgaacaccgcatatgggcacatgatctgctactgggatggctctgctcattatctgatgtacctggtgatggtggcagccatagcatgggagtaagtcagttcacctggtgtgtgcctttgccaccttagcaaccgataagcgggtatgtaaggaaacgttatgcatagaggcaaatacacaagcaggtatactggacatgaatataagttccatgggtgcacgtcagacgtggctttatcctccttgtaccactgccttttgaatatgtccttctgaattgctccctagcatggtgacagctcgggcagaccctttaagctttctgattatgttgtcttacaagaataatttttattttcagcaattaaagctaagcacatcttaaacttcatttcaaaacttcaaaatttccaaacagcaatctcatttcggttcaaagcttctgtccttccccagatcaggcacagctctgcggcttggctcgcactaaggcttggctacatggcttgtccgttcactcctcctgtctcactctgcggctggccccttggcagtggatgtgtatgtacaagggattaaaggaacaggagccgagtctgatgtgaaaggtgctggtttttgggtattggtacccccatcatgatatgctagcttggtcttgggaggcacacatgtgagttctttagagaccccaaccacaggagcttctgcattgcactaatccctgaagtgaacgacgtgctcttgggctgaatttctgcccatggtggcacacccacagctttttttctgctggggcccctgtaacccagaaggtacaccctttggggaggggtcttttcaaaacatttcaagtccggccatcttctcaggcctccacttgcttctgggttacagaaagtcatgcattcttgccccatacaaggttgaaatgtagtttacccaagtatctccctcactcccaacatgcactcaaggtcagctccagctaattctttttttttttttttttttttgagacaggctggagtgcaatggcacaatctcagctcactgcaatctccgcctcccaggttcaagcgattctcaggcctcagctgggactacaggcgtgtgtcactatacccgcaaattttgtatttttagtacacaaatctaaacatttttttcaccatgttggccaggctggtctcaaactcctgacctctggtgatctgcccgcctcagcctcccaaagtgctgggattacaggcgtgaaccaccgtgcccggctccagctcattcttatctgttctcctgcttataatcccagtcattatgaatgggcctcttggggtctggttacatttggcttgagggcgggggtggggcaggacgcacacagtattctcgtttcccttcagagaatttccttttgaatttctcatagcctgttacatagtgtggagtttgggttattggggttatcaattgaaggaactttttttttttattttgagacggagtctcgctctgtcacccaggctggagtgcagtggtgcgatcttggctcgctgtaacctctgcctcccaggttcaaccatttctcctgcctcagcctcccaagtagctggaattacaggtgcatgccaccatgcccagctaattttttttttttttttgtacttttagtagagatggcgtttcaccatgttggccaggctggtttcaaactcctgacctcaagtgatctgcccacctcagcttctcaaagtgctgggattacaggcatgagccaccatgctcggcctgaaggaagtttttgtcagcattgaagatttggggtatatgtctagcagctcctttgcaacatggggtacatgtcacttgtcttcacctttggggctttggccaaaattctgtgaccccagaaaaagtccatttaacattatcattgtaagtataactcatacttataatgattaaaaatatggatccaatttcatttcttctttcaactttctttttcctttcatgctgttgagtttcacacacaatagggaaatgcaggagtcctgtggcagggatgatcatgttgtagtttaacagaagacatagcaggcgtaatttcctatttaaaaggacacgaagaaggttctatagtatatcacatggcaatgaagttacataaccagggctccttgtgtttgatttattcctctcaattcaatatgttttgattgatgtactttactagtttgaatacaaaataatattgaagatcattttttgcttagtattctaagacaaacataccaagtcaagatttttttgttgttgttgttacagggaaacttatagaaccattggcctatattgggttggatctattattatgagtgttgttgtttttgtgccaggaaacattgtaggtaagaaactttatcttaaagttcactttccttttctaaaacaatggggcttgtttttaaatagagaagctcttttagttataatagaaccaagtgattccaagcttactaaaaacctgttttgcagaataattcctttttctcacctttaaaaaaagtactttttaagaagtgctttgagcaattttcagatgtgtgcattgaacaatttggcagtcaagttatcagggattcctgtttttttagaaggatcttgagggagtgagtatggtgtttatggctatatttagtgtgcaaatatgttaactcctgacacactatgagaactccaaaaatgtacttggaaattacaagtacattattaatgtatgcaggaaatcaggatatataggtagatagatagatagatagatatagatatagggagatagatatatacaaacatatatagatacctatctagatgtattttttgagacaggatctcactctgttgcccaggctggcttgcagtggtacagccatagctcactgcagccttgatctcctgggctcaagcagattactgtagataggacatgcctgttaatacacatctagtattttaaattgacctttttaatttggcctcattaaaaatattgtctggcccatagcaaaattttagatgacctgagatggggaggtatcctaaatattacttgtgttagatatgcttttggtaacttctttctctttctctcttttaaatagggaagtatggaacacgaatttgccctgcttttttcttaagcataccatatacttgtcttcctgtctgggctggtttcagaatctataatcagccatcagaaaattataattacccctcaaaggtgattttattaagctttgatgtaccctgttctcaaactcatagggttctttcgcatccactggccactgaattgaaccatgcctctgtggactggagcatttggggcatccaaacagtgcgactgttttgattatgtagcattagcttacgtattaattaatgtaggcaagaaggtctgtttctgtctgaatacatctgcttctgttggcaaggccatactttggggagcttcctgtgccagtggtcacactggctctaactatcagattctgcattagtgtgtcaagtgaagtccatagtgtgtggttcatctaggattgttaatggcctggacgttgaacacctgggttcctctgtgacacctatgcatttactaccccaagaggacactggagggatactgctcctcaaggtagtctacacagccatacaatcttgactccagagatccaggcccatagagactggctacaggacatctgagacacctcccttccattcacagccaaggtagtcaaggtgaaacagcactggcctggcagatactctgttaaggccttcatttctaagctagtttctctctgtttcttttacttttctaggtattagatcatttagcaagatcttttaagcaaaactgatatatgaaaatatgaattactagagataatcagaatacgactattcattttacaaaagattttcagtataattcattaaaatacattttaattgacaaatacttcatttgtaaacatttagacaccttctatgtaaactcaggctggcacactgacagctggtactaacttccctctgaggaaagaggtggctgttaaaaagaaaaagcaaatagtcagtccacccttagtcccagctccactgcttttaaaggttccatgtcagtgtgtcaacagagtaggtatgccatgaggcatgcagaattacttatcattatttttaatgtgaaaacacagtgacagccagggccaagcaggcattgtcatacagtgctgacagaaacataaattcagaattgctctgcaaagcaatttggcaatgttatcaaccttaataattctggaacccaataattctgctcctagagccctatcttcaggaaatcatcacacagataccaccaaagatttacaaagttgttcatcattacattaagtataacagtgaaaaatgcctaaatatccaacagtgggagaatggctaaagtgtggtgtttccatatggtattcagtttgagaaaatttttaaacatgtgggaaagtgcttataatataggcagatgttgagagcaaaaagaacaaatacagaattgtttatatacaggaataattttatatataaaattgttcctaattttgtgaaaaatgtagatatatgtgtgtgtatatatgtatgttgtgtgtatgtaactatatctatttacatgtattactggaaaagtataccaacggttaatagtggtgtggcaggtttatggtttacctttaaaatttattatcattaaaatgtcatttcaagaaaaaaagtggactcatagagctacaagagcccttcgagagatcatttagcccaaattcttcatttcacagataaggaaattgagacttgaggaaggaaatgattttcctaaagttccatggccagtgatttatgatataaattgtgcatcttcaaaattctcttatccatcatcatgacatttaatgtttcagatttcagattcttctttggcactttgggcctgctctttaggtacaaactctattttaggttattcaagaagcccaagcgaaagacctgctgagaagaccatttgatttaatgttggttgtgtgtctcctcctggcaactggattttgcctgttcagaggtttggtaagcataacagatcataataacgtaacattgtgatactactcacatttccaaatggaaaaaaacttagaaatatgtttttgtttttccatcagacttcttagcaaactaacaaaccattcctcccatcaaagcctggagccctggacctgcttcctgctgctcccaaccccagcctcctgctgtcacctcctcctgtccttagatcaagctctactcagaagcatcttcctccccgttttagggcatctaaaaaatcagccatcagagtctctcttttttattcttttgatgtttctgatttaaatgtaaatatctttggtaaggatggcaccctaggactgcaacacaactgtggcacagagcatccctgtgttctcaggagtaggggcaatggggttgaggaaggcgtaccagttcaacaattcacgtgtatgtagggtcatgggaatgtctcactggtaagagtagtgttgagtaaattcatctcacgcctggagtctttgtattgatgtgactgaaatacattaagggcacatgggcatttcatgttttctattttctctttattaatattttactgcagaggttaggaaaaagactcacaggctttgtagttagaatcctggccacttactagctgtgtggccttggaaaaactacttaacctcttggactctgttttcctctctgtaaaataacactacctaccttaacagtattgttttggagattaaataatgtacatcaaacacttggtagaggctcttatacatagtaaatgattactgttaggatttttattgatcagtgatccttcacaatgccccaatttgatgatttcttcttagtagaaatgaatttgggaagtttagaattatattgttaattatattcagcttcagtgacaatttctattcgaagcctgttggcgcgcgtaacagttggacagtagagtggcaagtgtaagcccatgcaggtgacttttatcatttcagggtcttgggctactgggggcctgtgcagcaggctgggttcagggtgagaagctgttttaagagttatctttatctgtgaaatgtcaagaaactttctggaggagagctggctaacaggaggaggggcatggggaagagaagtaaagaaggcaaggccatagctttgcttagaccacagggccactgaaactgttctttggttagtttgttgtaattcttaaagttcaaacaacaaaaaatagtgggccccacctgtattcttgcacggccatatccccttccctgtgcacgagaaaaatgtgtgcatgtgtgggggtgcatgcaaggtgggtagggcttttggattggggccatttttaccaactctgtcattggcctgtgttcatatatgccatctaggtgggacaacatttatggccaaagacatgaggaatggtgcctgaggggaggaaggtgactcagaggggacctagtaaagtgccaaaaagactttccagcaagaggaccctgctttcaaatcatcttttactgcctccaaaggccatatacgctatgatgcactggagacaggaaggtgctattttcaaatcttgcaatgcatagtaagatgaatttggtgtagaaatatacttttcttcctgtagggaatagggggctagttatttccaagaaaagtgaaactcataatttaaagcaagctgtgctttggctagccaaacctagatacttaaactctgaatatctgaaaaatacccaagaatagggcattagtttccatttcctgcaccataattaacctttgcttagtctccttagaacaaatctgcaaaatatttccatcattgatgagcctctacaatgcatacgttttgttaaacagcaaagcagcttgtgactaaacctggcacatttagccttatcagcaaacctaagaaccagatgtgattgtatttttataatgagtttatttttgtccttagattgctttggattgcccatctgagctctgccgattatatacgcaatttcaagagccctatctaaaggatcctgctgcttatcctaaaattcaggtcaagtagttatgaagcctaagatttttctaaaattaattttctttttaaaaaatgggtcccagctgggtgcggtggctcacgcctgtaatcccagcactttgggaggccgaggcaggttgatcacgaggtcaggagtttgaaaccagcctggccagcatggtgaaaccccatctctactgaaaaaatacaaaaaactagccgggcatggtggcacatgcctgtaatcccagctactcaggaggctgaggcaggagaattgcttgaacccgggaggtggaggttgcagtgagccgagattgcgccactgcactccagcctgagtgacagagtgagactccacctaaaaaaataaataaataaaaataaaagtaaaaaaaaaaaaagagtcccatataggaaataggaattaatattttcaaagatgaaaatgtttacttttttgtactttttagtcaggccaagttaactgccaatttgctgatgatgttatttctctgttcaatacagatgctggcatatatgttctattctgttccttactttgtgactgcactgtatggcttagtggttcctggatgttcctggatgcctgacatcacattgatacatgctggaggtctggctcaggtactaagaatattctgttgagaaggtttacttgtggtctaggtgtcaattgttgaatatatgaaaaacttctctgctcagtgttttagactaggagatagctattagacatgtcaccttttgttttgcagttcttcagaagacatttctgcaagtacattttatttcaatctcacaataactatatggtagatgtgccatccagttacacagatgaggaagttatctgtggtccagtgaagttaaatgatttgcccaaggttacacacccagcatgtggcattgttgttttattggactgtttcacaatctctgaataccatggctactaaaaaaggattgagagctgtcaccttcaaaatgtccatccaaatttaagacttcagaattccactacgctatgctatacagaaccagggaaactggtttaaaaaatgttctgggcctgtcatttcattccttttccgctggcaccttgccaaatatttggcctagagtaggtgttcagtgaatgcttactgcgtttaactgaaaatgaaattatctatggagaacttcacacataacataaagcacatttttacaagataattagcaaaacaaatcaatcttctgaacaaggaagaaaattaatttttcttactagaaataaaacaaatgaacttatcatttaaaaacattagcttcatcttgttcttttcaagcagttataagaatgaggttcatctagaaactgtaggcttgtacagtcaattatatgcatggtataataatcatgatcgtaagacatactagaattcacacggttgaaaaatatagtatttaaggggtcaatgcattaaatcctttcagtttgaggtaattcttaattataaaattagcatagtagtatcgaaaaagttgatgtagcatccagaagtaatggttcctgtcctttccttgaggggcttaagaaggaagagaactaacatttattgctctttgctggttgtttttcctttgcagacctctaaatacctgattcctcagtccttggggtttatttctgtattttaggtctttatctttgtatctttcaataccaactataagctgataacttccagttttctaccttcggcccacaccgttcccagactcctgtatttcattccaaactcagtctttttacttgcatgcctcactagcacctcagatttaatatataaaataggacctgatcctccccacaacctctcttccattttttcattatctgtttaaatagtccaattgcatccagcaactcaagccagaaacttggagtaattatttacactcctcatcctctacatctagaccaccactaagtccttttttttttcttttaaagagacagggtcttgctccatctcccaggctggagtgtgatggcacagtcatagctcaccgcagcctcggactcctaggctcaagcaatcctcctgcctctgtctccagagtagctgggactacagacatacaccaccgcacacagctaatttttaaattttttaaagagatgggatcttattttgttgcccagcttattctcaaatgcctgcttcaagtaatcctcctgcctcagcctcccaaagtggtaggattacaggtgtgagccaccacacccaaccaggtccagttagttttactccagtgattctccaacccattttttttttccagctccgctgcccctacactagtctgagctctcattaccttacttcatgccaggcaaaccacgttaaaagttttacttacctatttgtctaaggataggctatgtgctctgctgctgtaacaaatactcagagtagcttaacacaattaaaattttaattcttttttatgcaaagatcatgtgggatattttcaaggtccaggcctggcaccaggtcaactgaggggaggctggtgactgtggtcttcctgcctgcctcagaataaacagcacaatggacacataataatatcttttgtaatagctctgggaaaaaaaccccaatttaaagatgaggaggctgaggctcagtccacctgaaattatttgcctaagattacagttattaaatggcagaataggtttatgaaatcctgtctgactccaaagctcatattcttctccattgtgttatctcacccaccccatgcaaacaatgaactatggcacagagtcctacagcacaaaagactgtatgtagtacgaggtgctggagaaccttgtgggtggaaggcagtgacattccgagttggactctgagggccaagtggggctttattaggctgagcctctccagggaataacccagggaaacactgaggtgtgggcatatgcagcaggtctgagggcagagtaagccttgcctttttttttggcctggttcctctgccttattctcctgtatccttcagaacagatggccgcatacccacttcactcttgccagccctttctttagaggattagactgttcagtttgacagctgttcagtttgacacctattacctgtgtcaattgtgctttgcctgcacaatcaggcctcctctgcctgccatgtgcctggtcggcctggtaccagtccctgatgcaggaatgctaagtgtcatcagccagcaggctggttaaagagaccagatgttggacctggtcaagtctcaggagacaaatggaaacagcaggaaaacctaggcaaaagcctagtcacatggccagggtcaacagtcaggaagcttaggaaggtcatagcttagaggaaaatgggtgtggtaagcctgtagcaataagacaaaccctaatctgttggtgaagctaagcttgcaggtgggcacttattactccagccaagtggttctgagaagggcagtgtggactacagagcagctggcagccgcaggggcattacctcattcatgtcagacgtcaggcatcctggggcttatccatcactgcccagttgataaggcagcctgaagcccctctcttgatggtgaatgcccagatccagagcctaaggctaaggaccagatcctgtaaatgtcagaaggatgtttctcccagcccagcaggtgaagacagactgagtaaagaattatgggtctgattcccacagctcttggctgagctttaatatctacccacttatagtgtgtaggctaaggaaaagttagaagccatgccgcaacaaaacaatagatatgaccagaatactgaattacgttatttgttttgtacttagcaaatactcgcttatgaaatggagtctcatcttatgggagtatctgacacattcatcacagaaagcactctccagcaaggcacggtggctcacacctgtaatcccagcactttgggagcccgaggtgggtggactgcttgaagtcaggagtttgaaaccagcctgggcaacatggtaaaaccccatctctacaaaaaatacaaaaattaggctggcgtgatggcatatgcctgcagtcccagctactaggaaggctgaggtgggaggatcacttgaaccaggaggcagaggttgcagtgagccgagactgtgtcactgcactctccagcccaggtgacagagagagaccctgtctctcccaccaccacaaaaaaacaaaacaaaacaaaaataggcatttttctgtaactttaatcagcatctttgcttgctaaaattgccattcttatttagaaaccttatgcattcatgatcccactaactttactaaaacttacttttactgaaacatctagtaaactctcaagaatctatgcaacttagtaagggaaaaaaaaaccacctttgaaaagttctagatcagtataggccaatggaagaaatattgagtagtggccaggcgcagtggctcacacatgtaaccctagcactttgggaggaccaggcaggtggatcacctgaggtcaggagtttgagaccagcctggccaacatgacgaaaccccgtctctactaaaaatacaaaaaattagctgggtgtggtggtgggcatctataatcccagctacttgggaggctgaggcaggagaatcgcttgaacctgggaggcagaggctgcagtgtgccaagatcacgcccactacactgcagcctgggtgacagagcaagactgtctcaaaaaaaagaaagaaaaaagagtgagtagttattggggccttgatttcagaccatgtaggagtctgccaaatctgctgccttcagaaatcaaaagatcaaggaaagagtaaaagaagattgaataaaatgaaaccaggacacattttagaccaaagagttccactggggacttactcataacccaggtatcttttcatataaaatgctaaccataggattaaagctgcaagtgtaatctgaaaggcattataggctgcttagatccacttattagcatttcctatcaattgaagcattttctctgctaaaatatcaatgaaaatgaaaaaaagccaaagccagtagagttcatatagttaggaacataagctctggaggtgaactggttcagattctagcctgttgctgatgagcacaatgaccttggctactttacctctctgatcctcagtttcctcttctgtaaagtgaggataataacagtagctttctcatggaattgctgttagggttggatgaggtaatacatgtaaagggcttaaaacagtgtctggcacataacagctatgtaaccctttgttgctactattactggtagaagattcccagtaagaatttggagatatgccttatgttgttccgaagattaacctgaagacaaactaattaaattaagtgtattgtatataattaccaagaaaacaaagaaactgggtgaaagctttgggacagactcaccatgggcttggtaaggagcctgccatcccacagccagcgaaggaggttcagttacttcagtcaggtgctgccctcagactctctaactccctggctatgtaggtgctatgtcatgtctttttctcacaaagagatatggaaacttacgtgtgaataatttggttgtgaagagtttactgaagtaaatttatcattttttttttaacttgagacagggtcttgctatgttgcccaggctggtctcaaactcctggactcaagtgaccctcccgccttggcatcccaaagtgctgggattataggtatgagccaccacgctcagcctggaagtaaatttcatacggtttttccctcatggagacgttaagaaaaatctgaaagtaacagtttaggaagaacacggatagttgggatactaatgcaaatcttgttttcttcatttgcttctggtgtgattcattgctaaacatctttatttagtattaaattatactgatttaacatcttttatgtacttatcctttcatggagacactcacagtaaaaaggtcaaaaggtcaagagaatctaaaaacaaagggcccagattttctacagtcgagcaccagatcatgaatgggtatttcagttttgtacttgtgtctacagaatagccccaagtgcttgacactgtctaagcatgtcacaaacatcacctcactgaaccctcataacaacctatgaggtgggttccacacctcacccgaggccatacggctggtttgtggtggagctgtgatttgactctggatgtctagttccaaagtcagtgttctgaaccaatgaactatgttgctcagaaaactctaagaaaagataacacagttctagattagctatttatactgtattagcaaaagaccctggctatcatcccaatggtcacctaagttttctgcctataacattcacatggacatataacactctttcagttcctccttgtggaaccacgattaacttttttagttatcctttacagattgtctctatacatgtaagaaaacagctcttaaaatttaacctttgttcaccttattgtctcatttgccattccaatcatccattcttaaaaaaaaatcagagtatatctcttaattatttctgtaaggtgaaaatgatttagaatgaagtggaagaaaaattattagggactcaacctcacattgctaaattctggagaaatttctaggatcaacaactcatatctgtaatcctgggcctcctgttaattcagcagcattgagttcactgagccacctgaccccagcacaggctcaggctgagctcttcaggtcctgccatgagaggccttgtgctgctgggaacatcacccaggagaaaacctgcagccctttattagctatgtgcttgggaagagaaacctcctcaggtgagactgtttttctgaacttcagaaccctgaacacttaacatcctatgccttaggagaaagctatggtcaggtgctcactcagctggaagtgtggccaccataagtacatccattaggactatgagcagtactgggagctgcacaccactggccttagagttcttctctcacatacaaatgcctcttttgattatgaatgttaaaatttttgtgccttgtttaataattctgaataaagaggcctactaaaatacatacaaaactagagaaatgctttgtagaccctttttgtattttgacagtcacaagtccattgttgttgaacgtttattgagctctaacaatgtgacaggtgccacacaaaacattagacacagtacctgcccagtgggcttacaatctaatctaaggacatgaatctttttttttttttaaagacagagtctcactctgtcacccaggctggagtgcagtggcacaatcttggctcactgcaacctccactccccgggttcaagcaattctcctgcctcagcctcccgagcagctgagattacaggcgtctgccaccacgcccggctaattttttgtattttttagtagagatggggtttcactatgttggccaggctcgtcttgaactcctgacctcaggtgatccacccgccttggcctcccaaagtactgggattacaggcgtgagccactgcgcccggccatgattcacttaatgttgccatgagtttgctgttcatgaaagtgaggtattaactgcactggttagtgcaggaaaagagcctacggaatcactgactttttacacaggctcccctatgcaagtaggcacaactgctcatatttattctctcaaagtatggttggcatttccccaaatttggtgattttgtgatgtgtacaagtatctataaagacagaaccaccaaacccagatttctgagaaccagggatcaaatgtggcttccagtccagagaaaatgcttggttatatattcagaaaaacactattattcaaaacaggccctaaggaaaaacagtatgggagccatgctcctgctcagagttcctagaatgtccagaaagcacctcctcagggcagccctgaaagtgccctttactctcaaggcattttgtcctcagagcccagagatgcatatacatttgctgggttctgcctgggcatctacccaggggagttgtatctgagggccgagtcctctcagtgcctcatggatcacaatgtagacaatccacgtgctggtccttggcaatacatcatgctaatttaatttatatctccagagtagcaaaaatgtaccacaggtctccagaatatatcaggaatttgtaaaaatgcagcccattaaaatatctgccactgataaaaaattcataaagatgctgcttaaaaaaacttgtccttttcttgtcatggtgaagtcaagtaagtaacacctttatctgtgaaatcactcagcagaataaattggtttcatatggaagaaatgtaaaataacttatatgtatttaaagcaaattatctagttcttcattcttgttacttctatgccttctctatagtgcagtcttttgtctctttgatcctgatgaactgataatttactacttattacatttagattcccaatcctttattcatgtgtatcttgaatttcagcaagatatgaaaatgcagactccaggggtacattttgtaatgatacaagccttctgaggaaattttctgacaggagcttttaatcctgctgtggtctgttttaccctttccaatacggttttcctctgtgcttgcgaaaaatatcaaaaaagaccaattggcacattctgaatgtgttttctgaataagtatataagtagagagggaggccattttgcaaatgcggataatgctgacatgtcgtacttctaaataaattataatttgatttaaaaaggttgcctgcatgtacatttgccattttacaaagagcaaccgtactcctacctccacccaagttggtaacaaccttatcttacaaacaacccttaatattttaaaagctgcagaaaaaacaaatacatgaataaatgaataaacaaaaaacacatagggaaagggtatgagctcttgctgcaaggagtagatgaaagactgataaatgaagctgaggtccccccagtgcttccctttcaatagtttatgctaaaaatatttgttttttaaaactctgcgctttcttcatttttattggaacgcaatttgtgaaccacaactgagtctgtatgcaggatctccagaacgcaaatcagaaaaaaatttgagattttattcagatttttctattagattgagccactaatgttcggtaaggggcacttgatggttaaaaaacacaactggcatgataaaactacactaaataatatctactttatttgaacagtcatatcaagaatggccctaaatttaatcaaggactaaatttaatgaaagactctgacattaaagactctggattgtttgaaggtattttgcctgcaggtgagactggttttgagggcacagaaacgtagcctgaatgaaccattcagaactcatcatgcatccaactgaacacgtttcatgcttactcaattttttttttttaaatgcaacaggctcagttttctcacattggtgcatctcttcatgctagaactgcttatgtctacagagtccctgaagaagcaaaaatcctttttttagcattaaacatagcatatggagttcttcctcagctcttggcctatcgttgtatctacaaaccagagttcttcataaaaacaaaggcagaagaaaaagtggaataa

SEQ ID NO: 14521 - DNA, 1020 bp, Homo sapiens
atgagtgcctctgcggccaccggggtcttcgtgctgtccctctcggccatcccggtcacctatgtcttcaaccacctggcggcccagcatgattcctggactattgtaggggttgctgccctcatcctgttcctggtagcactgctggctcgtgtcctcgtcaaaagaaaaccaccccgggacccactgttctatgtgtatgcagtttttggatttaccagcgtggtgaacctcatcataggactggagcaagatggaatcattgacgggttcatgacacactacttgagagagggtgaaccgtatctgaacaccgcatatgggcacatgatctgctactgggatggctctgctcattatctgatgtacctggtgatggtggcagccatagcatgggaggaaacttatagaaccattggcctatattgggttggatctattattatgagtgttgttgtttttgtgccaggaaacattgtagggaagtatggaacacgaatttgccctgcttttttcttaagcataccatatacttgtcttcctgtctgggctggtttcagaatctataatcagccatcagaaaattataattacccctcaaaggttattcaagaagcccaagcgaaagacctgctgagaagaccatttgatttaatgttggttgtgtgtctcctcctggcaactggattttgcctgttcagaggtttgatgctggcatatatgttctattctgttccttactttgtgactgcactgtatggcttagtggttcctggatgttcctggatgcctgacatcacattgatacatgctggaggtctggctcaggctcagttttctcacattggtgcatctcttcatgctagaactgcttatgtctacagagtccctgaagaagcaaaaatcctttttttagcattaaacatagcatatggagttcttcctcagctcttggcctatcgttgtatctacaaaccagagttcttcataaaaacaaaggcagaagaaaaagtggaataa

SEQ ID NO: 14522 - DNA, 19108 bp, Homo sapiens
gtgctgtccctctcggccatcccggtcacctatgtcttcaaccacctggcggcccagcatgagtgagtgagccggcgcggcgggggtcgcgccgaggggcggcgggagttggctcgccgcgacgggagcctcgcaacttttccgagggggctgggaccgtccgccgcgggacagaggttcgtggccgcaggggctccccgcgcctggccagactaggggggcgccccaggggtcgcacgggccgggtcttggagccgggccctgaggtgcccaggctggcgcatttcgggatgttggtgccagcaccgcgccaggtgcccggggtcacaggcgtcaatacggccatgcccctgccctggaggggcccaggggccggtggggagcggaacaaacacggacactacgaacctggccgtgtcagctcgtttgtgccttgttctttttgcatctcacgggaacgtttccatgtatggactttcgcatacttatcatttcttattaattttagaaactgttgtgaatgactagcagaaatagcccggaaccaacaggcagagacgtgggttctaggcctggctttggcactgacggtgtctggcctgacggtgtttggcactgacggtgtggtctggcctcggttttccggtcaagtggactttgtgtgcgtcctattgtaaggttccaccgagacctctttgtgaaggggcgttgtgaatggagaagtgcttcccagtgcctgcgctggggtaggatggggacaggcagcagaggcagaacacttcaatgtgaaggaaatgggtggggctgatggagggggacagggcttgggttcgaagccctgcctcccactccactgcagggatcacggactaacctgcagccggcagctgaaggcctgagggtcgccgggtgttgggacaggcgccagcctctgttcctgctgatgttggttgctgtctggagggaggaggaagtaacctgctatgtctctcagctgttggtgctaaggaaattgcatcagtctgtaggctgcaaacccccttcagctggtcaggccgtggagtgtctgtacatagggtggtaacttcctcctctccagctgcctggccgcctgatacaggcagcacccacactgagtgctcaccaggcaccagcagtgtctacccttggtctggcccagtctctggaggcatcccctggaggcagctgctctgggccaccgaatattacatgcctgtcaatatagtgcatgggggaccctgtgctccaaaaaatggcattacgggtagttcagtgaagatatactgagtgcctactgtgtgtttggcactgttccaagtgttggtgacatagctatgaacaagccagaagaggctgtggaggcaggtaatgagatagacatcaacaaacattaatacatcgatagtgacatgctatgaagataataaaatagggtgactggggagggggctggtggccagggaaggcttctaggaggaggtaacacttgagctatgggaagatctgggaatggagcctgtcgggcaggaaaatggagcagtgcaggggaaggaattggatgggcgtagtaggtattttggaaggtgaacagatggggcttactgaagagggttgcatggcagcagaggatttgaggatgagccctaggttttggcctcagccactgggaagatggtgatggcatttactgaatacagactgaactatgtattgctgtgcatgatggagcgcactggcaagcactacagcattttgaataattagtgtcagccattcttcctgtcctcttgcaggttaaaacccccgtggcctttgattcctctcttctttctccactcccttcctcctactgtctgcttccccataagtcctggggctctagtgtctgttccctcctttcagttctccctggcactggccctttctgacctggactgtggcaaaggctccggtgcaagtctcgctgcccagccccgctgcgtgtttctcggcctcggccccccagtcccagcccacgcactagtgctcctgccgcaccagcctgcctttgctccttgaccattcctcctcctctccagcctctagcccggactcctgctgctccctgacagggatgctgccttcctcctatcgcagactgttgaagccgcacctggactttatggccacttctaccttctgcagaccctccctctctctcctttgagctccctcagtcccttgtttgcacctttctcccgagagttactttcctgtggtaagaacttacctgccccggctatagctcacccctctgtactgtcctgcccaggccagcgccgtgtgcatcgtaggcactcaggtatgtttgactttgttgaatcgagtttccttcccaccaaaccttttatgcaactctgaaaaccagaaaaagaaaattagattgagaggtcaggaaaggattgagcgtgttctgtctccctctctcactgagagagacacactgctcacactcatccttgcatgtcccctctcagtaggtgtctgttcatagaagggcatcagcagcccttcccaccccccaagactagcaactttctcatcctggggttagtcgcagcccttacctgtccctgagtccctgcaggacctgtttcttcctgtggtgagcaggtcctgcacttggctgttgtaggagggtctctggggacagtgccaagagtcagagacaatctgctgccctagtttcccttcattcttccctcctctcctggagctaagagcatgagaggacgctgtgaaccagttcacactgctctgtcctgctccagaagagcaccaaccacgcgatcctgctggcagtgagtgcaggcccttggtaggagtgaagactggagttgtcacctgaccaccacctgcctcaggctgttcaccattaaaatgcctgtcagctgacccagcacacccacctcttccctcatgggattcttcagcccagcatcatactcttgacccacactggcttcctccttcttcagctcatccccacaggaggagcctggagcaaccactgaagtgcaatcaccagaaacctcctatttttcagtttctcacctggacattgaaacagccaccctcattcttttttaaaaaatgtaattaattgttattattttttgagacggactcttgctctgtcatccaagcgggactgcagtggtgcaatcttggctcactgcagcctccaacccccaggttcaagcaattctactgcctcagcctcccaagtagcggggattacaggcatccgccacctcgcctggctaattttttgtatttttagtagagacggggtttcaccatgttggccaggctggtctccaactcctgacctcgggtgatccacccgcctcgacctcccaaagtgcttggattacaggtgtgagccactgcgcccggcctcattcttatcatagaattgatccatctatcatttatccatccatcctccatacattcacccatactccatccatccactcatcatcatctatccatccatttatccatcatcctccatcatccatcaattcatccatcatccatccatccatttatccatcatcctccatcatccatcaattcatccatcatccatccatctattcacccatcatccacccattcacccatcatccatccatccattcatccatcatctatccattcatccatcatctatccatcctttcatccatcatccatccaaccattcacccatcatccatccatctatccatccactcatcgtctatttgttccccccttccctccctccttctattcttatctttctctctcctaggggacggtgatagttatccaaaggtcccgatgttgggctgtggtggtgtggaggggtctcagttgaggagtggtgcttgtagctgctccaatctgaagaggtcctggtgtagcaggccattggagtgggccaggtagtattttgtctagaattggaagccctgtcagtgctggaggtgtgagagggagagtattgctgttggactgcaggagaactcctagtgggtagagctcagagtccattgagataggttcctccatgtaggcagggacttctcttatttatccagtctcctagggcctgcaacaatggctaccacataggggtgcagaatacatttttttgcttgctatgtttttgaattaattaataaacagatagatgcaatgatgtgactttcctagggtgacacagttagcaacagaatgggtaccaggatcccggtttcctgactgataactctaccaagcctcgtgccctatcgctgccccactgagtagcggctttggcccctgctgtccttggtgccactccctttcctgtagaacatccaggggatgtactcaactaagcttcaccttggtttctatggtttggggttggatgctggtctgttggccctggttctggggtgttgggctatcttcattctggcctcaggtctagtccagactccttctccatggatttcctggcctcattctctggcccatttgactatacacataacataaggtctttcttgtcccctggaaggcatgtttagttgtaatgcctatatattccttggagctcagtctgagggtttctgactggccctgagggaggtggcagagtcagtggtgaggcctgtcagctgctagggagcaggggttagaggaacgtgtaagtggaggcagtggggcagtggccataggtgcagcagggtggggtgaggcagagggagctccagacgtgtcatctgtgcacatgagacaggataagaggagaatgaggaggacctgatggcttcggtccctgaaagtcatgggctgcagcccagatgggccaaagagctgcagataaacttcactaactctacagtgctgggagctgcaggcagaggcagaattatggatgaattatgcagcactaggagggaatgcattcaatagtcaggaaattccaggcaccaatgtgtttattttgatagtgaccacctccctgttctggtcgttgcagttcctggactattgtaggggttgctgccctcatcctgttcctggtagcactgctggctcgtgtcctcgtcaaaagaaaaccaccccgggacccactgttctatggtacgtctccacaaagggaaatcttttgtatctgattaataacacaatactttcagcctcagtcacatattcctccttggttgtgaatactctgagccctttggtaacagtggctgcaagtgtaggggtgtttcaggacaatctggccctcgcctctggctattgcctctcaggcagtggactccaccctctcccaggtggcatcccggtggagagttactgccaggccaggcagggcaccctgccaaccccagcatgctttgacctctgacctctgacctcgactctcatgctagctccttcctgggcttcctgtcttcagcctgctactagcagtcccccccacttagtgcagaacttaactgtgtggtgtctgggtctgcacatatgcatgaagaggaaaataatggaacctgccatagagacaagcacctatagtgcaccttgtatgaccctgagcactttagcagcaggctttcacctaatcctcaccatccctccacttgaaagtgaagcagctggcttggagatgctaagaaatgtggcaaaggtcgtgtggctgttgacccctaaagcccatgcccttccatcatgcatgctgccccagccaagctgctaccggcctttgagcacttcctgtgccaggtaccttgctgggcattttgttctgtagtttctgcttcagtaatgctgcatatcaaatgcaccccaagtcctacagcaacaaacatttatttttcttgctcacaggtctgtgggttggggccactctgcatcaggctgtgggttgatttcagggctgttctctgactccttgttcttggaccagcagctcccaggcatgcccttctcatggcagatacagaggcacagtggggctagaaggaagaaagtggtggctcttaaggccttggcttggagctgccccatcttactcccacccatattccaatggctgagatgaggcatagggccaagcccatcagcaacagcatagggagcattctctgcctacagtgggccttgggaaaggtggggtgggaaggaagaattgtgagtaactagtttctcccaatccacatataagaagctctgaagcttcagaaatgatgtaatttgcctaaggttttacagccagtcattagatgagctgggtccgtctgctttcaaggcccacatgccttttcctggctctctccactagcctgtgctctgacccttgcacacctttccagatgagtttcctgctgctgtctgtccctcctgttcctccccactccatggagcctgtattaactgtactgatgtctctcctgactcttcaaggctgggcaccctttctcctgtaccctcagccctctgtcctggtctgttacaactttgagtacactgcagcctcagggtgaggctcaaggccagactcctcacgtactagaaggcagagaccatgtccttgtcattgctaacacagtgtctgacacttgtgttgtcatcagcaatcattggcagattatgtgccgaacacttcctttcttggagacatatgatggctaatcacctgggaggcttctggaaaatgagtatcaggaagtgacactgccaatgagaactgggccaaaggcccccatggaggcgtggggaaggcacatctgcaaaacagggcacatgtggccttttgttccttctggggagaatgtgaatgctggactcctggctgctgactccaggcaaggccggcttcccttctctgtgaattaaccatccccacactcctctccatttcttttttcacagcttttcttatattcaccatcagatttttcttctgtccatgtccatcccatagtctaaggcaccaatctgttacaacttgaaaatgcagctttgacaaactaacatgcactaaatttgatcacctgctgtttaaaaagtattatttcttagttatttgtgctagtagttttaagcccatttaggagatgctcacaactctggtaagattctctgacaggtatagctttccttctgtcatattcaattataccctcttgtattcatttttaacatcactagtcttttttctgaaagccattgtcacttgcacatcagccacctgtctgtctctaggatacgccatgtggaatagggtaaccacactggacacgctgtgaggtggcctgcttgggaatcattgagatgaatcacttcgtcaagtcattgtctttttttttttttgagacagagtcttgttctgtcgcccaggctggagtgcagtggtgtgatctcggctcactgcaacctccgcctcctgggttcaagcaattcacttgtctcagcctctggagtagctgggattacaggcgtgcaccaccacacccagaaaatttttgtatttttagtagagacggggtttcaatatgttggccaggctggtcttgaactcctgacctcaggtgatctgcctgcttcagcctcccaaagtgctgggattacagacttgagccaccatgcccagcctgaatcattgtcttaaacttagtggtcacttctatgcttccttggccactcagttactggctttgctcccactgcccatgtgggatgtgggtttgattctgggcagccacttgtaggggagtggaggatgggtggagttggcctgctagaatcttctgtgactgagccggcagtgaccatcattctccactcctgtgatgagtgttcccttgatgagagtacttaggcagggatggggagagctgcgaacacaggtggaggtccagctgggtgtgtagaaggggtattctgttagtctatctcgataattgtccacagcatcttctggaaaacatgaaaaacattccattattattagctgatgccaagcttgtagtaattgtctcctgagctattgctttttaaactgctgctttctttgctctagtgtatgcagtttttggatttaccagcgtggtgaacctcatcataggactggagcaagatggaatcattgacgggttcatgacacactacttgagagaggtatgggatcacttagtgattatgaggtttcaaccaaaaggccacaacccagatcacattactcagagacagaaatcctctcatttagtgtgaacaggtacgctacgcaggctttcatttcctataatagccttaggtcgcttagtcacatggaaagtggagcagaaaggacggttagatcacgagaggcaattctctccaacattcagctctcacggcttctctcactcatgaccgcacacatgacctgcttttcccctttatctgtatttaatataaataaggtaccttaaatggatttagtatttatgtgtctgttaatacatgactatctcagaaaccccaagtcagtcttaaatttgtaaagtacccaacacagaggcacttgatgaagtcatttgattgtgatggcttgcactctccaccatgctgcccaaatcatagctttgatactacctggtactcgagagagctagtcctattttcttattttatggtgggctgaacccagccccagagaggttaagtgacttattcaaggtgacacaggaaatgaggaaaagggctcaaagcagattcttcatccatgttcagataatggggagctttgtatgtacgctgtgggagtttgggttttatcctgtctgtgagggaagattttaagtcagtgaagaatacaggcagctctgggaaggatgggcttgcagggaagggtccgtgccatgagctggggcaccagtcaggaggcttcctcgggaccagcaggggcataaacgtggctggatggaggcagcgcatgggaagtagagagagggatgaactttagagaatcggagtggctggaatgaataagacttggggacaaattgggagtgatgggaaggatgaggcctaagacagtgtcctgattcctgctttggaatttggaagaatgctgctgtttttacaccagagagggatgacaggaggaatttatttctgcagacatttgttgaaggggactctgtggtcagaagacctgctccctgccccctgggagctccctgcctgaaagggtggggagatggaattgtcccaggcacagtgagagactcactccaggcacagaagtactcagaggaggaattaagtctgggtgcagtcggggaaggcttattgagttggtgacactgctgtagcattttaaaaatggtcatggcagtggaagatggacatttccagatggaccagggaggtagggggaattccggagagaagggacagcttgggcaaaggcttggagaggagaaagagcatgtgcctctccctggggcaccaatctgcaaggatgaggctgagtttctatggggaggtggagtttcagatgctggcagggctttgcaggtcttgagctctgaggagcagtcctggaagagagagtcacgggccatcggagtgcagttggtacctgaatgtctgagaggagaagggcttgcctatgagaaggtagagagagaaaagggctgagcttgggactttagagaccatggccagaagaagagaagcccctgaagtggaccatggggggcaggccaagaggcagaaggaaaacctggagagtgggggccatggagcccagaggagggaggttttaggaaggaggcggctgacgagagggctggaggctgagttggcaagggtggtaagcattggggcagacggggtatcagaagggggactggggtgtaactgtggtggcaaggtctgcagggccaggctctggggacccagctgtgatagagaggagatggggcttggtccagcaggctgtgacaagttttggggagttttagagtagaggaacaacatgccaagagccaggccttgagaatctttatctggcaggaggagtgtcatgggttggaaggaggggacaaaggtagggagaccatttgggaacatagctgtggtccagtgagggacactgagggctagacctaatgctgtgaagaagagggagaattgccggggtgacatcgtagcaataaagttgatagatttgctgagagactgcataggagaatgaggaatgaaaaaatgaccatgtggttttgaccttggtaagccgaatggtttcaccattaatatagagaggccatggctggcctggtggctcatgcctgtaatctcagtgctttggaagacaaaggcgggaggatcgcttgacgccaggagttgagactgcagtgagcaatgatcaccactgcactctagaccgggtgacagagtgagaccctgtctctgtacgtacacacacacacacacacacacacacacacacacatacagagagagcaagagagagagaggcaagatggaaggctggttgaggggagaagctgatgaattaagagttcaggcgagttgaaaggacctgtggcctgtgcaccatgcagttaaagatgctcatcaagctaccaggagaggccagcactggctcagagagccaggtgtgttagcaatggaagtctgaaaccataaatcggatgtattcttcagtcagagcaagtccaagagaagggacgtgggcctggcatgggtgtagaagcagaaccttgattctgtttcctgcttctctgattttaatttgatttgatctgtgggagagatgacagagcagtccttgccccaggggagcatgaagcttaagagaaagccctgcttgcttggctgattgatgggctggttgatctgcactcttccttgttgtagaaaggacttaaggcatcttacagcgtgaaacaagccaggacagcatgaacgtgggagaaagaggaaaggaaaacaaggtggggccaaaacaacagtaaaaatgcacggaaaattgatgacagtgattttctagaagccacctggaaatgtaaccacctagaaaagggaaatgtagttcgtcatataatcttgtgttcataacattaacatttgcccaggagaagtatggctcttcttggtctctgctaggtatactagctacgtgaccttaggaaagtcttgtaatctcagagcatctgtttcctcatctgtaaaatggactcaatcctgtccatcccactgggttgttgggaaggtagaaggaggggttgggtgtgaagctccgagttcggtgcctgcctgcctatgtgtcagtatgtggggaatgagtgttgtgccatgcccagcccagcaagccacgggatcagcatgaattattaaggccagccactggttctggaaagcagggtcatccctggccacctctctggtcactgccaagcaccttgtgtcaaagatttggcttggtctccatgagtttgccatacagccaggattgcctatcatgccatctgccttcgcatcacagtacaaacctatgttgatgcatcatgggccaattggccaggcattctctaattccatcctctgtggccagaccctggttttggcagctccagcgtaaagttgtattttcatgttcctaccaattttgaagaaatagtttcatcttagcagatgaacacaagttagttctgctgttttattttacttgcaatacaggtctgatgttctgcatttacaggtcttatttaaagtggacttctttttaatgctttctttagggtgaaccgtatctgaacaccgcatatgggcacatgatctgctactgggatggctctgctcattatctgatgtacctggtgatggtggcagccatagcatgggagtaagtcagttcacctggtgtgtgcctttgccaccttagcaaccgataagcgggtatgtaaggaaacgttatgcatagaggcaaatacacaagcaggtatactggacatgaatataagttccatgggtgcacgtcagacgtggctttatcctccttgtaccactgccttttgaatatgtccttctgaattgctccctagcatggtgacagctcgggcagaccctttaagctttctgattatgttgtcttacaagaataatttttattttcagcaattaaagctaagcacatcttaaacttcatttcaaaacttcaaaatttccaaacagcaatctcatttcggttcaaagcttctgtccttccccagatcaggcacagctctgcggcttggctcgcactaaggcttggctacatggcttgtccgttcactcctcctgtctcactctgcggctggccccttggcagtggatgtgtatgtacaagggattaaaggaacaggagccgagtctgatgtgaaaggtgctggtttttgggtattggtacccccatcatgatatgctagcttggtcttgggaggcacacatgtgagttctttagagaccccaaccacaggagcttctgcattgcactaatccctgaagtgaacgacgtgctcttgggctgaatttctgcccatggtggcacacccacagctttttttctgctggggcccctgtaacccagaaggtacaccctttggggaggggtcttttcaaaacatttcaagtccggccatcttctcaggcctccacttgcttctgggttacagaaagtcatgcattcttgccccatacaaggttgaaatgtagtttacccaagtatctccctcactcccaacatgcactcaaggtcagctccagctaattctttttttttttttttttttttgagacaggctggagtgcaatggcacaatctcagctcactgcaatctccgcctcccaggttcaagcgattctcaggcctcagctgggactacaggcgtgtgtcactatacccgcaaattttgtatttttagtacacaaatctaaacatttttttcaccatgttggccaggctggtctcaaactcctgacctctggtgatctgcccgcctcagcctcccaaagtgctgggattacaggcgtgaaccaccgtgcccggctccagctcattcttatctgttctcctgcttataatcccagtcattatgaatgggcctcttggggtctggttacatttggcttgagggcgggggtggggcaggacgcacacagtattctcgtttcccttcagagaatttccttttgaatttctcatagcctgttacatagtgtggagtttgggttattggggttatcaattgaaggaactttttttttttattttgagacggagtctcgctctgtcacccaggctggagtgcagtggtgcgatcttggctcgctgtaacctctgcctcccaggttcaaccatttctcctgcctcagcctcccaagtagctggaattacaggtgcatgccaccatgcccagctaattttttttttttttttgtacttttagtagagatggcgtttcaccatgttggccaggctggtttcaaactcctgacctcaagtgatctgcccacctcagcttctcaaagtgctgggattacaggcatgagccaccatgctcggcctgaaggaagtttttgtcagcattgaagatttggggtatatgtctagcagctcctttgcaacatggggtacatgtcacttgtcttcacctttggggctttggccaaaattctgtgaccccagaaaaagtccatttaacattatcattgtaagtataactcatacttataatgattaaaaatatggatccaatttcatttcttctttcaactttctttttcctttcatgctgttgagtttcacacacaatagggaaatgcaggagtcctgtggcagggatgatcatgttgtagtttaacagaagacatagcaggcgtaatttcctatttaaaaggacacgaagaaggttctatagtatatcacatggcaatgaagttacataaccagggctccttgtgtttgatttattcctctcaattcaatatgttttgattgatgtactttactagtttgaatacaaaataatattgaagatcattttttgcttagtattctaagacaaacataccaagtcaagatttttttgttgttgttgttacagggaaacttatagaaccattggcctatattgggttggatctattattatgagtgttgttgtttttgtgccaggaaacattgtaggtaagaaactttatcttaaagttcactttccttttctaaaacaatggggcttgtttttaaatagagaagctcttttagttataatagaaccaagtgattccaagcttactaaaaacctgttttgcagaataattcctttttctcacctttaaaaaaagtactttttaagaagtgctttgagcaattttcagatgtgtgcattgaacaatttggcagtcaagttatcagggattcctgtttttttagaaggatcttgagggagtgagtatggtgtttatggctatatttagtgtgcaaatatgttaactcctgacacactatgagaactccaaaaatgtacttggaaattacaagtacattattaatgtatgcaggaaatcaggatatataggtagatagatagatagatagatatagatatagggagatagatatatacaaacatatatagatacctatctagatgtattttttgagacaggatctcactctgttgcccaggctggcttgcagtggtacagccatagctcactgcagccttgatctcctgggctcaagcagattactgtagataggacatgcctgttaatacacatctagtattttaaattgacctttttaatttggcctcattaaaaatattgtctggcccatagcaaaattttagatgacctgagatggggaggtatcctaaatattacttgtgttagatatgcttttggtaacttctttctctttctctcttttaaatagggaagtatggaacacgaatttgccctgcttttttcttaagcataccatatacttgtcttcctgtctgggctggtttcagaatctataatcagccatcagaaaattataattacccctcaaaggtgattttattaagctttgatgtaccctgttctcaaactcatagggttctttcgcatccactggccactgaattgaaccatgcctctgtggactggagcatttggggcatccaaacagtgcgactgttttgattatgtagcattagcttacgtattaattaatgtaggcaagaaggtctgtttctgtctgaatacatctgcttctgttggcaaggccatactttggggagcttcctgtgccagtggtcacactggctctaactatcagattctgcattagtgtgtcaagtgaagtccatagtgtgtggttcatctaggattgttaatggcctggacgttgaacacctgggttcctctgtgacacctatgcatttactaccccaagaggacactggagggatactgctcctcaaggtagtctacacagccatacaatcttgactccagagatccaggcccatagagactggctacaggacatctgagacacctcccttccattcacagccaaggtagtcaaggtgaaacagcactggcctggcagatactctgttaaggccttcatttctaagctagtttctctctgtttcttttacttttctaggtattagatcatttagcaagatcttttaagcaaaactgatatatgaaaatatgaattactagagataatcagaatacgactattcattttacaaaagattttcagtataattcattaaaatacattttaattgacaaatacttcatttgtaaacatttagacaccttctatgtaaactcaggctggcacactgacagctggtactaacttccctctgaggaaagaggtggctgttaaaaagaaaaagcaaatagtcagtccacccttagtcccagctccactgcttttaaaggttccatgtcagtgtgtcaacagagtaggtatgccatgaggcatgcagaattacttatcattatttttaatgtgaaaacacagtgacagccagggccaagcaggcattgtcatacagtgctgacagaaacataaattcagaattgctctgcaaagcaatttggcaatgttatcaaccttaataattctggaacccaataattctgctcctagagccctatcttcaggaaatcatcacacagataccaccaaagatttacaaagttgttcatcattacattaagtataacagtgaaaaatgcctaaatatccaacagtgggagaatggctaaagtgtggtgtttccatatggtattcagtttgagaaaatttttaaacatgtgggaaagtgcttataatataggcagatgttgagagcaaaaagaacaaatacagaattgtttatatacaggaataattttatatataaaattgttcctaattttgtgaaaaatgtagatatatgtgtgtgtatatatgtatgttgtgtgtatgtaactatatctatttacatgtattactggaaaagtataccaacggttaatagtggtgtggcaggtttatggtttacctttaaaatttattatcattaaaatgtcatttcaagaaaaaaagtggactcatagagctacaagagcccttcgagagatcatttagcccaaattcttcatttcacagataaggaaattgagacttgaggaaggaaatgattttcctaaagttccatggccagtgatttatgatataaattgtgcatcttcaaaattctcttatccatcatcatgacatttaatgtttcagatttcagattcttctttggcactttgggcctgctctttaggtacaaactctattttaggttattcaagaagcccaagcgaaagacctgctgagaagaccatttgatttaatgttggttgtgtgtctcctcctggcaactggattttgcctgttcagaggtttggtaagcataacagatcataataacgtaacattgtgatactactcacatttccaaatggaaaaaaacttagaaatatgtttttgtttttccatcagacttcttagcaaactaacaaaccattcctcccatcaaagcctggagccctggacctgcttcctgctgctcccaaccccagcctcctgctgtcacctcctcctgtccttagatcaagctctactcagaagcatcttcctccccgttttagggcatctaaaaaatcagccatcagagtctctcttttttattcttttgatgtttctgatttaaatgtaaatatctttggtaaggatggcaccctaggactgcaacacaactgtggcacagagcatccctgtgttctcaggagtaggggcaatggggttgaggaaggcgtaccagttcaacaattcacgtgtatgtagggtcatgggaatgtctcactggtaagagtagtgttgagtaaattcatctcacgcctggagtctttgtattgatgtgactgaaatacattaagggcacatgggcatttcatgttttctattttctctttattaatattttactgcagaggttaggaaaaagactcacaggctttgtagttagaatcctggccacttactagctgtgtggccttggaaaaactacttaacctcttggactctgttttcctctctgtaaaataacactacctaccttaacagtattgttttggagattaaataatgtacatcaaacacttggtagaggctcttatacatagtaaatgattactgttaggatttttattgatcagtgatccttcacaatgccccaatttgatgatttcttcttagtagaaatgaatttgggaagtttagaattatattgttaattatattcagcttcagtgacaatttctattcgaagcctgttggcgcgcgtaacagttggacagtagagtggcaagtgtaagcccatgcaggtgacttttatcatttcagggtcttgggctactgggggcctgtgcagcaggctgggttcagggtgagaagctgttttaagagttatctttatctgtgaaatgtcaagaaactttctggaggagagctggctaacaggaggaggggcatggggaagagaagtaaagaaggcaaggccatagctttgcttagaccacagggccactgaaactgttctttggttagtttgttgtaattcttaaagttcaaacaacaaaaaatagtgggccccacctgtattcttgcacggccatatccccttccctgtgcacgagaaaaatgtgtgcatgtgtgggggtgcatgcaaggtgggtagggcttttggattggggccatttttaccaactctgtcattggcctgtgttcatatatgccatctaggtgggacaacatttatggccaaagacatgaggaatggtgcctgaggggaggaaggtgactcagaggggacctagtaaagtgccaaaaagactttccagcaagaggaccctgctttcaaatcatcttttactgcctccaaaggccatatacgctatgatgcactggagacaggaaggtgctattttcaaatcttgcaatgcatagtaagatgaatttggtgtagaaatatacttttcttcctgtagggaatagggggctagttatttccaagaaaagtgaaactcataatttaaagcaagctgtgctttggctagccaaacctagatacttaaactctgaatatctgaaaaatacccaagaatagggcattagtttccatttcctgcaccataattaacctttgcttagtctccttagaacaaatctgcaaaatatttccatcattgatgagcctctacaatgcatacgttttgttaaacagcaaagcagcttgtgactaaacctggcacatttagccttatcagcaaacctaagaaccagatgtgattgtatttttataatgagtttatttttgtccttagattgctttggattgcccatctgagctctgccgattatatacgcaatttcaagagccctatctaa

SEQ ID NO: 14523 - DNA, 856 bp, Homo sapiens
gtgctgtccctctcggccatcccggtcacctatgtcttcaaccacctggcggcccagcatgagtgagtgagccggcgcggcgggggtcgcgccgaggggcggcgggagttggctcgccgcgacgggagcctcgcaacttttccgagggggctgggaccgtccgccgcgggacagagttcctggactattgtaggggttgctgccctcatcctgttcctggtagcactgctggctcgtgtcctcgtcaaaagaaaaccaccccgggacccactgttctatgtgtatgcagtttttggatttaccagcgtggtgaacctcatcataggactggagcaagatggaatcattgacgggttcatgacacactacttgagagagggtgaaccgtatctgaacaccgcatatgggcacatgatctgctactgggatggctctgctcattatctgatgtacctggtgatggtggcagccatagcatgggaggaaacttatagaaccattggcctatattgggttggatctattattatgagtgttgttgtttttgtgccaggaaacattgtagggaagtatggaacacgaatttgccctgcttttttcttaagcataccatatacttgtcttcctgtctgggctggtttcagaatctataatcagccatcagaaaattataattacccctcaaaggttattcaagaagcccaagcgaaagacctgctgagaagaccatttgatttaatgttggttgtgtgtctcctcctggcaactggattttgcctgttcagaggtttgattgctttggattgcccatctgagctctgccgattatatacgcaatttcaagagccctatctaa

SEQ ID NO: 14524 - DNA, 4552 bp, Homo sapiens
gggagcccgcggaggctgctgcagcagcccgaaccggcgtccgagtccggggaaggcccccgcgagcgcagggaggggccggaaagttccggcgaactgggggagcggcagtgggagagcgtcgggcgggaggcggtggtcctgggagcggccccggcgccccgaagccgccccgagctggtggggagggcccggccggtggggccccgggggcctgcgggggaggggcgcctgggggtgcaagaggcgaattggctgcccggggtgcaggagggacaggtggtgcgggctgtccaggaaacctacctgaacgggaaggagccccaggagggagagggacccggcgaggggctcaggacccggaggcgccggcggaggaggaggtggtgactggcaggcccgggccccacggtacctccggggctgaaggggacgcaggatgtaggggcatggggagtcgggcgcagaagagtgcggggaaccgctgagctctgggagccactgcctgagggcaggccgcggccggcgggaacctcttctgccgtctcagcctgggcgtcgctgaagctgtgtctgcggggaggcagcggaaggcggcagaggctgggaggcggcagaatgcagccagaggagggcacaggctggctgctggagctgctgtccgaggtgcagctgcaacagtacttcctgcggctccgagatgacctcaacgtcacccgcctgtcccactttgagtacgtcaagaatgaggacctggagaagatcggcatgggtcggcctggccagcggcggctgtgggaggctgtgaagaggaggaaggccttgtgcaaacgcaagtcgtggatgagtaaggtgttcagtggaaagcgactggaggctgagttcccacctcatcactctcagagcaccttccggaagacctcgcccgcccctgggggcccagcaggggaggggcccctgcagagcctcacctgcctcattggggagaaggacctgcgcctcctggagaagctgggtgatggttcctttggcgtggtgcgcaggggcgagtgggacgcgccctcagggaagacggtgagtgtggctgtgaagtgcctgaagcccgatgtcctgagccagccagaagccatggacgacttcatccgggaggtcaatgccatgcactcgctcgaccaccgaaacctcatccgcctctacggggtggtgctcacgccgcccatgaagatggtgacagagctggcacctctgggatcgttgttggaccggctacgtaagcaccagggccacttcctcctggggactctgagccgctacgctgtgcaggtggctgagggcatgggctacctggagtccaagcgctttattcaccgtgacctggctgcccgcaatctgctgttggctacccgcgacctggtcaagatcggggactttgggctgatgcgagcactacctcagaatgacgaccattacgtcatgcaggaacatcgcaaggtgcccttcgcctggtgtgcccccgagagcctgaagacacgcaccttctcccatgccagcgacacctggatgttcggggtgacactgtgggaaatgttcacctacggccaggagccctggatcggcctcaacggcagtcagatcctgcataagatcgacaaggagggggagcggctgccccggcccgaggactgtccccaggacatctacaacgtcatggtccagtgctgggctcacaagccagaggacagacccacgtttgtggccctgcgggacttcctgctggaggcccagcccacagacatgcgggcccttcaggactttgaggaaccggacaagctgcacatccagatgaatgatgtcatcaccgtcatcgagggaagggccgagaactactggtggcgtggccagaacacacggacgctgtgtgtggggcccttccctcgcaacgtggtgacctccgtggccggcctgtcggcccaggacatcagccagcccctgcagaacagcttcatccacacagggcatggcgacagtgacccccgccactgctggggcttcccggacaggattgacgaactgtatctgggaaaccccatggacccccccgacctcctgagcgtggaactgagcacctcccggcccccccagcatctaggaggggtgaaaaaaccaacctatgaccctgtgagcgaggaccaagaccccttgtccagcgacttcaagaggctgggcctgcggaagccaggcctgccccgagggctgtggctggcgaagccctcggcgcgggtgccgggcaccaaggccagccgaggcagcggggctgaggtcacgctcatcgacttcggtgaggagcccgtggtcccggccctacggccctgcgcgccctccctggcgcagctggccatggacgcctgctccctgctggacgagaccccgcctcagagccccacgcgggcactgccccggcccctgcaccccacgcctgtggtggactgggacgcacgcccgctgccccccccgcccgcctatgacgacgtggcccaggatgaggatgactttgagatctgctccatcaacagcaccctcgtgggcgcgggggtccctgccgggcccagccagggccagaccaactacgcctttgtgcctgagcaggcgcggccgccccctcccctggaggacaacctgttcctcccgccccagggtgggggcaagccgcccagctccgcacagaccgcagagatcttccaggcgctacagcaggagtgcatgaggcaactgcaggctccggccggctccccggccccctctcccagcccggggggtgacgacaagccccaggtgcctcctcgggtacccatcccccctcggcccacgcgcccacacgtccagctgtctccagcccccccgggcgaggaggagaccagccagtggcctggacctgcttcccctccccgggtgcctccgcgggagcccctgtcccctcaaggctcgaggacacccagccccctggtaccacctggcagctccccgctgccaccccggctctcaagctcacctgggaagaccatgcccaccacccagagctttgcctcagaccccaagtacgccaccccccaggtgatccaggcccctggcccgcgggctggtccctgcatcctgcccatcgtccgggatggcaagaaggtcagcagcacccactattacttgctgcccgagcgaccatcctacctggagcgctaccagcgcttcctgcgtgaggcccagagccccgaggagcctacccccctgcctgtgcctctgctgctgcccccacccagcaccccagcccccgccgcccccacggccaccgtgcggccgatgccccaggctgccttggaccccaaggccaacttctccaccaacaacagcaacccaggggcccggccaccacccccgagggccactgctcggctgccacagaggggctgccctggcgatgggccagaggcgggccggccagcagacaagatccagatggccatggtgcatggggtgaccacagaggagtgccaggcggccctgcagtgccacggctggagcgtgcagagggctgcccagtatctgaaggtggagcagctcttcgggctgggtctgcggcccagaggggagtgccacaaagtgctggagatgttcgactggaacctggagcaggccggctgccaccttctgggctcctggggccctgcccaccacaagcgctgagatgcgtctggagagccagagggcctgcctgaaggaatcacctgagcctgtccgtccaccaggagtggggagatgcccccatccagtcctggaggacccgctgctcctgctgctcccggggatggagcaaggccaaggctgcgggaggctgggagccctgccctgcccatccctcctgcaccagcgctgtccctgcacactttggttcagtcccggtgcccctgccaagatgtggaaggggccgggtgaagacaggcttgagggctgccccagcaggctctgggtatgacctgcctctggccctggtcctgggcggggcctgtgggtggagtagtacccccaggccctgccctgggtgacagactgggaggaaaccaggctggacctgggcaggcgggatgtgttggccacagggagaggcggaccggcacccggtgggacctcctaggactgggccttcttccagggggcccctggcagcagctggggtgtcgggcagaatgtgacttgtggccttaccatggacttgaatgggacttggctggcctcaggatcttgtgcctggaaatagcctgaggtggctcaggaagcggagaaagggtgccagaccattctctggcggggaccagggcccaaggccccagggctggaaggagaccaaggggcagccgccctggagggacatcagtgcttcctcttccacccaattcccccacgcggttccatgttttcccaccagcctgttggcgaagttgctgctccggcattcagtacctgcttcttccagagaaataaagttagtttctattttatgtta

SEQ ID NO: 14525 - DNA, 4222 bp, Homo sapiens
ggagaggaggaacggagctgggacgggctgcaggagggaatggccgcaggccggcaggaggaggggcgcgaccacccggccgccggccgatggcggatgaggctatgggggctgagacgcagtagcggccctgcacttctggaggatgctcgaggcccggccccccaggacgcagggcagtgacgctgccggtgccgctgcggggcgggggctgcgggcgctgcttctctccctgaccgcagccgctgggatttggggctccatgggggagagatctgcttaccagcgcctggctgggggcgaggagggaccgcagaggctgggaggcggcagaatgcagccagaggagggcacaggctggctgctggagctgctgtccgaggtgcagctgcaacagtacttcctgcggctccgagatgacctcaacgtcacccgcctgtcccactttgagtacgtcaagaatgaggacctggagaagatcggcatgggtcggcctggccagcggcggctgtgggaggctgtgaagaggaggaaggccttgtgcaaacgcaagtcgtggatgagtaaggtgttcagtggaaagcgactggaggctgagttcccacctcatcactctcagagcaccttccggaagacctcgcccgcccctgggggcccagcaggggaggggcccctgcagagcctcacctgcctcattggggagaaggacctgcgcctcctggagaagctgggtgatggttcctttggcgtggtgcgcaggggcgagtgggacgcgccctcagggaagacggtgagtgtggctgtgaagtgcctgaagcccgatgtcctgagccagccagaagccatggacgacttcatccgggaggtcaatgccatgcactcgctcgaccaccgaaacctcatccgcctctacggggtggtgctcacgccgcccatgaagatggtgacagagctggcacctctgggatcgttgttggaccggctacgtaagcaccagggccacttcctcctggggactctgagccgctacgctgtgcaggtggctgagggcatgggctacctggagtccaagcgctttattcaccgtgacctggctgcccgcaatctgctgttggctacccgcgacctggtcaagatcggggactttgggctgatgcgagcactacctcagaatgacgaccattacgtcatgcaggaacatcgcaaggtgcccttcgcctggtgtgcccccgagagcctgaagacacgcaccttctcccatgccagcgacacctggatgttcggggtgacactgtgggaaatgttcacctacggccaggagccctggatcggcctcaacggcagtcagatcctgcataagatcgacaaggagggggagcggctgccccggcccgaggactgtccccaggacatctacaacgtcatggtccagtgctgggctcacaagccagaggacagacccacgtttgtggccctgcgggacttcctgctggaggcccagcccacagacatgcgggcccttcaggactttgaggaaccggacaagctgcacatccagatgaatgatgtcatcaccgtcatcgagggaagggccgagaactactggtggcgtggccagaacacacggacgctgtgtgtggggcccttccctcgcaacgtggtgacctccgtggccggcctgtcggcccaggacatcagccagcccctgcagaacagcttcatccacacagggcatggcgacagtgacccccgccactgctggggcttcccggacaggattgacgaactgtatctgggaaaccccatggacccccccgacctcctgagcgtggaactgagcacctcccggcccccccagcatctaggaggggtgaaaagggagcctccacctcgcccacctcagcctgccttcttcactcagaaaccaacctatgaccctgtgagcgaggaccaagaccccttgtccagcgacttcaagaggctgggcctgcggaagccaggcctgccccgagggctgtggctggcgaagccctcggcgcgggtgccgggcaccaaggccagccgaggcagcggggctgaggtcacgctcatcgacttcggtgaggagcccgtggtcccggccctacggccctgcgcgccctccctggcgcagctggccatggacgcctgctccctgctggacgagaccccgcctcagagccccacgcgggcactgccccggcccctgcaccccacgcctgtggtggactgggacgcacgcccgctgccccccccgcccgcctatgacgacgtggcccaggatgaggatgactttgagatctgctccatcaacagcaccctcgtgggcgcgggggtccctgccgggcccagccagggccagaccaactacgcctttgtgcctgagcaggcgcggccgccccctcccctggaggacaacctgttcctcccgccccagggtgggggcaagccgcccagctccgcacagaccgcagagatcttccaggcgctacagcaggagtgcatgaggcaactgcaggctccggccggctccccggccccctctcccagcccggggggtgacgacaagccccaggtgcctcctcgggtacccatcccccctcggcccacgcgcccacacgtccagctgtctccagcccccccgggcgaggaggagaccagccagtggcctggacctgcttcccctccccgggtgcctccgcgggagcccctgtcccctcaaggctcgaggacacccagccccctggtaccacctggcagctccccgctgccaccccggctctcaagctcacctgggaagaccatgcccaccacccagagctttgcctcagaccccaagtacgccaccccccaggtgatccaggcccctggcccgcgggctggtccctgcatcctgcccatcgtccgggatggcaagaaggtcagcagcacccactattacttgctgcccgagcgaccatcctacctggagcgctaccagcgcttcctgcgtgaggcccagagccccgaggagcctacccccctgcctgtgcctctgctgctgcccccacccagcaccccagcccccgccgcccccacggccaccgtgcggccgatgccccaggctgccttggaccccaaggccaacttctccaccaacaacagcaacccaggggcccggccaccacccccgagggccactgctcggctgccacagaggggctgccctggcgatgggccagaggcgggccggccagcagacaagatccagatggtggagcagctcttcgggctgggtctgcggcccagaggggagtgccacaaagtgctggagatgttcgactggaacctggagcaggccggctgccaccttctgggctcctggggccctgcccaccacaagcgctgagatgcgtctggagagccagagggcctgcctgaaggaatcacctgagcctgtccgtccaccaggagtggggagatgcccccatccagtcctggaggacccgctgctcctgctgctcccggggatggagcaaggccaaggctgcgggaggctgggagccctgccctgcccatccctcctgcaccagcgctgtccctgcacactttggttcagtcccggtgcccctgccaagatgtggaaggggccgggtgaagacaggcttgagggctgccccagcaggctctgggtatgacctgcctctggccctggtcctgggcggggcctgtgggtggagtagtacccccaggccctgccctgggtgacagactgggaggaaaccaggctggacctgggcaggcgggatgtgttggccacagggagaggcggaccggcacccggtgggacctcctaggactgggccttcttccagggggcccctggcagcagctggggtgtcgggcagaatgtgacttgtggccttaccatggacttgaatgggacttggctggcctcaggatcttgtgcctggaaatagcctgaggtggctcaggaagcggagaaagggtgccagaccattctctggcggggaccagggcccaaggccccagggctggaaggagaccaaggggcagccgccctggagggacatcagtgcttcctcttccacccaattcccccacgcggttccatgttttcccaccagcctgttggcgaagttgctgctccggcattcagtacctgcttcttccagagaaataaagttagtttctattttatgtt

SEQ ID NO: 14526 - DNA, 29420 bp, Homo sapiens
gttgggtggggaagccggggagtagggctggactgtgaccactgccctggagagaagacagaaacaggacagaggatcccggctgcagccagcgtgaggaaagctctgctccctgccagaccggccagctgtggaaacccagcggggcttgcagcagagcggaggggcccaccccgttcttcctcatttcccacccctggtgtgggatttggggggctcctgggcagagtgcgaagctccggagccgaggccactggatccccagtgactgctcgggggggtcccgctgcgtggagatgccggcagcacgtcggttccctggcctggagctctccttccctctcctggccagactgcggcgacgcctgtacacagtgagtggggggcaggggctggactgctggggactggttgggctcctcagcaccagcacttgactgagaggcagaaagcaagactgggagcggctgagggaccccgccagtgagggcttgacggggagtccgggccaagtggcctctcctgcggctgctgcattccttcttcttggcctgtgtgtttgcacgccggccacagagtagtgacggacacaggtgtgcagactccatgaggtgcgggggccaggaccatgcagaattggagagtgtttgaactctggaggagctgcagccatgccctgtgctgcacaaagaaccttgggctggagggggacttagaggggaggcggacccctgcggagtcaccctggactgagaccctgaccgcttgcctcaccagcatcccggagttccttcccgtcctcccacatgcatcccctgtgcagagctgcgctgttgctgggtcagggagcatggagtgcacagctgaacagaggtgcattagctggtgtttcagggagagggaacaggccgggctgtgctttctgaagagcttcaggggaggggcctctgggtctcccccagccctgaccaccccgggcatggctttgagctgttttcaggagcctagaggagggggcctggatccttgggagttggtggtgggaaaaagaagaggagccctggagactgctctccctgcgggagactaggagcctccatcctgaggctgagccctggagggggggggtcactttgctccagggacagggcagcggtggccgtggccgggtggagaggagacgctgcctaggcccgtgactcctagtgtgcctctgggcttgcttccggaaagccacgacgcctggtcctcttaaaccccacgcctcttgttttgtaaacagatgattttgttgaggataaatgaatacagcttaatacttagaactgttcctcgcatatagtaagtgcagttgaagtgttagattttattttattttgagatggagttttgctcttgttgcccaggctggagtgcaatggcacgatcttggctcaccacagcctccgcctcccgggttcaagtgattctcctgcctcagcctcctgagtagctgagattacaggcatgtgccaccaggcccggctaattttctattttcagtagagatggggtttctccatgttggtcaggctggtctcgaactcaggtgatccgcccacctcagcctaagtgctgggattacagctgtgagccactgtgcttggcctagatgttatttttattgttacttgtcttaaataaagttaatagaaatatataacctgttatattaacatgttaacctgtgtacagtgaaacaagcaacacagtgggaactctaatataaagagacataagaggaaggtaataatattttatgtatcctaatacgttagtaacctagacaatgtagtgaggagtcagatcttgagacctcaggtggaaacaccgtgaaggcagcatctgcaagtgctgaccgagaggggagttttgaaataatgagagggggttgccttcactgacatttttgcaaatagtggacttctgctatgttctgaataaagcaaagtccattttcccttaagtttacacagtagtttcattccaggaaaatttattttatattaaaactgtaaggccaggagcagtggctccccagcactttgggaggccagggcaggtggatcacttgagctcaggagttcgagaccagcctggccaacatggaggaaccctgtctccactaaaaatacaaaaattagccgggcgcctgtgatcccagcttcttgggaggctgaggcgggagaattgcctgaacccgggaggctgagtttgcaatgagccaagatcataccattgtactccagcctgggagtctcactctgtctcaaaaaaaaaaaaaaaaaaaaccaaaaaactataaaagtactttcttatttatatataaagtgggatcatattctaggtttgcatgatcataaacaccttcatgaattgagttgtgtgggatttgggacagtgcgagaatgtcctacgcattgcaggctagctcacgctcttgtcccccaaccacccactgaatgtcactaaggcccccccaaatgttgtggcaaccagaactgtcccatagggggctgtgcagcctcatgagaaccattccagtaaagggttacagctttaagtttggaaaccacccggctggcccagctgcctggcccggtcgccgaggtggaagagccaggatttgaactgagagtttctcattcccctttgttactctttgtacttccctgagctgcctgaaaaagtcggaactggcactgtgttggcagggccactgggaactgtgggggcaggaggctcacgctgggcccaggctgtgtgtgcctgcttctcagtgctgctcactgtgatgggagctggggaggaggccaccgctgagtgggggagggggatggcttggtccccagccgggcagctggccttttttctctcgcctgttcctctttggggattgagcatgggtccggggctagcctggccacgccctcagctctgacacaccttacgcagacagggatgggtttgctgtgcggtgggtccgcttgcttagctttgaaggtgccaccagcttctttatctgggcccaggatagtgtaggtcagaggtcactctccggtaccactggctgattgcggcctgcagtgtgctttggccagcacgctgtgtgtgcgtgtgcatgcttttcagatctgaactattcagcattgttaaaaagtcaggagaaagacgaatattaagtgaaatcagggaacagaatggtatggttaatgcgtgaatattcgtgtagggacaacagagtctgaagcgtccgcagaagacatcactggcaactcctggggagccgggtggctgtgcagctggggagggaatgagattcgtggctcagtgtgccttctgaatattttaccacgtgcatatattaccttttccaaactttaatggtgagatttcacatgtaaattgggatttatttcttgaaaaaatggaaagctttgacaacactgggccacagtttcttctgacaaccattgatgggatctgagctccctgttgacaggggtgtctgcgagcccaccgcaggccccacccctccctcctgtcttccgcttgctgtggccctgtaggcacttgagtggtggcccgtggagtggtctttggattgttaggagaggctggggtggtcaggcgctgggaggaacttagcttagagctcatctgaccctgagagttttctccgtcacatctaaggagcccatagatgggtctcggggcacattgcaccctagagatttttatcaaatattaggagtaagaacacgtcggtgttcccggagagaccactgttagtttttaaaagattttcaaggactttcgacccctagaaacttagagcaggaatgtgagcacaggttgatcttgggtcactcagtcacagatcacatttcgggagcaagaccctgactcctgactccagggccagggctgtatctccgccgccctaattgtgccctgtggctggcaggaataggggacgtgggtccaggcggttctcggtagcttccctcgggagtcagaaggtggtgtgagcccttccgggtggccgtgtagtgggatgaaggtgagcccaggtcactcgggcaggcccctgttgtccccccacaacccttgtccctgagccactcctccccccacagaggctgggaggcggcagaatgcagccagaggagggcacaggctggctgctggagctgctgtccgaggtgcagctgcaacagtacttcctgcggctccgagatgacctcaacgtcacccgcctgtcccactttgagtacgtcaagaatgaggacctggagaagatcggcatgggtcggcctggtaggtgggatgttggcctggcttgtcttgcccctgaccctttccgtcctctgtcctcaggaccactcggtgcacgggtggcagctgagaactctgtcccagagccctgagggagcaggagggacatcagtaggtgctgatgtgtgatgagaacagttggcagttataaaggtgaattggagtttgaggagagtgaggccttccctaaagctggctacacaggagtcactccatgccccgttgtgattgttctcacgtagagtgtatgtcctccattgcccctccttcataagcatcgaattgagtctgttctcatcattctgactaccggggggtccatgtgcagagatctgtagggagaacgctaactctcagatggtttgctgattcgtgctcacgctctctttcttgctctctcacacgcacacacgcatgcacacgcacaggcatacacacacacacacacacacgcaggcacacacgcacatgcgcacacacgtgcacgcacgcatgcacgtgcacacacgcatgcacgtgcgtacgcacgcgctcacacgcctgcgcacacagacacgcacacacacacacacgtgtgtgcgcacacccgcatgcacacgcacggcatacacacatgtacacacacgcgcgcagacgcacacacgtgcgcacacgcgtgtgcacacacacgcacatacacacaggtttgctctgatttgagttcaacccttatcttcatatttttcctaaaagtgggggttgtagcatctaaaagtcatgatgttcttcatagaacattagaaacgtattagggctttcaagttaaaatagctaaataggtaataatgtgtcaagttagacactgacttagttaaaatagctaaataggtaataatgtgtcaagttagacactgacttagttaaaatagctaaataggtaataacgtgtcaagttagacactgacttagttaaaatagctaaataggtagtaatgtgctaagttagacattgatttatgctactttaggcctggatagttggtgtctgatgccagtagcataaaaaaattttacggagggaaaaaaacctcaacattgagaaaattctgttcattaccttgatttttcctgagaactgggagaagcccatcgcttcaagtttttggttaaacaccttcacccagtttgagagccagtgccaggaagtggagtgcagagaccgtcggtcagttgaggctccgggttagttggggttgatttcattgctatcatcgggtgggcggtgtctagtgacaggctcacccccaaggggaccacaggcagcagcctctctcgggctacggcggccttcacagcacgcggttccccgctctccctgcaggccagcggcggctgtgggaggctgtgaagaggaggaaggccttgtgcaaacgcaagtcgtggatgagtaaggtgggtgaggaggtgggtgaggaggtgggaggggggcagcctcgaacgcccccctccgcttctggtcctgggaaccttccccagctccccggcaggtcgaatctcgccgttctgccggcactttgtacaggaccccctcgtccagggtcttatcgggcagggcacttgtagagctgctgggctaagtgtctgtctccgccagatacggacacgtgagcagcctgtgtgcggtgaggccttcacagcccctctcggcacgcctggaacaggacctcattgacaagtgtgccttaacttagccctgctgtgtctgagcgttggggccagtgtccagcgtggggtggtggacctgtctggacccagaacgtctttgcttggcttccctcctccctgaccctctctaatctctgggtttctctggtcatctgtccctgctgacagcttccttccccacagcctgtccccacctctccccacaccttgtcctaatttgggtctgtggtgtagtgagtccctggtctgactcagtggaactttgcccattgtctggaagacaatgagagaggaagtgagccagccgtggtctttcctccccacttctggcttcagggctgggttggggggtgggcagggccgaacagctgcagtgggattgggcagcagagattttcctggctgcaatccggcaaaggggctgtctcttgggatcctttggcttttcctggaaacactgtcctggtcctttgcccgggttttagggaaggatgagtagtgtcgggatggtggaggcaggagaagagagcagcgtggtttgctgagatttaggggtcttggatctgccactggctcctgataggtccctgggcggtcagtggcctccagatttttgttgtgtcttcagtgaaatgataccggtccccactgcccagctcacctcccggggctgcaggaggcaccggagataatggctgtagagggtcttgtaacctgaacattgcttgcaaacataaggaattctagttactgggaggaagcacagggcagaggccagaagaggccctcagatttgaggcaccctagcccagacggataaggatccaccagctctgggggcgtgagacccaagctggcaagaatctgcaatctggagccaaggctgtgggtgcctcagtggaggccgagtcagaccgacgtggccagctttgaccctcatggcctcctttcttctgtcccttgaccttcggctcctccctgtccaccctggcctccgagtctcctccacttttccttccgtctcagccctcagctctaggcgcccctccagagacccagctgtcttcccaggccccttcccagcaaggactagcttcatctgaaccacacacacactcacggttcaacctcagactaaaattatcctctcccctgggcaggatgaagggcagccgactccctggtgagggtggagacagacagcaccaaatggtcaggccagagaaggggccagggctaaaaatggacaaggaggtgtctgtggagggcccctgcggctccatcgatgcgggttagggctggagtctgcggggtggcgggtgcaggaagggagggtggggcaggactgggaggagactccgaccttggctgggcggtgccctccctctccacacagctgggtgtggggccgctcagccacaggctgcatgcctgtcggtctctttctggcaccctccttgaggccagcatcaggctttgggttcatgtttgggggtgtgccctggacggagtgtgggcctccagccaggctgccccactgacagtttggcaaaaccaggacctatctggaagccgaagccggggatcaccaggtggacccagcggggtgggactgagtgactgaccctggggtgttggattccatctggcccccggctgccttcaaacaggtgttcagtggaaagcgactggaggctgagttcccacctcatcactctcagagcaccttccggaagacctcgcccgcccctgggggcccagcaggggaggggcccctgcagagcctcacctgcctcattggggagaaggacctgcgcctcctggagaagctgggtgatggttcctttggcgtggtgcgcaggggcgagtgggacgcgccctcagggaagacggtgagctctctgtgtcctgccagcgcagcagaggcatgggacccggggctggtagtggctcttctgcccccaaccagggtgtggatgggactggggatgcgtcacagtgtggctcatcccagagtccgtgctcaggatttttggggttttatttatttatttatttttgagatggagtctcgctctgtcgcccaggctggagtgcagtaggcacgatctcggcttcctgcaacctccactttccgggttcaagcaatcctcctgcctcagcctcctgagtagctgggattacaggcatgcaccaccacactcagttaatttttgtatttttagtagagacggggtttcaccatgttggccaggctggtctcgaactcctgacctcagatgatctgcccactttagcctcccaaagtgcttggattacaggtgtgagccaccacgtccagcccatgctcaggtttaactaagcacatttattatttcaactataaaaataatttattataaaagtttggaaagtatttgaaaaacaagaaaaaaaaaatcgcctgtaatcccaccactcagaggaagccgagcctcttcctcccactttaggtattttgttggatttagttaagatacaaattctggatacagcttttaaaatcttgttctttcttctcggcgttgcatttaacattttcccctcagggataacgtgtcaccacagcatacagttctggtgtgactgtttcctgtgcagcagccgtgtccttactgctcagatcacgtgcggtgcattcccagcacctcagagggctcctcattctccgtccactcagtgcgtccttctcccggggaagccgctgtcactcagtgcatccttctcccggggaagccgctgtgcagacttccagctccacagctttgtttttggcattacatttacagcattttccttctacagcaaaacaccttttaatattccattttatgaccagcctgagcaatatggagaaaccccatctctactaaaaatacaaaattagccaggcgtggtggcacctgcctgtaatcccagctactcaggaggctgaggcaggagaatcacttgaacccgggaggcagaggttgcagtgagctgagatcacgtcactgcattccagcctgggcgacaagagcgagactgtctcaaaaaaaaaaattccattttataacatttgaatattctctcatcatactggttatctcttactttttggttggtatttaagcccggcattcccccaggaaggggaggtgtggccgacgatggctcctgagggccagccgtctgcccttctccagccaggcctcacgcagagcacgtaagcccaggcactggtgacatgcttacccacccagatgaggagctcacaggcagggatcgttgagccgagttggagggtggagcaggttggctccgcgtgtctgggacctggcaagtcctgagtccttgcaaatcccgctctgggcaggtgagtgtggctgtgaagtgcctgaagcccgatgtcctgagccagccagaagccatggacgacttcatccgggaggtcaatgccatgcactcgctcgaccaccgaaacctcatccgcctctacggggtggtgctcacgccgcccatgaagatggtgagtactgcgggcgggagggggcgggcagggagagggctccggtcccatatgtgtggttcggttcctctctccatcctaaggtcagaggcgccctagatcctactttggtcccccaacctgatggagtaaaggggtccacaggggcccagcctggtacgggctgtgtctgctgcggtccagtccgggtctgtctctggattttgctggtgctcagtgtcaagagagttactcccatgggaggggctggccactgagtttaatttggggaatttatgttttatttatctatttattttgagatggagtctcactttgtcgcccaggctggagtgcaatggcatgatctaggctcactgcaacctcggcctcctgggttcacgcgatattcctgcctcaggcttccaagtagctgggattacagccgtgcgctaccatgcctggctaatttttgtatttttagtagagacggggtttcaccatgttggccaggctggtctcaaactcctgacctcaaatgatccacccacctcggcctcccaaagtgctgggattacaggcgtgagccaccacgtccagctgagttttggaatttctagccactgcctctttgggctccttctctctaggcatcagtttcccaaattgcctcgagggagaggcctgagaaactgcaggactcctagaggtccccagacagcaggccaggaaggtgcgtgcagcctggctctggaaagccttcaggaaggggactgggggcccagcgtgggctgctgagaaggggcagggtcctccagctcattcctcctgcctcctccgtggcctcaggtgacagagctggcacctctgggatcgttgttggaccggctacgtaagcaccagggccacttcctcctggggactctgagccgctacgctgtgcaggtggctgagggcatgggctacctggagtccaagcgctttattcaccgtgacctggctgcccgcaatctgctgttggctacccgcgacctggtcaagatcggggactttgggctgatgcgagcactacctcagaatgacgaccattacgtcatgcaggaacatcgcaaggtgcccttcgcctggtgaggggcaggtgctgccagctcacagagtccctgcagacccaggcctcaaagcttctggggctttctggacccaccacagcccctggttttgcttgggcctgcccttgtctgttctaagcctggggtgccctcctttgcacccattcgctcaccatccatctaggaattcttgagggcccacgtgccagggtctgggtgctggaaatcacagggatacatgctgtgggactctccaaggggctttgctgggtggggtgatacggggatagatgctgtgtcctctccaaggggcattgttgggggtcgtgtttcagggatagatcctgtgtcctctccaaggggcattgctggcgggggggtgttatagggataaatgctgtgtcctctccaaagggcgttgctggggggggggtgttacaaggatagatgctgtgtcctcttcaaggggcatcgctgggggggtgttacagggatagatgctgtgtcctcttcaaggggcattgctggggggggtgttacagggatagatgccgtgtcctctccaaggggcgttgctggggggggtgttagagggacagatcctgtgtcctctccaaggggcatcgctgggggcgggtgttacagggatagatgctgtgtcctctccaaggggcactgctgggggggtgttacagggatagatgctgtgtcctctccaaggggcactgctgggggggtgttagagggacagatcctgtgtcctcttcaaggggcattgctggcgggtggtgttagagggatagacactgtgtcctctccaaggggcatcgctgggggcgggtgttacagggatagacgctgtgtcctctccaaggggcattgctgggggggtgttacagggatagatgctgtgtcctctccaaggggcactgctgggggggtgttacagggatagatgctgtgtcctctccaaggggcactgctgggggggtgttagagggacagatcctgtgtcctcttcaaggggcattgctggcgggtggtgttagagggatagacactgtgtcctctccaaggggcatcgctgggggcgggtgttacagggatagacgctgtgtcctctccaaggggcattgctgggggggtgttacagggatagatgctgtgtcctctccaaggggcattgctggggggcgggtgttacagggttagatgctgtgtcctctccaaggggcattgctggggggggtgttacagggatagatgctgtgtcctctccaaggggcattgctggggggggtgttacagggatagatgctgtgtcctctccaaggggcattgctgggggggtgttacagggatagatgctgtgtcctctccgagggtcattgctgagttaggtgatacagggatatatgctgtgtcctcttcaaggggcattgctgggggggtgttacagggatagatgctgtgtcctctccgaggggcattgctggggggcgggtgttacagggttagatgctgtgtcctctccaaggggcattgctgggggggggggtgttacagggatagatgctgtgtcctctccgagggtcactgctgagttaggtgatacagggatatatgctgtgtcctcttcaaggggcattgctgggggggtgttacagggatagatgctgtgtcctctccaaggggcatttctgtggggaggtattcaaaggtttcctaaaacatcagggaagttcgccagggaaagactcgttggtaagcatgttctagggagagctagtggtagacaggcccaggccacagcaggccttgtagatgggccagggctgcttacctgtgcactaggggtggtacttggccctgccctggcccctgtgtgggcttatcctctgctgagaccattgtggttctctggtgccagaggcacccagaggtctgtgatctgcctgctttgaggcgggaagggttgttccagttctgctttcccaagcggtggctgtgggcaacccttatgatccaggacgcatggtcatcttaacgagcagctggctttacacccagggcgagcagaggtcttaaattatgcccgttgtcctggagtaatttagagcagcctcttttgtattcaggcatcctggtttgcatggtaaggtatgaatatagttgcctttaaacagcacgatgaagtgggcgggttattgttctcatttcaccaaggaggataatgaaccttagcgatctcgagtgactttcccggccccatcccctttgaggggcagggctcgctctgcttccctgtctgggcaccaccctcctctctgcacctcagtccacgccgggatgtcctttctgacctcactgcagtggcacttccccctcaaccgggggtgcccagaacgaatgggtgtatttgggtgaagccagtatgactgtttctacccattttggttcttccccaggccctacccgaatttcccacccactgcttcctgccaaaggacccaaatccgaggatcccgccccaaatctgggaattgtcattctcccaccacagtcagaaaacagcctgtgatcttctctccctgccccatcccagagcctctgacctccttcctttccatgcttctctggctgggaaacttcctttcctcttcccccaccaggctgcaagtgaataagaggcctgggcttagacgatttccccaagtccctgcatcgtgtcgtcaaggggtcctgcccgcttcacacggcgcccctgagacccactgttgaacctggcacagggggtcacaacaagtgtttgctgcatgagtgttttaagtccctggggcggacgcaggtagggtgtttgagagggcttctctttgacccctgcctctgccaggtgtgcccccgagagcctgaagacacgcaccttctcccatgccagcgacacctggatgttcggggtgacactgtgggaaatgttcacctacggccaggagccctggatcggcctcaacggcagtcaggtgagggctgggagacgggcccccatagggctggtggggtgaattccattccctgcttgcagcctggccctgctggaactgcctctcaccaatggactccctcctcccacgccccgtgcctccccccacttcccgtgcctcccaccacgccccgtgtctcctctcacgccccgtatctgtatggcctcagggagagcccagcaaagagacggggagggaaaagctggggcctgccctccttctctagcccttgccacatccacttgttccgaggctccagacctgggaagaagggactggggctctggagagggcccctcccaggcaggcagatcccttctttggaggccaggcatggcagcagccgctgcagctgtggatgggctggagggaaggcgggaagtgaagggctgggcgctctgtttgtcgtcaaactctgcacctcctcaccttcagatcctgcataagatcgacaaggagggggagcggctgccccggcccgaggactgtccccaggacatctacaacgtcatggtccagtgctgggctcacaagccagaggacagacccacgtttgtggccctgcgggacttcctgctggaggtgagggacaggtcagcccaggagagctggggtgttcaagctgaggggctacccaggcgtcagtcccagagttggccacgaccttcctcttcctccaggcccagcccacagacatgcgggcccttcaggactttgaggaaccggacaagctgcacatccagatgaatgatgtcatcaccgtcatcgagggaaggtagggagtgcagggctgggccccgccctgggatcgcttgaagggcacaggtcggagggacctgtggacagatctgtttggcctccaagattcccttggccacatacaggctggcggttgggcctgaaccctgcagtgtgaggggaggacaggcctgcctccgtcttcctagtgcctttccctgcccagcttccctccaccaccctttcccactgggctgcagccctggctgtgtggttgggccaggctgcctttatggaggggtagggagtggcctggcctcggtggcagcagagttctggactcccgtgcttcctcctctgctcctccccgcttctctccctgcttcttcctggcacagggactcagccatccacctgggtgcgtttcagtagctgaagcagcccagcctgccctcttgcagctttccatccttcctgctgagcccaccaccccctcccaggcctgcctccagcctctggtcctctcttcccatctccccttgggaggaccctctctatacctaaccctcctcccacagcctctcgggagtccctgtcttccacctgagcccccgcagttctagcgcctgccctgaggccccaccactgctggccctgccttgtgctggctgatccccagggtgtctgagcaactggctggggcagggcaggtttcaggtacctttgaggcaggggcagtattgaggaccaggaagaagagtgaagtggaggaaatcccctgtgctcgcagctcctgactcaggccaggcaaggatggggctagggctgcttcccagggagcctcttccacctgcactgcagcttttggagtctgcggccttcggtgcaatcctgtgcctcttgggggtgggtggaggagacctggggggctgtgtggagtgtgacctgcaccgctgtggccccgacaccccgagccttcccaggcccggctccctcacccttgggcccagggtctgggaataggaatgacatactgagactgcagggcctgtggttaggggtgttatgctggggaagaatgcagaaggttctagaaagagaggcctggggacaggaggcaaacagtctgcaggtttggagctgaggggccagggatgggattgcaagcgtggcgctccggggagcattctggaaataggaagattaagggtgggggggtcccctggaagtacctggcagggcctccagcccgaagtccagcctcatgaccgtgtccacctccacgagctggaaagccgtgggcctggcccctcttgtgctgctgccggagccccagatctttaccacctgcttcccttgctctcagcaggagcctgtgtgcctgccagtgtccccaggggtgactcagagtggcctgtgtttggggcgtgtgtctctggagctggtgttttaggtcaccgcccgggcaaggcgggcagtgggaggggccgggagcggctgctcctgggagggttgtgggtgtgccccgccccgcccttccgtcgaaggcccccgttggccccagccgctggttccctgtggctgctgctggtggggctctgggggctccttccccctgggccaccagccctggcttggaaccacagcacctgccctccgtgcctggagctgctcaggaggtgggaggtgaggggcaggaggccacaacagccggtgaggcttgggagcgggcctgggtgtcggtggtggcagagcttgactctgcccccttgtttcttcagtccctgaatatctccatgtttgtttggctgcctccgtctccatgtctccaggcggatggctctgtgtgagtctttgggcctgggtgtgcatctgtgggtctgtgtttggagttccctcctagcctggccttctcttcgccgtggcttcccacttgcgaagctgtgtccagtatttgtttcctggtgcggagtctgggaggccacctgccgcagctctgactgagtctaggctcagtccttctcagggtaccaggctgtgggcagaggggagacacctagatgtttcgtgctgtgtctagatttggagacacaaatgatgactggtctttcccaggggctcgtttggaggaaggggtggctggcagcacttttgttccgcatacagagcgggtgttggaatccattgcgggtccttggcctggtctggccctggagcctcggcttcctgtggtgggtgggagccaggcatccgggttatccctccaggcctgggcgcctgggacccctagggagaagagcgggcgggcgttttgaacagaatgtccggcattagttgagccatttctggactaccttcggcccggacgggaacgtggtgctgagatttccagagctggggcagccttaggcagttctcagcaccggcctctgttttccatcttgtctaccccagagatgttgaccagaggcccgggggcagcaggaggtagaaggttcatgcggaggtgttgggcccttttcctgctcccccaggaagtcctcatccgcccctgcttcagtcacggccgggtagcagccctggccctcccatggccacggggactccggcctgttcatggcgggagagagagggcgcggacagggcgggcctggaaggaagggctggcctcagtcccctctggactgctggtgcctcggccacactgagcctcacacgggtgcgtgtgggctgcgagaagtgacacggtcctcttggaagtcccactggagccttgggatgaagctgccttggagtgtgcgtgggcgccatcccgagggggagcttcctgtgcctccgagcgtgcgtgggcgccatcccgagggggagcttcttgtgcctcggagcgtgcgtgggcgccatcccgagggggagtttcttgtgcctcggagcgtgcgtgggcgccatcccgagggggagtttcttgtgcctcggagcgtgcgtgggcgccatcccgaggggagcttcgtgtgcctcggagcgtgcgtgggcgccatcccgaggggagcttcctgtgcctcggagcgtgcgtgggcgccatcccgagggggagtttcttgtgcctcggagcgtgcgtgggcgccatcccgaggggagcttcttgtgcctcggagtgtgcgtgggcgccatcccgaggggagcttcttgtgcctcggagtgtgcgtgggcgccatcccgagggggagcttcctgtgcctccgagcgtgcgtgggcgccatcccgagggggagtttcttgtgcctcggagcgtgcgtgggcgccatcccgaggggagcttcttgtgcctcggagtgtgcgtgggcgccatcccgaggggagcttcttgtgcctcggagcgtgcgtgggcgccatcccgagggggagtttcttgtgcctcggagcgtgcgtgggcgccatcccgaggggagcttcttgtgcctcggagtgtgcgtgggcgccatcccgaggggagcttcctgtgcctcggagcgtgcgtgggcgccatcccgaggggagcttcctgtgcctcggagcgtgcgtgggcgccatcccgagggagagtttcttgtgcctcggagcgtgcgtgggcgccatcccgaggggagcttcttgtgcctcggagtgtgcgtgggcgccatcccgaggggagcttcttgtgcctcggagtgtgcgtgggcgccatcccgagggggagcttcttgtgcctcggagcgtgcgtgggcgccatcccgagggggagtttcttgtgcctcggagtgtgcgtgggcgccatcccgaggggagcttcttgcacacgtcctccgcactcttactctccttcccccaggagcaagcatgttttctcgagtggtgtcaggactcccagcagccatgggggctcttgcctcggccatacctgcactaagggaggtgggcttgatgtctcctttccctctcagaagtgggtcccaaaggaggcttctgtgcctggagctgggcagtgttggcggaagggagaggccagacggagtgacctgccttgggcacgagtcacgctgctctgagcaaggtctcggcctcagcggcattctcacccagttactgagcgcctctgaagaggtgtggagagcagagtccggcgtctggcccgcggcagccaccggggagcccgtgggtgtagcgggagagccgcagcccagccggtgccggggttcctcctctacgggccgccgtgggaggctgtgtgcgtgctggggagccggggctctgctccttcgagtggccctgctatttttcagatgggactcgtctcgtctcggggtactgtcctctctccttccttccctccctgcaggcagggtgggaatcacagggtggctgtgtgtggtggggccaggccagtggccctgtgtatgaggaggctgggcagggggagcacagccccgtctccccgcgccccgcgccccccgcctccccgccgaccgtggtgctctcgggtttgactttggtctctgggatgggctgttccggagtcaccccgctccagccaggcctcgtcaccttacaaggctgtgggtctgggtgcccaggcgtcgccacctcctccgtcctctctccccggcctggctgggtttcagaggagcccttcttcacgctttggccctgggacaggagaagtgggggttggtggggagggcgtgcagtgtggtgccacacgtgtccaccctagcagctctgggctgtcaccgcccccgcgtgcccagactctgcccacggggctgtcaccgcccccgcctgcccagacactgcccacggggctctcaccgcccccgcctgcccagacactgcccacggggctctcaccgcccccgcctgcccagactctgctcacggcatcacgtatgacaagtccagcagcagacgcgggagcctcacaacctgtgagagccttcgggagtcaggagtgtcttgcgggagccctgtgcttcctggcctgcctgcccctgcccctgcccctgcccctgcccaggccccggcttaggccacatcagcagaggtttcgtgtctgaggtcagagggggactggcagccctactgtctggtcactgtgggagagctgagttcccttttggacacaggtagagcccctcctgaggagacggggaggctcccgcaggccttccgggaggtggtggaaagctccggaagcaggtgaagcggtggagggagggactgagttgcccgagtgctcctagactctcccgcgtctgcattcgggaggcaggttgtagctggaggcctggcccccagcctagtgcaaggccctaggtgtcccccggcacccccgcacctctcagaactcctggaacccagccgaggagtgaaatcaagtggccagaagaggactggggccccggccttgccagggaactgaggggtgaggaggaggtgtgggcggggcgctggccccacagacctgaaagctggcgttgggtcccaggtctgctgggatctttctggtaaccgtggacaggtcatgttgcctgctgcagcagcttccagcgtgcctccttatttgcaaaccatagggaaagctgcctgacccacctagagagttgtgggtaaggccgtgtgcaaacaggcctgtacggggcatggtgggtcacgggggctgttggggaggagggccggtggcacacagcctggtcctgaggcctgagctccatcccccttctgccacagtggccagggtgtgaggagggtcccagtgccggggctgccccgccacgcctggcgttcaccgtgccatctctgtcgcgcagggccgagaactactggtggcgtggccagaacacacggacgctgtgtgtggggcccttccctcgcaacgtggtgacctccgtggccggcctgtcggcccaggacatcagccagcccctgcagaacagcttcatccacacagggcatggcgacagtgacccccgccactgctggggcttcccggacaggattgacgagtgagtactgggcggggatggatgctgacctggccccgctcgggactccagggccctcagcacggcacgcgtgggcggaatctgctcttcaccctttcgcccgggcttcagcccccgacccgccactctcccctcctcaccctggccttactctcgggaagctgtggaaccctaggaagcccagcctggtgggggttctccaggggaatgttctccaggggagtgttctccaggggagggttctccaggggagggttctccaggggaatgttctccaggggagggttctccaggggagggttctccaggggagggttctccaggggaatgttctccaggggagggttctccaggggagggttctccggggagcgttctccaggggaatgctgtccctgccattttcaagctttggggggccgatctcctaactctgagacacttcatctgtgaaacaggttcacccccccaataaggggaaggctgtaaatgcactctgaattagcacttgctgctcagatgcaggggtcctgagagaagctttcccactcactgtagatgaaagtagggtcaggagcttctgaggatggactcctgtttggtggaaaggtccccggagccacagctgtaacccctcttggtactcgggccttaggaaaatgaacttgggaggaacccggtgggagctgctgaggaggagagcttctcccatgacccccctgtggccccctgtgaccctgtgaccctgtgacccctgcacacgagcagtggttttccttctcctgctggtggtgccagagtcctggagacgtgaacctgctggctcaggccctggggatgtatgcaggtccacatgggagtgagcctgctttccagaaccagagtgggactggggaccttggggactgcagagggaacgttaggtggcagctccgcctccccaccacacagtactctacggagctcactccatacctgggagaggccctgtctcctatgtaagaggataaggccaccgaggggcatctgggaaggacacgcagaatcagtcacttccgggatgccaccccccaccccccgaagcttcttgcgccaggcctccaagcctctctgctggccgcagggggattccaggcccctggcctctgcagcccttctcctgctgacttctgatactctggtctgccctgagaggcgtggaaagcaggggccttcacccaccgggccccacacaccagaaccccacacagcgggcccccacacaccagaacccacacagcgggcccccacacaccagaaccccacacagcgagtccccccacaccagaacccacacagcgggcccccacacaccagaacccacacagcgggcccacacacactggaaccccaagctcacagggctcagcccatgtgttttgcctaaaaagaacccagcaagggcctgagagttggggtgaaagactgcagacacctccaggagaggctggtgccctctgccccactcctggcatgctgtggccagcccagccccattcctccaggctttaatcagccccagtgactaagtctcagatactgacagttggtgcagggacggagggtggatccggagcaggacaggtggcccagcctctcccgcacctcctggccatgtggcagaagggtgcctcctgcccaccctggctgggcaccatagctgggatgccccgttcttaggccctccatcgtggcctgcgggacaggagtgtctgccctctggccgctgcctggtgtgggctgggggcctggggggttgtggaggaccacctctgcccttgtagggtgtagttggagtccctgaggtcctaggctttccatcctggggtcaggtgtcctttctctgccttctctccaggacaccccccagctgagacgtgcggtcaggttctgtggactgggaggcgggaggcctgtgcttcagacccaagactacacccggtttcctccaggacgaaggggctctgatgagattctgccacccctccacacgcttcccctgctctcttgacccagctctctcccccacagactgtatctgggaaaccccatggacccccccgacctcctgagcgtggaactgagcacctcccggcccccccagcatctaggaggggtgaaaagtaagagcccctctgctccctggtgtccctaactcatcggctactcaggaaggggcactgtcttcacaggccaccctaaggctgctgttctgtttttggggacagtggggtcagggcagcaggcgggacagctgtgtccctggctccggctgggcgtggggtggaagacaggcagctgtatccgccgaggtgggcctcctcgggctgggtctgcagcaggcccgtccgccccggcgtccctcctccctccttccacggccgagctcagatcctggctttcctcacttccccctaatcctgctctcctgtcccaagccaaaaccaccccacggctccggctctgcctggggcctcctccatctcccggtcctctgcctatcatactggaccgccgtgttcctcatcctgccgcctgcggcctcccgtttgctgggggcttgtacattcactcgcccccattcacttctctcccttcgtctctctacactctgccctctcgtccggccgtctccctcctttgtcctctgtcctgctccgtctctctccccctgtccgcatggcctttcttgcaggggagcctccacctcgcccacctcagcctgccttcttcactcagagtaagtggggctgcttccgatgccttggcccccgcccccgccccctctctctcactcctctcctggaaggtacagagcctgggcggctgggccggaggggaggtgggtgggtgtgtgctgtgagcttccgcggctgccctggcctagcatgcctgccccccctcgagcccgccccccggagcctgggcttctgctcacgagtgtggccctggcttccgcctcggcctcactccctcccagacctgtctgagcttctggagcacgagtgtggccctggcttctgccttggcctcgctgcctcccagacctgcaggcgctgtctgggctttgtggccgttggtcaggagtactgtcctctccaaggatagtccttatagcccctgatggcaggaggcggctccgtgcctgcactaatggtgtgccgtgacaggggcggggatgagggctcactaactcgccagggcgcaggagcagggccgccggggtcttgtgctggtggaggcagcgtcaggcaggagccagtgttgcttgctgcagcttagacggagcgaggcggggctcaccggcccacatggggctgccgggcagagcaggttccgccctcctgatggagtggtcggaggtgcgctgagaacctggccgccggtggctgacctcagacctcggggggagttgggagtggagggttgctgggggacacttggctttctctcccacgtgccacctcccctcgtgtcccagaccctgcctgactgccttcctgttgggctctccctttccatcacagaaccaacctatgaccctgtgagcgaggaccaagaccccttgtccagcgacttcaagaggctgggcctgcggaagccaggcctgccccgagggctgtggctggcgaagccctcggcgcgggtgccgggcaccaaggccagccgaggcagcggggctgaggtcacgctcatcgacttcggtgaggagcccgtggtcccggccctacggccctgcgcgccctccctggcgcagctggccatggacgcctgctccctgctggacgagaccccgcctcagagccccacgcgggcactgccccggcccctgcaccccacgcctgtggtggactgggacgcacgcccgctgccccccccgcccgcctatgacgacgtggcccaggatgaggatgactttgagatctgctccatcaacagcaccctcgtgggcgcgggggtccctgccgggcccagccagggccagaccaactacgcctttgtgcctgagcaggcgcggccgccccctcccctggaggacaacctgttcctcccgccccagggtgggggcaagccgcccagctccgcacagaccgcagagatcttccaggcgctacagcaggagtgcatgaggcaactgcaggctccggccggctccccggccccctctcccagcccggggggtgacgacaagccccaggtgcctcctcgggtacccatcccccctcggcccacgcgcccacacgtccagctgtctccagcccccccgggcgaggaggagaccagccagtggcctggacctgcttcccctccccgggtgcctccgcgggagcccctgtcccctcaaggctcgaggacacccagccccctggtaccacctggcagctccccgctgccaccccggctctcaagctcacctgggaagaccatgcccaccacccagagctttgcctcagaccccaagtacgccaccccccaggtgatccaggcccctggcccgcgggctggtccctgcatcctgcccatcgtccgggatggcaagaaggtcagcagcacccactattacttgctgcccgagcgaccatcctacctggagcgctaccagcgcttcctgcgtgaggcccagagccccgaggagcctacccccctgcctgtgcctctgctgctgcccccacccagcaccccagcccccgccgcccccacggccaccgtgcggccgatgccccaggctgccttggaccccaaggccaacttctccaccaacaacagcaacccaggggcccggccaccacccccgagggccactgctcggctgccacagaggggctgccctggcgatgggccagaggcgggccggccagcagacaagatccagatggtgagcacccagcctggctgtgggcgaagcggggcagggcccaaggggcctggagcagtgggccctagtggtgctgacaggggtgggtgtgcccagctgcaggccatggtgcatggggtgaccacagaggagtgccaggcggccctgcagtgccacggctggagcgtgcagagggctgcccagtatctgaaggtaccgccacctcctgctcactctggctctcagggaccctgaagcctggttctgctgcccccagccccacgccccctggctccgactcccctcttccccaccctagtcggtgccctgggcccgcgtgtccatggcgccacccttacccccaggtggagcagctcttcgggctgggtctgcggcccagaggggagtgccacaaagtgctggagatgttcgactggaacctggagcaggccggctgccaccttctgggctcctggggccctgcccaccacaagtgagtgagccccacagtctgccccgctccgtgccccaggagggctgtcccagagcctgccacactgggaggaagcccaacacctcgcaggccgctcccggccagggagacacagctctccagctgcgggagggaggcgctcacagggcccagcaaatcgtttttcctaaatgtgtttatttggacattttagccacttggttttcaaatgagtacaagagggaattggagcctctctggttgaaggaggcttgcttccctagcacctgcagtgaccctgagcggctccaggaatggcactttttaggaccccatgatttgcacacctctttctcacctctgtgtttccatatttctgtttaaagtaacatttaaaatttcagtgttggctgggcaccgtggctcatggctgtaatccccagcactgtgggaggccaaggagggaggatcacctgaggtcaggagttcgagaccagcctggccaacatggcgagaccaggtctctactaaaaatacaaaaattaaccgggtatggtggtgggcacctgtaatcccacctgctggggaggctgaggcaggagaatcgcttcaacctgggaggcggaggttgctgtgagctgagattgcaccactgcactccatcctgggcgacagagggagactgtctccaaaaaaaaaaattttctctaaaaagaaaatatattgtctttcctgtaaaaggtttatattatagtttaacaaaatatatagacatttaaaatatatacatatataaacacactttatatattatgtaaatatatatatgagagcgctgtcaagtcaaaaagaagtgaactgaggtcacatggctggagccagcaccatggcaggaggcactggcgggaggaggggctgacacgggccaggccctggagatacctgctgcccttgtcccagcagcgtggccctgtgcacggtgcggagtttctccacatataaagcgtgtagataatagtgctcaccccgtggaagggactggcgcgatggatgggggacatgtctgtcttattgcgcccagcacgcctggcgccaggatgcaggcactccgtgtcacctgtctgtcccatactgtctcgggtggttcttactgatttgcagctgggatgcaggcactccctgtcacctgtctgtcccatactgtctcgggtcgttcttaactgatttgcacctgggacgcaggcactctgtgtcacctgtctgtcattgtctcgggtggttcttactgatttgcacctgggacgcaggcattcgctgtcacctgtctgtcactgtctcgggtggttcttactgatttgcacctgggatgcaggcactccgtgtcacttgtctgtcccagtctcgggtggttcttactgatttgcacctgggatgcaggcactcggtgtcacctgtctgtcccatcctgtctcgggtcattcttaactgatttgcacccgggacgcaggcactctgtgtcacctgtctgtcactgtctcgggtggttcttactgatttgcacccgggacgcaggcactcgctgtcacctgtctgtcactgtctcgggtggttcttactgatttgcacctgggacgcaggcactcgctgtcacctgtctgtcactgtctcgggtggttcttactgatttgcatctgggacgcaggcactcgctgtcacctgtctgtcactgtctcgggtggttcttactgatttgcatctgggacgcaggcactcgctgtcacctgtctgtcactgtctcgggtggttcttactgatttgcacctgggacgcaggcactccgtgtcacctgtctgtcactgtctcgggtggttcttactgatttgcacccgggacgcaggcactcgctgtcacctgtctgtcgctgtctcgggtggttcttactgatttgcatctgggatgcaggcactccgtgtcacctgtctgtcgctgtctcgggtggttcttactgatttgcacccgggacgcaggcacttgctgtcacctgtctgtcactgtctcgggtgtttcttactgatttgcacctgggacgcaggcactccgtgtcacctgtctgtcactgtctcgggtggttcttactgatttgcacctgggacgcaggcactcgctgtcacctgtctgtcactgtctcgggtggttcttactgatttgcatctgggacgcaggcactcgctgtcacctgtctgtcactgtctcaggtggttcttactgatttgcatctgggatgcaggcactccgtgtcacctgtctgtcactgtctcgggtggttcttactgatttgcatctaggatgcaggcactccgtgtcacctgtctgtcgctgtctggggtggttcttactgatttgcagctgggatgcaggcactccgtgtcacctgtctgtcgctgtctcgggtggttcttactgatttgcatccacataggctttgggctctatcccacctgtcgtcttcggattctctaatacgcaggagtgctcttctgttagtttactcatagtttattaaagtacagagaaaagacatccaggatgataaattttacagtccttgccggggactgccagcttccagtggtgttgcctggcaccagtgtgacccccggtgcctgccccgctgaaccttctgtaaactgtttaactgtgctggtggtttcccattctctaggcgctgagatgcgtctggagagccagagggcctgcctgaaggaatcacctgagcctgtccgtccaccaggagtggggagatgcccccatccagtcctggaggacccgctgctcctgctgctcccggggatggagcaaggccaaggctgcgggaggctgggagccctgccctgcccatccctcctgcaccagcgctgtccctgcacactttggttcagtcccggtgcccctgccaagatgtggaaggggccgggtgaagacaggcttgagggctgccccagcaggctctgggtatgacctgcctctggccctggtcctgggcggggcctgtgggtggagtagtacccccaggccctgccctgggtgacagactgggaggaaaccaggctggacctgggcaggcgggatgtgttggccacagggagaggcggaccggcacccggtgggacctcctaggactgggccttcttccagggggcccctggcagcagctggggtgtcgggcagaatgtgacttgtggccttaccatggacttgaatgggacttggctggcctcaggatcttgtgcctggaaatagcctgaggtggctcaggaagcggagaaagggtgccagaccattctctggcggggaccagggcccaaggccccagggctggaaggagaccaaggggcagccgccctggagggacatcagtgcttcctcttccacccaattcccccacgcggttccatgttttcccaccagcctgttggcgaagttgctgctccggcattcagtacctgcttcttccagagaaataaagttagtttctattttatgtt

SEQ ID NO: 14527 - DNA, 4235 bp, Homo sapiens
gttgggtggggaagccggggagtagggctggactgtgaccactgccctggagagaagacagaaacaggacagaggatcccggctgcagccagcgtgaggaaagctctgctccctgccagaccggccagctgtggaaacccagcggggcttgcagcagagcggaggggcccaccccgttcttcctcatttcccacccctggtgtgggatttggggggctcctgggcagagtgcgaagctccggagccgaggccactggatccccagtgactgctcgggggggtcccgctgcgtggagatgccggcagcacgtcggttccctggcctggagctctccttccctctcctggccagactgcggcgacgcctgtacacaaggctgggaggcggcagaatgcagccagaggagggcacaggctggctgctggagctgctgtccgaggtgcagctgcaacagtacttcctgcggctccgagatgacctcaacgtcacccgcctgtcccactttgagtacgtcaagaatgaggacctggagaagatcggcatgggtcggcctggccagcggcggctgtgggaggctgtgaagaggaggaaggccttgtgcaaacgcaagtcgtggatgagtaaggtgttcagtggaaagcgactggaggctgagttcccacctcatcactctcagagcaccttccggaagacctcgcccgcccctgggggcccagcaggggaggggcccctgcagagcctcacctgcctcattggggagaaggacctgcgcctcctggagaagctgggtgatggttcctttggcgtggtgcgcaggggcgagtgggacgcgccctcagggaagacggtgagtgtggctgtgaagtgcctgaagcccgatgtcctgagccagccagaagccatggacgacttcatccgggaggtcaatgccatgcactcgctcgaccaccgaaacctcatccgcctctacggggtggtgctcacgccgcccatgaagatggtgacagagctggcacctctgggatcgttgttggaccggctacgtaagcaccagggccacttcctcctggggactctgagccgctacgctgtgcaggtggctgagggcatgggctacctggagtccaagcgctttattcaccgtgacctggctgcccgcaatctgctgttggctacccgcgacctggtcaagatcggggactttgggctgatgcgagcactacctcagaatgacgaccattacgtcatgcaggaacatcgcaaggtgcccttcgcctggtgtgcccccgagagcctgaagacacgcaccttctcccatgccagcgacacctggatgttcggggtgacactgtgggaaatgttcacctacggccaggagccctggatcggcctcaacggcagtcagatcctgcataagatcgacaaggagggggagcggctgccccggcccgaggactgtccccaggacatctacaacgtcatggtccagtgctgggctcacaagccagaggacagacccacgtttgtggccctgcgggacttcctgctggaggcccagcccacagacatgcgggcccttcaggactttgaggaaccggacaagctgcacatccagatgaatgatgtcatcaccgtcatcgagggaagggccgagaactactggtggcgtggccagaacacacggacgctgtgtgtggggcccttccctcgcaacgtggtgacctccgtggccggcctgtcggcccaggacatcagccagcccctgcagaacagcttcatccacacagggcatggcgacagtgacccccgccactgctggggcttcccggacaggattgacgaactgtatctgggaaaccccatggacccccccgacctcctgagcgtggaactgagcacctcccggcccccccagcatctaggaggggtgaaaaaaccaacctatgaccctgtgagcgaggaccaagaccccttgtccagcgacttcaagaggctgggcctgcggaagccaggcctgccccgagggctgtggctggcgaagccctcggcgcgggtgccgggcaccaaggccagccgaggcagcggggctgaggtcacgctcatcgacttcggtgaggagcccgtggtcccggccctacggccctgcgcgccctccctggcgcagctggccatggacgcctgctccctgctggacgagaccccgcctcagagccccacgcgggcactgccccggcccctgcaccccacgcctgtggtggactgggacgcacgcccgctgccccccccgcccgcctatgacgacgtggcccaggatgaggatgactttgagatctgctccatcaacagcaccctcgtgggcgcgggggtccctgccgggcccagccagggccagaccaactacgcctttgtgcctgagcaggcgcggccgccccctcccctggaggacaacctgttcctcccgccccagggtgggggcaagccgcccagctccgcacagaccgcagagatcttccaggcgctacagcaggagtgcatgaggcaactgcaggctccggccggctccccggccccctctcccagcccggggggtgacgacaagccccaggtgcctcctcgggtacccatcccccctcggcccacgcgcccacacgtccagctgtctccagcccccccgggcgaggaggagaccagccagtggcctggacctgcttcccctccccgggtgcctccgcgggagcccctgtcccctcaaggctcgaggacacccagccccctggtaccacctggcagctccccgctgccaccccggctctcaagctcacctgggaagaccatgcccaccacccagagctttgcctcagaccccaagtacgccaccccccaggtgatccaggcccctggcccgcgggctggtccctgcatcctgcccatcgtccgggatggcaagaaggtcagcagcacccactattacttgctgcccgagcgaccatcctacctggagcgctaccagcgcttcctgcgtgaggcccagagccccgaggagcctacccccctgcctgtgcctctgctgctgcccccacccagcaccccagcccccgccgcccccacggccaccgtgcggccgatgccccaggctgccttggaccccaaggccaacttctccaccaacaacagcaacccaggggcccggccaccacccccgagggccactgctcggctgccacagaggggctgccctggcgatgggccagaggcgggccggccagcagacaagatccagatggtggagcagctcttcgggctgggtctgcggcccagaggggagtgccacaaagtgctggagatgttcgactggaacctggagcaggccggctgccaccttctgggctcctggggccctgcccaccacaagcgctgagatgcgtctggagagccagagggcctgcctgaaggaatcacctgagcctgtccgtccaccaggagtggggagatgcccccatccagtcctggaggacccgctgctcctgctgctcccggggatggagcaaggccaaggctgcgggaggctgggagccctgccctgcccatccctcctgcaccagcgctgtccctgcacactttggttcagtcccggtgcccctgccaagatgtggaaggggccgggtgaagacaggcttgagggctgccccagcaggctctgggtatgacctgcctctggccctggtcctgggcggggcctgtgggtggagtagtacccccaggccctgccctgggtgacagactgggaggaaaccaggctggacctgggcaggcgggatgtgttggccacagggagaggcggaccggcacccggtgggacctcctaggactgggccttcttccagggggcccctggcagcagctggggtgtcgggcagaatgtgacttgtggccttaccatggacttgaatgggacttggctggcctcaggatcttgtgcctggaaatagcctgaggtggctcaggaagcggagaaagggtgccagaccattctctggcggggaccagggcccaaggccccagggctggaaggagaccaaggggcagccgccctggagggacatcagtgcttcctcttccacccaattcccccacgcggttccatgttttcccaccagcctgttggcgaagttgctgctccggcattcagtacctgcttcttccagagaaataaagttagtttctattttatgtt

SEQ ID NO: 14528 - DNA, 27739 bp, Homo sapiens
tgcgcgggaggcgggcgctgggaggcggcgcggagccggctgagcgcagggccgagctgcggggcaggtgggcgcccggcgttctgggagcagagtggccgccggggcaggctgggggcggggtgggctgcagccccgggatgcctcggaggagggggtctcagatggagtcggacggaggcccctctgctgtgggcttctcggatggccccttaccgtgaatacgggggactcgtgaatccccaaggccccagttggtggctctggggccctggaggcgggctgagggctgagtggagcccggttccgcggccggcgaaggcagagccccggctctcggtgggggtcagcccggggctggcacagctggctcactgggagagggtgggagccgcgccccggagaggaggaacggagctgggacgggctgcaggagggaatggccgcaggccggcaggaggaggggcgcgaccacccggccgccggccgatggcggatgaggctatgggggctgagacgcagtagcggccctgcacttctggaggatgctcgaggcccggccccccaggacgcagggcagtgacgctgccggtgccgctgcggggcgggggctgcgggcgctgcttctctccctgaccgcagccgctgggatttggggctccatgggggagagatctgcttaccagcgcctggctgggggcgaggagggaccgcaggtaatggggaaggctaggggatagccagatacctgggccccagaccccttcgtctgctgtgagccgggctcagccctgccccctgcggcggcctcaggagtgagagtgtctgctcctgggccaggggacagagagcggtgtgtttatgtgggtgtggcggtggtgacttagtgatgctggcatctgcctgtgtgtgcatggatcccctgggaccccaaaaagctgcccgttgggctttcttccatgccccaagggagtccaggaagtactgctaggattggggttcagtcttttaggagaactgagtctgtatgtcctgggcattcccgtttactaggcttctgaatatgaatatcaagccagatgtccttgtttgcttttgaaaatatggtcacggtgttgatggatggggtagcttcccttccccttggagagaacgcacttcctctcccgaccggcagagggcagtagctgacaggagaaagggggactcggtaggagcgttggggcttaaggtcgggctgttttcctgggcgaggagaaagggggccgggccgggccgggcgcggtggctcacgcctgtcatctcagcactttgggaggccgaggcgggcagatcacctgagacgaggacgctgaggtcaggaattcgggaccagcctggccaacatggcggaaaaaaaaaaaatagctgggcacggtggcgggggcctgtaatcccagctactcgggaggctgaggcaggagaatcacttgaacccgggatcgcgccactgcactcaagcctgggcgatagagcaagactctcaaaaaaaaaaagggggtgggggttccaggagccggcctggcgctgacccacacatactttgcttcttcccgcagctggattactgggccagttacaggtcttgttcttactggacatccaaggtcaggcatggggttctggtgactttgagacacatatttctggggacgctagagtttttaatctggccattctgatccagcagacccattttgaaatagagggaataaccctgcttaaattgttccccggcccccggtccctgggtctccttccaggtgtgcttggtgccagggtaaggctgtaggcttctctgatgcaagggcacagtcagccaaggtttggggaaaagtcagctccagtgtaacgcaggcctgatcttgtccacctgacctcagcccccactccatccacacctgccatctccacaagctttgtgggctggatggcagggggatgaggaagagggactgaagttgggggtgtccttctccccacctcctggagttagaccaggaaatggctgtcccttttggcatcatcagggaggtcaagtgctgggagaggccctgggaagggagcctgggatgctgagtccccaaagccctgctccccagctgcccacccctccagccagctgaggctccctgagctggtggccagctggacagggacaagagagcagtgtgcaagaaacaggggctccctaggcatggctcagcagggaggggggtgcctggggagctggagagggcttcctgcagctgtcaggtgtgtctgggggccgtagcgaggggggtgtaagagcagctggcaccctttgaggagggccagagagatcatttgtcagttctagaaacatgagggccccacgggggcttgatggagtgtctctaggccccttaatctgaggccgtggtctgtgtcaggggttatacaggagacatcctacagctttggggtgggggcgtcccagcaggagtctcagggcatatttgtttgttttgagcgggtttgggaacttggccacctggtctgagtaggaggcaccctgggtgtttgggcagcagacagggccaccccaggggagggggtgaggatcctcaccccaccctacccttgctcttggctggactgccccactctggcaggctgccggccgcctatttccgtcgggcaccagggtaacagggccacatcagggtctgagccaggagacacccagccaaggctgggactcgggggtgggggagggtctctgaggagtcatcgcagggcccagcggagcctctggggtccaagcctcccactcaggctgtgtgttagtccccacgtccccacacaggtccatgagggagtccacagccctgcttcatacgtgctgtttgagtcacatagccgccaccctaaagtcccaggagttgtctgcaactgtgagggctggggtagaagccagagacaggagctttgtgtatggggaggcaggggggccagcgcgggtggctgggaggaagagtcccccccattcctgccgccctcttggcagtgattcagaaaggtcctttttcagccagtgtcagagctgctcagctggggagggagggagagagggagagagagaggcaggcaagagggagggcggccgggcgggcagttgggtggggaagccggggagtagggctggactgtgaccactgccctggagagaagacagaaacaggacagaggatcccggctgcagccagcgtgaggaaagctctgctccctgccagaccggccagctgtggaaacccagcggggcttgcagcagagcggaggggcccaccccgttcttcctcatttcccacccctggtgtgggatttggggggctcctgggcagagtgcgaagctccggagccgaggccactggatccccagtgactgctcgggggggtcccgctgcgtggagatgccggcagcacgtcggttccctggcctggagctctccttccctctcctggccagactgcggcgacgcctgtacacagtgagtggggggcaggggctggactgctggggactggttgggctcctcagcaccagcacttgactgagaggcagaaagcaagactgggagcggctgagggaccccgccagtgagggcttgacggggagtccgggccaagtggcctctcctgcggctgctgcattccttcttcttggcctgtgtgtttgcacgccggccacagagtagtgacggacacaggtgtgcagactccatgaggtgcgggggccaggaccatgcagaattggagagtgtttgaactctggaggagctgcagccatgccctgtgctgcacaaagaaccttgggctggagggggacttagaggggaggcggacccctgcggagtcaccctggactgagaccctgaccgcttgcctcaccagcatcccggagttccttcccgtcctcccacatgcatcccctgtgcagagctgcgctgttgctgggtcagggagcatggagtgcacagctgaacagaggtgcattagctggtgtttcagggagagggaacaggccgggctgtgctttctgaagagcttcaggggaggggcctctgggtctcccccagccctgaccaccccgggcatggctttgagctgttttcaggagcctagaggagggggcctggatccttgggagttggtggtgggaaaaagaagaggagccctggagactgctctccctgcgggagactaggagcctccatcctgaggctgagccctggagggggggggtcactttgctccagggacagggcagcggtggccgtggccgggtggagaggagacgctgcctaggcccgtgactcctagtgtgcctctgggcttgcttccggaaagccacgacgcctggtcctcttaaaccccacgcctcttgttttgtaaacagatgattttgttgaggataaatgaatacagcttaatacttagaactgttcctcgcatatagtaagtgcagttgaagtgttagattttattttattttgagatggagttttgctcttgttgcccaggctggagtgcaatggcacgatcttggctcaccacagcctccgcctcccgggttcaagtgattctcctgcctcagcctcctgagtagctgagattacaggcatgtgccaccaggcccggctaattttctattttcagtagagatggggtttctccatgttggtcaggctggtctcgaactcaggtgatccgcccacctcagcctaagtgctgggattacagctgtgagccactgtgcttggcctagatgttatttttattgttacttgtcttaaataaagttaatagaaatatataacctgttatattaacatgttaacctgtgtacagtgaaacaagcaacacagtgggaactctaatataaagagacataagaggaaggtaataatattttatgtatcctaatacgttagtaacctagacaatgtagtgaggagtcagatcttgagacctcaggtggaaacaccgtgaaggcagcatctgcaagtgctgaccgagaggggagttttgaaataatgagagggggttgccttcactgacatttttgcaaatagtggacttctgctatgttctgaataaagcaaagtccattttcccttaagtttacacagtagtttcattccaggaaaatttattttatattaaaactgtaaggccaggagcagtggctccccagcactttgggaggccagggcaggtggatcacttgagctcaggagttcgagaccagcctggccaacatggaggaaccctgtctccactaaaaatacaaaaattagccgggcgcctgtgatcccagcttcttgggaggctgaggcgggagaattgcctgaacccgggaggctgagtttgcaatgagccaagatcataccattgtactccagcctgggagtctcactctgtctcaaaaaaaaaaaaaaaaaaaaccaaaaaactataaaagtactttcttatttatatataaagtgggatcatattctaggtttgcatgatcataaacaccttcatgaattgagttgtgtgggatttgggacagtgcgagaatgtcctacgcattgcaggctagctcacgctcttgtcccccaaccacccactgaatgtcactaaggcccccccaaatgttgtggcaaccagaactgtcccatagggggctgtgcagcctcatgagaaccattccagtaaagggttacagctttaagtttggaaaccacccggctggcccagctgcctggcccggtcgccgaggtggaagagccaggatttgaactgagagtttctcattcccctttgttactctttgtacttccctgagctgcctgaaaaagtcggaactggcactgtgttggcagggccactgggaactgtgggggcaggaggctcacgctgggcccaggctgtgtgtgcctgcttctcagtgctgctcactgtgatgggagctggggaggaggccaccgctgagtgggggagggggatggcttggtccccagccgggcagctggccttttttctctcgcctgttcctctttggggattgagcatgggtccggggctagcctggccacgccctcagctctgacacaccttacgcagacagggatgggtttgctgtgcggtgggtccgcttgcttagctttgaaggtgccaccagcttctttatctgggcccaggatagtgtaggtcagaggtcactctccggtaccactggctgattgcggcctgcagtgtgctttggccagcacgctgtgtgtgcgtgtgcatgcttttcagatctgaactattcagcattgttaaaaagtcaggagaaagacgaatattaagtgaaatcagggaacagaatggtatggttaatgcgtgaatattcgtgtagggacaacagagtctgaagcgtccgcagaagacatcactggcaactcctggggagccgggtggctgtgcagctggggagggaatgagattcgtggctcagtgtgccttctgaatattttaccacgtgcatatattaccttttccaaactttaatggtgagatttcacatgtaaattgggatttatttcttgaaaaaatggaaagctttgacaacactgggccacagtttcttctgacaaccattgatgggatctgagctccctgttgacaggggtgtctgcgagcccaccgcaggccccacccctccctcctgtcttccgcttgctgtggccctgtaggcacttgagtggtggcccgtggagtggtctttggattgttaggagaggctggggtggtcaggcgctgggaggaacttagcttagagctcatctgaccctgagagttttctccgtcacatctaaggagcccatagatgggtctcggggcacattgcaccctagagatttttatcaaatattaggagtaagaacacgtcggtgttcccggagagaccactgttagtttttaaaagattttcaaggactttcgacccctagaaacttagagcaggaatgtgagcacaggttgatcttgggtcactcagtcacagatcacatttcgggagcaagaccctgactcctgactccagggccagggctgtatctccgccgccctaattgtgccctgtggctggcaggaataggggacgtgggtccaggcggttctcggtagcttccctcgggagtcagaaggtggtgtgagcccttccgggtggccgtgtagtgggatgaaggtgagcccaggtcactcgggcaggcccctgttgtccccccacaacccttgtccctgagccactcctccccccacagaggctgggaggcggcagaatgcagccagaggagggcacaggctggctgctggagctgctgtccgaggtgcagctgcaacagtacttcctgcggctccgagatgacctcaacgtcacccgcctgtcccactttgagtacgtcaagaatgaggacctggagaagatcggcatgggtcggcctggtaggtgggatgttggcctggcttgtcttgcccctgaccctttccgtcctctgtcctcaggaccactcggtgcacgggtggcagctgagaactctgtcccagagccctgagggagcaggagggacatcagtaggtgctgatgtgtgatgagaacagttggcagttataaaggtgaattggagtttgaggagagtgaggccttccctaaagctggctacacaggagtcactccatgccccgttgtgattgttctcacgtagagtgtatgtcctccattgcccctccttcataagcatcgaattgagtctgttctcatcattctgactaccggggggtccatgtgcagagatctgtagggagaacgctaactctcagatggtttgctgattcgtgctcacgctctctttcttgctctctcacacgcacacacgcatgcacacgcacaggcatacacacacacacacacacacgcaggcacacacgcacatgcgcacacacgtgcacgcacgcatgcacgtgcacacacgcatgcacgtgcgtacgcacgcgctcacacgcctgcgcacacagacacgcacacacacacacacgtgtgtgcgcacacccgcatgcacacgcacggcatacacacatgtacacacacgcgcgcagacgcacacacgtgcgcacacgcgtgtgcacacacacgcacatacacacaggtttgctctgatttgagttcaacccttatcttcatatttttcctaaaagtgggggttgtagcatctaaaagtcatgatgttcttcatagaacattagaaacgtattagggctttcaagttaaaatagctaaataggtaataatgtgtcaagttagacactgacttagttaaaatagctaaataggtaataatgtgtcaagttagacactgacttagttaaaatagctaaataggtaataacgtgtcaagttagacactgacttagttaaaatagctaaataggtagtaatgtgctaagttagacattgatttatgctactttaggcctggatagttggtgtctgatgccagtagcataaaaaaattttacggagggaaaaaaacctcaacattgagaaaattctgttcattaccttgatttttcctgagaactgggagaagcccatcgcttcaagtttttggttaaacaccttcacccagtttgagagccagtgccaggaagtggagtgcagagaccgtcggtcagttgaggctccgggttagttggggttgatttcattgctatcatcgggtgggcggtgtctagtgacaggctcacccccaaggggaccacaggcagcagcctctctcgggctacggcggccttcacagcacgcggttccccgctctccctgcaggccagcggcggctgtgggaggctgtgaagaggaggaaggccttgtgcaaacgcaagtcgtggatgagtaaggtgggtgaggaggtgggtgaggaggtgggaggggggcagcctcgaacgcccccctccgcttctggtcctgggaaccttccccagctccccggcaggtcgaatctcgccgttctgccggcactttgtacaggaccccctcgtccagggtcttatcgggcagggcacttgtagagctgctgggctaagtgtctgtctccgccagatacggacacgtgagcagcctgtgtgcggtgaggccttcacagcccctctcggcacgcctggaacaggacctcattgacaagtgtgccttaacttagccctgctgtgtctgagcgttggggccagtgtccagcgtggggtggtggacctgtctggacccagaacgtctttgcttggcttccctcctccctgaccctctctaatctctgggtttctctggtcatctgtccctgctgacagcttccttccccacagcctgtccccacctctccccacaccttgtcctaatttgggtctgtggtgtagtgagtccctggtctgactcagtggaactttgcccattgtctggaagacaatgagagaggaagtgagccagccgtggtctttcctccccacttctggcttcagggctgggttggggggtgggcagggccgaacagctgcagtgggattgggcagcagagattttcctggctgcaatccggcaaaggggctgtctcttgggatcctttggcttttcctggaaacactgtcctggtcctttgcccgggttttagggaaggatgagtagtgtcgggatggtggaggcaggagaagagagcagcgtggtttgctgagatttaggggtcttggatctgccactggctcctgataggtccctgggcggtcagtggcctccagatttttgttgtgtcttcagtgaaatgataccggtccccactgcccagctcacctcccggggctgcaggaggcaccggagataatggctgtagagggtcttgtaacctgaacattgcttgcaaacataaggaattctagttactgggaggaagcacagggcagaggccagaagaggccctcagatttgaggcaccctagcccagacggataaggatccaccagctctgggggcgtgagacccaagctggcaagaatctgcaatctggagccaaggctgtgggtgcctcagtggaggccgagtcagaccgacgtggccagctttgaccctcatggcctcctttcttctgtcccttgaccttcggctcctccctgtccaccctggcctccgagtctcctccacttttccttccgtctcagccctcagctctaggcgcccctccagagacccagctgtcttcccaggccccttcccagcaaggactagcttcatctgaaccacacacacactcacggttcaacctcagactaaaattatcctctcccctgggcaggatgaagggcagccgactccctggtgagggtggagacagacagcaccaaatggtcaggccagagaaggggccagggctaaaaatggacaaggaggtgtctgtggagggcccctgcggctccatcgatgcgggttagggctggagtctgcggggtggcgggtgcaggaagggagggtggggcaggactgggaggagactccgaccttggctgggcggtgccctccctctccacacagctgggtgtggggccgctcagccacaggctgcatgcctgtcggtctctttctggcaccctccttgaggccagcatcaggctttgggttcatgtttgggggtgtgccctggacggagtgtgggcctccagccaggctgccccactgacagtttggcaaaaccaggacctatctggaagccgaagccggggatcaccaggtggacccagcggggtgggactgagtgactgaccctggggtgttggattccatctggcccccggctgccttcaaacaggtgttcagtggaaagcgactggaggctgagttcccacctcatcactctcagagcaccttccggaagacctcgcccgcccctgggggcccagcaggggaggggcccctgcagagcctcacctgcctcattggggagaaggacctgcgcctcctggagaagctgggtgatggttcctttggcgtggtgcgcaggggcgagtgggacgcgccctcagggaagacggtgagctctctgtgtcctgccagcgcagcagaggcatgggacccggggctggtagtggctcttctgcccccaaccagggtgtggatgggactggggatgcgtcacagtgtggctcatcccagagtccgtgctcaggatttttggggttttatttatttatttatttttgagatggagtctcgctctgtcgcccaggctggagtgcagtaggcacgatctcggcttcctgcaacctccactttccgggttcaagcaatcctcctgcctcagcctcctgagtagctgggattacaggcatgcaccaccacactcagttaatttttgtatttttagtagagacggggtttcaccatgttggccaggctggtctcgaactcctgacctcagatgatctgcccactttagcctcccaaagtgcttggattacaggtgtgagccaccacgtccagcccatgctcaggtttaactaagcacatttattatttcaactataaaaataatttattataaaagtttggaaagtatttgaaaaacaagaaaaaaaaaatcgcctgtaatcccaccactcagaggaagccgagcctcttcctcccactttaggtattttgttggatttagttaagatacaaattctggatacagcttttaaaatcttgttctttcttctcggcgttgcatttaacattttcccctcagggataacgtgtcaccacagcatacagttctggtgtgactgtttcctgtgcagcagccgtgtccttactgctcagatcacgtgcggtgcattcccagcacctcagagggctcctcattctccgtccactcagtgcgtccttctcccggggaagccgctgtcactcagtgcatccttctcccggggaagccgctgtgcagacttccagctccacagctttgtttttggcattacatttacagcattttccttctacagcaaaacaccttttaatattccattttatgaccagcctgagcaatatggagaaaccccatctctactaaaaatacaaaattagccaggcgtggtggcacctgcctgtaatcccagctactcaggaggctgaggcaggagaatcacttgaacccgggaggcagaggttgcagtgagctgagatcacgtcactgcattccagcctgggcgacaagagcgagactgtctcaaaaaaaaaaattccattttataacatttgaatattctctcatcatactggttatctcttactttttggttggtatttaagcccggcattcccccaggaaggggaggtgtggccgacgatggctcctgagggccagccgtctgcccttctccagccaggcctcacgcagagcacgtaagcccaggcactggtgacatgcttacccacccagatgaggagctcacaggcagggatcgttgagccgagttggagggtggagcaggttggctccgcgtgtctgggacctggcaagtcctgagtccttgcaaatcccgctctgggcaggtgagtgtggctgtgaagtgcctgaagcccgatgtcctgagccagccagaagccatggacgacttcatccgggaggtcaatgccatgcactcgctcgaccaccgaaacctcatccgcctctacggggtggtgctcacgccgcccatgaagatggtgagtactgcgggcgggagggggcgggcagggagagggctccggtcccatatgtgtggttcggttcctctctccatcctaaggtcagaggcgccctagatcctactttggtcccccaacctgatggagtaaaggggtccacaggggcccagcctggtacgggctgtgtctgctgcggtccagtccgggtctgtctctggattttgctggtgctcagtgtcaagagagttactcccatgggaggggctggccactgagtttaatttggggaatttatgttttatttatctatttattttgagatggagtctcactttgtcgcccaggctggagtgcaatggcatgatctaggctcactgcaacctcggcctcctgggttcacgcgatattcctgcctcaggcttccaagtagctgggattacagccgtgcgctaccatgcctggctaatttttgtatttttagtagagacggggtttcaccatgttggccaggctggtctcaaactcctgacctcaaatgatccacccacctcggcctcccaaagtgctgggattacaggcgtgagccaccacgtccagctgagttttggaatttctagccactgcctctttgggctccttctctctaggcatcagtttcccaaattgcctcgagggagaggcctgagaaactgcaggactcctagaggtccccagacagcaggccaggaaggtgcgtgcagcctggctctggaaagccttcaggaaggggactgggggcccagcgtgggctgctgagaaggggcagggtcctccagctcattcctcctgcctcctccgtggcctcaggtgacagagctggcacctctgggatcgttgttggaccggctacgtaagcaccagggccacttcctcctggggactctgagccgctacgctgtgcaggtggctgagggcatgggctacctggagtccaagcgctttattcaccgtgacctggctgcccgcaatctgctgttggctacccgcgacctggtcaagatcggggactttgggctgatgcgagcactacctcagaatgacgaccattacgtcatgcaggaacatcgcaaggtgcccttcgcctggtgaggggcaggtgctgccagctcacagagtccctgcagacccaggcctcaaagcttctggggctttctggacccaccacagcccctggttttgcttgggcctgcccttgtctgttctaagcctggggtgccctcctttgcacccattcgctcaccatccatctaggaattcttgagggcccacgtgccagggtctgggtgctggaaatcacagggatacatgctgtgggactctccaaggggctttgctgggtggggtgatacggggatagatgctgtgtcctctccaaggggcattgttgggggtcgtgtttcagggatagatcctgtgtcctctccaaggggcattgctggcgggggggtgttatagggataaatgctgtgtcctctccaaagggcgttgctggggggggggtgttacaaggatagatgctgtgtcctcttcaaggggcatcgctgggggggtgttacagggatagatgctgtgtcctcttcaaggggcattgctggggggggtgttacagggatagatgccgtgtcctctccaaggggcgttgctggggggggtgttagagggacagatcctgtgtcctctccaaggggcatcgctgggggcgggtgttacagggatagatgctgtgtcctctccaaggggcactgctgggggggtgttacagggatagatgctgtgtcctctccaaggggcactgctgggggggtgttagagggacagatcctgtgtcctcttcaaggggcattgctggcgggtggtgttagagggatagacactgtgtcctctccaaggggcatcgctgggggcgggtgttacagggatagacgctgtgtcctctccaaggggcattgctgggggggtgttacagggatagatgctgtgtcctctccaaggggcactgctgggggggtgttacagggatagatgctgtgtcctctccaaggggcactgctgggggggtgttagagggacagatcctgtgtcctcttcaaggggcattgctggcgggtggtgttagagggatagacactgtgtcctctccaaggggcatcgctgggggcgggtgttacagggatagacgctgtgtcctctccaaggggcattgctgggggggtgttacagggatagatgctgtgtcctctccaaggggcattgctggggggcgggtgttacagggttagatgctgtgtcctctccaaggggcattgctggggggggtgttacagggatagatgctgtgtcctctccaaggggcattgctggggggggtgttacagggatagatgctgtgtcctctccaaggggcattgctgggggggtgttacagggatagatgctgtgtcctctccgagggtcattgctgagttaggtgatacagggatatatgctgtgtcctcttcaaggggcattgctgggggggtgttacagggatagatgctgtgtcctctccgaggggcattgctggggggcgggtgttacagggttagatgctgtgtcctctccaaggggcattgctgggggggggggtgttacagggatagatgctgtgtcctctccgagggtcactgctgagttaggtgatacagggatatatgctgtgtcctcttcaaggggcattgctgggggggtgttacagggatagatgctgtgtcctctccaaggggcatttctgtggggaggtattcaaaggtttcctaaaacatcagggaagttcgccagggaaagactcgttggtaagcatgttctagggagagctagtggtagacaggcccaggccacagcaggccttgtagatgggccagggctgcttacctgtgcactaggggtggtacttggccctgccctggcccctgtgtgggcttatcctctgctgagaccattgtggttctctggtgccagaggcacccagaggtctgtgatctgcctgctttgaggcgggaagggttgttccagttctgctttcccaagcggtggctgtgggcaacccttatgatccaggacgcatggtcatcttaacgagcagctggctttacacccagggcgagcagaggtcttaaattatgcccgttgtcctggagtaatttagagcagcctcttttgtattcaggcatcctggtttgcatggtaaggtatgaatatagttgcctttaaacagcacgatgaagtgggcgggttattgttctcatttcaccaaggaggataatgaaccttagcgatctcgagtgactttcccggccccatcccctttgaggggcagggctcgctctgcttccctgtctgggcaccaccctcctctctgcacctcagtccacgccgggatgtcctttctgacctcactgcagtggcacttccccctcaaccgggggtgcccagaacgaatgggtgtatttgggtgaagccagtatgactgtttctacccattttggttcttccccaggccctacccgaatttcccacccactgcttcctgccaaaggacccaaatccgaggatcccgccccaaatctgggaattgtcattctcccaccacagtcagaaaacagcctgtgatcttctctccctgccccatcccagagcctctgacctccttcctttccatgcttctctggctgggaaacttcctttcctcttcccccaccaggctgcaagtgaataagaggcctgggcttagacgatttccccaagtccctgcatcgtgtcgtcaaggggtcctgcccgcttcacacggcgcccctgagacccactgttgaacctggcacagggggtcacaacaagtgtttgctgcatgagtgttttaagtccctggggcggacgcaggtagggtgtttgagagggcttctctttgacccctgcctctgccaggtgtgcccccgagagcctgaagacacgcaccttctcccatgccagcgacacctggatgttcggggtgacactgtgggaaatgttcacctacggccaggagccctggatcggcctcaacggcagtcaggtgagggctgggagacgggcccccatagggctggtggggtgaattccattccctgcttgcagcctggccctgctggaactgcctctcaccaatggactccctcctcccacgccccgtgcctccccccacttcccgtgcctcccaccacgccccgtgtctcctctcacgccccgtatctgtatggcctcagggagagcccagcaaagagacggggagggaaaagctggggcctgccctccttctctagcccttgccacatccacttgttccgaggctccagacctgggaagaagggactggggctctggagagggcccctcccaggcaggcagatcccttctttggaggccaggcatggcagcagccgctgcagctgtggatgggctggagggaaggcgggaagtgaagggctgggcgctctgtttgtcgtcaaactctgcacctcctcaccttcagatcctgcataagatcgacaaggagggggagcggctgccccggcccgaggactgtccccaggacatctacaacgtcatggtccagtgctgggctcacaagccagaggacagacccacgtttgtggccctgcgggacttcctgctggaggtgagggacaggtcagcccaggagagctggggtgttcaagctgaggggctacccaggcgtcagtcccagagttggccacgaccttcctcttcctccaggcccagcccacagacatgcgggcccttcaggactttgaggaaccggacaagctgcacatccagatgaatgatgtcatcaccgtcatcgagggaaggtagggagtgcagggctgggccccgccctgggatcgcttgaagggcacaggtcggagggacctgtggacagatctgtttggcctccaagattcccttggccacatacaggctggcggttgggcctgaaccctgcagtgtgaggggaggacaggcctgcctccgtcttcctagtgcctttccctgcccagcttccctccaccaccctttcccactgggctgcagccctggctgtgtggttgggccaggctgcctttatggaggggtagggagtggcctggcctcggtggcagcagagttctggactcccgtgcttcctcctctgctcctccccgcttctctccctgcttcttcctggcacagggactcagccatccacctgggtgcgtttcagtagctgaagcagcccagcctgccctcttgcagctttccatccttcctgctgagcccaccaccccctcccaggcctgcctccagcctctggtcctctcttcccatctccccttgggaggaccctctctatacctaaccctcctcccacagcctctcgggagtccctgtcttccacctgagcccccgcagttctagcgcctgccctgaggccccaccactgctggccctgccttgtgctggctgatccccagggtgtctgagcaactggctggggcagggcaggtttcaggtacctttgaggcaggggcagtattgaggaccaggaagaagagtgaagtggaggaaatcccctgtgctcgcagctcctgactcaggccaggcaaggatggggctagggctgcttcccagggagcctcttccacctgcactgcagcttttggagtctgcggccttcggtgcaatcctgtgcctcttgggggtgggtggaggagacctggggggctgtgtggagtgtgacctgcaccgctgtggccccgacaccccgagccttcccaggcccggctccctcacccttgggcccagggtctgggaataggaatgacatactgagactgcagggcctgtggttaggggtgttatgctggggaagaatgcagaaggttctagaaagagaggcctggggacaggaggcaaacagtctgcaggtttggagctgaggggccagggatgggattgcaagcgtggcgctccggggagcattctggaaataggaagattaagggtgggggggtcccctggaagtacctggcagggcctccagcccgaagtccagcctcatgaccgtgtccacctccacgagctggaaagccgtgggcctggcccctcttgtgctgctgccggagccccagatctttaccacctgcttcccttgctctcagcaggagcctgtgtgcctgccagtgtccccaggggtgactcagagtggcctgtgtttggggcgtgtgtctctggagctggtgttttaggtcaccgcccgggcaaggcgggcagtgggaggggccgggagcggctgctcctgggagggttgtgggtgtgccccgccccgcccttccgtcgaaggcccccgttggccccagccgctggttccctgtggctgctgctggtggggctctgggggctccttccccctgggccaccagccctggcttggaaccacagcacctgccctccgtgcctggagctgctcaggaggtgggaggtgaggggcaggaggccacaacagccggtgaggcttgggagcgggcctgggtgtcggtggtggcagagcttgactctgcccccttgtttcttcagtccctgaatatctccatgtttgtttggctgcctccgtctccatgtctccaggcggatggctctgtgtgagtctttgggcctgggtgtgcatctgtgggtctgtgtttggagttccctcctagcctggccttctcttcgccgtggcttcccacttgcgaagctgtgtccagtatttgtttcctggtgcggagtctgggaggccacctgccgcagctctgactgagtctaggctcagtccttctcagggtaccaggctgtgggcagaggggagacacctagatgtttcgtgctgtgtctagatttggagacacaaatgatgactggtctttcccaggggctcgtttggaggaaggggtggctggcagcacttttgttccgcatacagagcgggtgttggaatccattgcgggtccttggcctggtctggccctggagcctcggcttcctgtggtgggtgggagccaggcatccgggttatccctccaggcctgggcgcctgggacccctagggagaagagcgggcgggcgttttgaacagaatgtccggcattagttgagccatttctggactaccttcggcccggacgggaacgtggtgctgagatttccagagctggggcagccttaggcagttctcagcaccggcctctgttttccatcttgtctaccccagagatgttgaccagaggcccgggggcagcaggaggtagaaggttcatgcggaggtgttgggcccttttcctgctcccccaggaagtcctcatccgcccctgcttcagtcacggccgggtagcagccctggccctcccatggccacggggactccggcctgttcatggcgggagagagagggcgcggacagggcgggcctggaaggaagggctggcctcagtcccctctggactgctggtgcctcggccacactgagcctcacacgggtgcgtgtgggctgcgagaagtgacacggtcctcttggaagtcccactggagccttgggatgaagctgccttggagtgtgcgtgggcgccatcccgagggggagcttcctgtgcctccgagcgtgcgtgggcgccatcccgagggggagcttcttgtgcctcggagcgtgcgtgggcgccatcccgagggggagtttcttgtgcctcggagcgtgcgtgggcgccatcccgagggggagtttcttgtgcctcggagcgtgcgtgggcgccatcccgaggggagcttcgtgtgcctcggagcgtgcgtgggcgccatcccgaggggagcttcctgtgcctcggagcgtgcgtgggcgccatcccgagggggagtttcttgtgcctcggagcgtgcgtgggcgccatcccgaggggagcttcttgtgcctcggagtgtgcgtgggcgccatcccgaggggagcttcttgtgcctcggagtgtgcgtgggcgccatcccgagggggagcttcctgtgcctccgagcgtgcgtgggcgccatcccgagggggagtttcttgtgcctcggagcgtgcgtgggcgccatcccgaggggagcttcttgtgcctcggagtgtgcgtgggcgccatcccgaggggagcttcttgtgcctcggagcgtgcgtgggcgccatcccgagggggagtttcttgtgcctcggagcgtgcgtgggcgccatcccgaggggagcttcttgtgcctcggagtgtgcgtgggcgccatcccgaggggagcttcctgtgcctcggagcgtgcgtgggcgccatcccgaggggagcttcctgtgcctcggagcgtgcgtgggcgccatcccgagggagagtttcttgtgcctcggagcgtgcgtgggcgccatcccgaggggagcttcttgtgcctcggagtgtgcgtgggcgccatcccgaggggagcttcttgtgcctcggagtgtgcgtgggcgccatcccgagggggagcttcttgtgcctcggagcgtgcgtgggcgccatcccgagggggagtttcttgtgcctcggagtgtgcgtgggcgccatcccgaggggagcttcttgcacacgtcctccgcactcttactctccttcccccaggagcaagcatgttttctcgagtggtgtcaggactcccagcagccatgggggctcttgcctcggccatacctgcactaagggaggtgggcttgatgtctcctttccctctcagaagtgggtcccaaaggaggcttctgtgcctggagctgggcagtgttggcggaagggagaggccagacggagtgacctgccttgggcacgagtcacgctgctctgagcaaggtctcggcctcagcggcattctcacccagttactgagcgcctctgaagaggtgtggagagcagagtccggcgtctggcccgcggcagccaccggggagcccgtgggtgtagcgggagagccgcagcccagccggtgccggggttcctcctctacgggccgccgtgggaggctgtgtgcgtgctggggagccggggctctgctccttcgagtggccctgctatttttcagatgggactcgtctcgtctcggggtactgtcctctctccttccttccctccctgcaggcagggtgggaatcacagggtggctgtgtgtggtggggccaggccagtggccctgtgtatgaggaggctgggcagggggagcacagccccgtctccccgcgccccgcgccccccgcctccccgccgaccgtggtgctctcgggtttgactttggtctctgggatgggctgttccggagtcaccccgctccagccaggcctcgtcaccttacaaggctgtgggtctgggtgcccaggcgtcgccacctcctccgtcctctctccccggcctggctgggtttcagaggagcccttcttcacgctttggccctgggacaggagaagtgggggttggtggggagggcgtgcagtgtggtgccacacgtgtccaccctagcagctctgggctgtcaccgcccccgcgtgcccagactctgcccacggggctgtcaccgcccccgcctgcccagacactgcccacggggctctcaccgcccccgcctgcccagacactgcccacggggctctcaccgcccccgcctgcccagactctgctcacggcatcacgtatgacaagtccagcagcagacgcgggagcctcacaacctgtgagagccttcgggagtcaggagtgtcttgcgggagccctgtgcttcctggcctgcctgcccctgcccctgcccctgcccctgcccaggccccggcttaggccacatcagcagaggtttcgtgtctgaggtcagagggggactggcagccctactgtctggtcactgtgggagagctgagttcccttttggacacaggtagagcccctcctgaggagacggggaggctcccgcaggccttccgggaggtggtggaaagctccggaagcaggtgaagcggtggagggagggactgagttgcccgagtgctcctagactctcccgcgtctgcattcgggaggcaggttgtagctggaggcctggcccccagcctagtgcaaggccctaggtgtcccccggcacccccgcacctctcagaactcctggaacccagccgaggagtgaaatcaagtggccagaagaggactggggccccggccttgccagggaactgaggggtgaggaggaggtgtgggcggggcgctggccccacagacctgaaagctggcgttgggtcccaggtctgctgggatctttctggtaaccgtggacaggtcatgttgcctgctgcagcagcttccagcgtgcctccttatttgcaaaccatagggaaagctgcctgacccacctagagagttgtgggtaaggccgtgtgcaaacaggcctgtacggggcatggtgggtcacgggggctgttggggaggagggccggtggcacacagcctggtcctgaggcctgagctccatcccccttctgccacagtggccagggtgtgaggagggtcccagtgccggggctgccccgccacgcctggcgttcaccgtgccatctctgtcgcgcagggccgagaactactggtggcgtggccagaacacacggacgctgtgtgtggggcccttccctcgcaacgtggtgacctccgtggccggcctgtcggcccaggacatcagccagcccctgcagaacagcttcatccacacagggcatggcgacagtgacccccgccactgctggggcttcccggacaggattgacgagtgagtactgggcggggatggatgctgacctggccccgctcgggactccagggccctcagcacggcacgcgtgggcggaatctgctcttcaccctttcgcccgggcttcagcccccgacccgccactctcccctcctcaccctggccttactctcgggaagctgtggaaccctaggaagcccagcctggtgggggttctccaggggaatgttctccaggggagtgttctccaggggagggttctccaggggagggttctccaggggaatgttctccaggggagggttctccaggggagggttctccaggggagggttctccaggggaatgttctccaggggagggttctccaggggagggttctccggggagcgttctccaggggaatgctgtccctgccattttcaagctttggggggccgatctcctaactctgagacacttcatctgtgaaacaggttcacccccccaataaggggaaggctgtaaatgcactctgaattagcacttgctgctcagatgcaggggtcctgagagaagctttcccactcactgtagatgaaagtagggtcaggagcttctgaggatggactcctgtttggtggaaaggtccccggagccacagctgtaacccctcttggtactcgggccttaggaaaatgaacttgggaggaacccggtgggagctgctgaggaggagagcttctcccatgacccccctgtggccccctgtgaccctgtgaccctgtgacccctgcacacgagcagtggttttccttctcctgctggtggtgccagagtcctggagacgtgaacctgctggctcaggccctggggatgtatgcaggtccacatgggagtgagcctgctttccagaaccagagtgggactggggaccttggggactgcagagggaacgttaggtggcagctccgcctccccaccacacagtactctacggagctcactccatacctgggagaggccctgtctcctatgtaagaggataaggccaccgaggggcatctgggaaggacacgcagaatcagtcacttccgggatgccaccccccaccccccgaagcttcttgcgccaggcctccaagcctctctgctggccgcagggggattccaggcccctggcctctgcagcccttctcctgctgacttctgatactctggtctgccctgagaggcgtggaaagcaggggccttcacccaccgggccccacacaccagaaccccacacagcgggcccccacacaccagaacccacacagcgggcccccacacaccagaaccccacacagcgagtccccccacaccagaacccacacagcgggcccccacacaccagaacccacacagcgggcccacacacactggaaccccaagctcacagggctcagcccatgtgttttgcctaaaaagaacccagcaagggcctgagagttggggtgaaagactgcagacacctccaggagaggctggtgccctctgccccactcctggcatgctgtggccagcccagccccattcctccaggctttaatcagccccagtgactaagtctcagatactgacagttggtgcagggacggagggtggatccggagcaggacaggtggcccagcctctcccgcacctcctggccatgtggcagaagggtgcctcctgcccaccctggctgggcaccatagctgggatgccccgttcttaggccctccatcgtggcctgcgggacaggagtgtctgccctctggccgctgcctggtgtgggctgggggcctggggggttgtggaggaccacctctgcccttgtagggtgtagttggagtccctgaggtcctaggctttccatcctggggtcaggtgtcctttctctgccttctctccaggacaccccccagctgagacgtgcggtcaggttctgtggactgggaggcgggaggcctgtgcttcagacccaagactacacccggtttcctccaggacgaaggggctctgatgagattctgccacccctccacacgcttcccctgctctcttgacccagctctctcccccacagactgtatctgggaaaccccatggacccccccgacctcctgagcgtggaactgagcacctcccggcccccccagcatctaggaggggtgaaaagtaagagcccctctgctccctggtgtccctaactcatcggctactcaggaaggggcactgtcttcacaggccaccctaaggctgctgttctgtttttggggacagtggggtcagggcagcaggcgggacagctgtgtccctggctccggctgggcgtggggtggaagacaggcagctgtatccgccgaggtgggcctcctcgggctgggtctgcagcaggcccgtccgccccggcgtccctcctccctccttccacggccgagctcagatcctggctttcctcacttccccctaatcctgctctcctgtcccaagccaaaaccaccccacggctccggctctgcctggggcctcctccatctcccggtcctctgcctatcatactggaccgccgtgttcctcatcctgccgcctgcggcctcccgtttgctgggggcttgtacattcactcgcccccattcacttctctcccttcgtctctctacactctgccctctcgtccggccgtctccctcctttgtcctctgtcctgctccgtctctctccccctgtccgcatggcctttcttgcaggggagcctccacctcgcccacctcagcctgccttcttcactcagagtaagtggggctgcttccgatgccttggcccccgcccccgccccctctctctcactcctctcctggaaggtacagagcctgggcggctgggccggaggggaggtgggtgggtgtgtgctgtgagcttccgcggctgccctggcctagcatgcctgccccccctcgagcccgccccccggagcctgggcttctgctcacgagtgtggccctggcttccgcctcggcctcactccctcccagacctgtctgagcttctggagcacgagtgtggccctggcttctgccttggcctcgctgcctcccagacctgcaggcgctgtctgggctttgtggccgttggtcaggagtactgtcctctccaaggatagtccttatagcccctgatggcaggaggcggctccgtgcctgcactaatggtgtgccgtgacaggggcggggatgagggctcactaactcgccagggcgcaggagcagggccgccggggtcttgtgctggtggaggcagcgtcaggcaggagccagtgttgcttgctgcagcttagacggagcgaggcggggctcaccggcccacatggggctgccgggcagagcaggttccgccctcctgatggagtggtcggaggtgcgctgagaacctggccgccggtggctgacctcagacctcggggggagttgggagtggagggttgctgggggacacttggctttctctcccacgtgccacctcccctcgtgtcccagaccctgcctgactgccttcctgttgggctctccctttccatcacagaaccaacctatgaccctgtgagcgaggaccaagaccccttgtccagcgacttcaagaggctgggcctgcggaagccaggcctgccccgagggctgtggctggcgaagccctcggcgcgggtgccgggcaccaaggccagccgaggcagcggggctgaggtcacgctcatcgacttcggtgaggagcccgtggtcccggccctacggccctgcgcgccctccctggcgcagctggccatggacgcctgctccctgctggacgagaccccgcctcagagccccacgcgggcactgccccggcccctgcaccccacgcctgtggtggactgggacgcacgcccgctgccccccccgcccgcctatgacgacgtggcccaggatgaggatgactttgagatctgctccatcaacagcaccctcgtgggcgcgggggtccctgccgggcccagccagggccagaccaactacgcctttgtgcctgagcaggc

SEQ ID NO: 14529 - DNA, 2359 bp, Homo sapiens
tgcgcgggaggcgggcgctgggaggcggcgcggagccggctgagcgcagggccgagctgcggggcagaggctgggaggcggcagaatgcagccagaggagggcacaggctggctgctggagctgctgtccgaggtgcagctgcaacagtacttcctgcggctccgagatgacctcaacgtcacccgcctgtcccactttgagtacgtcaagaatgaggacctggagaagatcggcatgggtcggcctggccagcggcggctgtgggaggctgtgaagaggaggaaggccttgtgcaaacgcaagtcgtggatgagtaaggtgttcagtggaaagcgactggaggctgagttcccacctcatcactctcagagcaccttccggaagacctcgcccgcccctgggggcccagcaggggaggggcccctgcagagcctcacctgcctcattggggagaaggacctgcgcctcctggagaagctgggtgatggttcctttggcgtggtgcgcaggggcgagtgggacgcgccctcagggaagacggtgagtgtggctgtgaagtgcctgaagcccgatgtcctgagccagccagaagccatggacgacttcatccgggaggtcaatgccatgcactcgctcgaccaccgaaacctcatccgcctctacggggtggtgctcacgccgcccatgaagatggtgacagagctggcacctctgggatcgttgttggaccggctacgtaagcaccagggccacttcctcctggggactctgagccgctacgctgtgcaggtggctgagggcatgggctacctggagtccaagcgctttattcaccgtgacctggctgcccgcaatctgctgttggctacccgcgacctggtcaagatcggggactttgggctgatgcgagcactacctcagaatgacgaccattacgtcatgcaggaacatcgcaaggtgcccttcgcctggtgtgcccccgagagcctgaagacacgcaccttctcccatgccagcgacacctggatgttcggggtgacactgtgggaaatgttcacctacggccaggagccctggatcggcctcaacggcagtcagatcctgcataagatcgacaaggagggggagcggctgccccggcccgaggactgtccccaggacatctacaacgtcatggtccagtgctgggctcacaagccagaggacagacccacgtttgtggccctgcgggacttcctgctggaggcccagcccacagacatgcgggcccttcaggactttgaggaaccggacaagctgcacatccagatgaatgatgtcatcaccgtcatcgagggaagggccgagaactactggtggcgtggccagaacacacggacgctgtgtgtggggcccttccctcgcaacgtggtgacctccgtggccggcctgtcggcccaggacatcagccagcccctgcagaacagcttcatccacacagggcatggcgacagtgacccccgccactgctggggcttcccggacaggattgacgagtgtcctttctctgccttctctccaggacaccccccagctgagacgtgcggtcaggttctgtggactgggaggcgggaggcctgtgcttcagacccaagactacacccggtttcctccaggacgaaggggctctgatgagattctgccacccctccacacgcttcccctgctctcttgacccagctctctcccccacagactgtatctgggaaaccccatggacccccccgacctcctgagcgtggaactgagcacctcccggcccccccagcatctaggaggggtgaaaagggagcctccacctcgcccacctcagcctgccttcttcactcagaaaccaacctatgaccctgtgagcgaggaccaagaccccttgtccagcgacttcaagaggctgggcctgcggaagccaggcctgccccgagggctgtggctggcgaagccctcggcgcgggtgccgggcaccaaggccagccgaggcagcggggctgaggtcacgctcatcgacttcggtgaggagcccgtggtcccggccctacggccctgcgcgccctccctggcgcagctggccatggacgcctgctccctgctggacgagaccccgcctcagagccccacgcgggcactgccccggcccctgcaccccacgcctgtggtggactgggacgcacgcccgctgccccccccgcccgcctatgacgacgtggcccaggatgaggatgactttgagatctgctccatcaacagcaccctcgtgggcgcgggggtccctgccgggcccagccagggccagaccaactacgcctttgtgcctgagcaggc

SEQ ID NO: 14530 - DNA, 23886 bp, Homo sapiens
ggcgatggcctcgcgccagtgctgggcgcggcacccccgcgtgggcctgtgttgggcggcttttgagcaggagtccgggccctcgtgtcaccgctctgaagtcaaggaggtcagtgcgtgcccagcgcacagcgcgtgcggcgttgcgggagtggcgcgcggggaaccggccgcgggggcctcggggcgggggcgtggcctgcgcgggaggcgggcgctgggaggcggcgcggagccggctgagcgcagggccgagctgcggggcaggtgggcgcccggcgttctgggagcagagtggccgccggggcaggctgggggcggggtgggctgcagccccgggatgcctcggaggagggggtctcagatggagtcggacggaggcccctctgctgtgggcttctcggatggccccttaccgtgaatacgggggactcgtgaatccccaaggccccagttggtggctctggggccctggaggcgggctgagggctgagtggagcccggttccgcggccggcgaaggcagagccccggctctcggtgggggtcagcccggggctggcacagctggctcactgggagagggtgggagccgcgccccggagaggaggaacggagctgggacgggctgcaggagggaatggccgcaggccggcaggaggaggggcgcgaccacccggccgccggccgatggcggatgaggctatgggggctgagacgcagtagcggccctgcacttctggaggatgctcgaggcccggccccccaggacgcagggcagtgacgctgccggtgccgctgcggggcgggggctgcgggcgctgcttctctccctgaccgcagccgctgggatttggggctccatgggggagagatctgcttaccagcgcctggctgggggcgaggagggaccgcaggtaatggggaaggctaggggatagccagatacctgggccccagaccccttcgtctgctgtgagccgggctcagccctgccccctgcggcggcctcaggagtgagagtgtctgctcctgggccaggggacagagagcggtgtgtttatgtgggtgtggcggtggtgacttagtgatgctggcatctgcctgtgtgtgcatggatcccctgggaccccaaaaagctgcccgttgggctttcttccatgccccaagggagtccaggaagtactgctaggattggggttcagtcttttaggagaactgagtctgtatgtcctgggcattcccgtttactaggcttctgaatatgaatatcaagccagatgtccttgtttgcttttgaaaatatggtcacggtgttgatggatggggtagcttcccttccccttggagagaacgcacttcctctcccgaccggcagagggcagtagctgacaggagaaagggggactcggtaggagcgttggggcttaaggtcgggctgttttcctgggcgaggagaaagggggccgggccgggccgggcgcggtggctcacgcctgtcatctcagcactttgggaggccgaggcgggcagatcacctgagacgaggacgctgaggtcaggaattcgggaccagcctggccaacatggcggaaaaaaaaaaaatagctgggcacggtggcgggggcctgtaatcccagctactcgggaggctgaggcaggagaatcacttgaacccgggatcgcgccactgcactcaagcctgggcgatagagcaagactctcaaaaaaaaaaagggggtgggggttccaggagccggcctggcgctgacccacacatactttgcttcttcccgcagctggattactgggccagttacaggtcttgttcttactggacatccaaggtcaggcatggggttctggtgactttgagacacatatttctggggacgctagagtttttaatctggccattctgatccagcagacccattttgaaatagagggaataaccctgcttaaattgttccccggcccccggtccctgggtctccttccaggtgtgcttggtgccagggtaaggctgtaggcttctctgatgcaagggcacagtcagccaaggtttggggaaaagtcagctccagtgtaacgcaggcctgatcttgtccacctgacctcagcccccactccatccacacctgccatctccacaagctttgtgggctggatggcagggggatgaggaagagggactgaagttgggggtgtccttctccccacctcctggagttagaccaggaaatggctgtcccttttggcatcatcagggaggtcaagtgctgggagaggccctgggaagggagcctgggatgctgagtccccaaagccctgctccccagctgcccacccctccagccagctgaggctccctgagctggtggccagctggacagggacaagagagcagtgtgcaagaaacaggggctccctaggcatggctcagcagggaggggggtgcctggggagctggagagggcttcctgcagctgtcaggtgtgtctgggggccgtagcgaggggggtgtaagagcagctggcaccctttgaggagggccagagagatcatttgtcagttctagaaacatgagggccccacgggggcttgatggagtgtctctaggccccttaatctgaggccgtggtctgtgtcaggggttatacaggagacatcctacagctttggggtgggggcgtcccagcaggagtctcagggcatatttgtttgttttgagcgggtttgggaacttggccacctggtctgagtaggaggcaccctgggtgtttgggcagcagacagggccaccccaggggagggggtgaggatcctcaccccaccctacccttgctcttggctggactgccccactctggcaggctgccggccgcctatttccgtcgggcaccagggtaacagggccacatcagggtctgagccaggagacacccagccaaggctgggactcgggggtgggggagggtctctgaggagtcatcgcagggcccagcggagcctctggggtccaagcctcccactcaggctgtgtgttagtccccacgtccccacacaggtccatgagggagtccacagccctgcttcatacgtgctgtttgagtcacatagccgccaccctaaagtcccaggagttgtctgcaactgtgagggctggggtagaagccagagacaggagctttgtgtatggggaggcaggggggccagcgcgggtggctgggaggaagagtcccccccattcctgccgccctcttggcagtgattcagaaaggtcctttttcagccagtgtcagagctgctcagctggggagggagggagagagggagagagagaggcaggcaagagggagggcggccgggcgggcagttgggtggggaagccggggagtagggctggactgtgaccactgccctggagagaagacagaaacaggacagaggatcccggctgcagccagcgtgaggaaagctctgctccctgccagaccggccagctgtggaaacccagcggggcttgcagcagagcggaggggcccaccccgttcttcctcatttcccacccctggtgtgggatttggggggctcctgggcagagtgcgaagctccggagccgaggccactggatccccagtgactgctcgggggggtcccgctgcgtggagatgccggcagcacgtcggttccctggcctggagctctccttccctctcctggccagactgcggcgacgcctgtacacagtgagtggggggcaggggctggactgctggggactggttgggctcctcagcaccagcacttgactgagaggcagaaagcaagactgggagcggctgagggaccccgccagtgagggcttgacggggagtccgggccaagtggcctctcctgcggctgctgcattccttcttcttggcctgtgtgtttgcacgccggccacagagtagtgacggacacaggtgtgcagactccatgaggtgcgggggccaggaccatgcagaattggagagtgtttgaactctggaggagctgcagccatgccctgtgctgcacaaagaaccttgggctggagggggacttagaggggaggcggacccctgcggagtcaccctggactgagaccctgaccgcttgcctcaccagcatcccggagttccttcccgtcctcccacatgcatcccctgtgcagagctgcgctgttgctgggtcagggagcatggagtgcacagctgaacagaggtgcattagctggtgtttcagggagagggaacaggccgggctgtgctttctgaagagcttcaggggaggggcctctgggtctcccccagccctgaccaccccgggcatggctttgagctgttttcaggagcctagaggagggggcctggatccttgggagttggtggtgggaaaaagaagaggagccctggagactgctctccctgcgggagactaggagcctccatcctgaggctgagccctggagggggggggtcactttgctccagggacagggcagcggtggccgtggccgggtggagaggagacgctgcctaggcccgtgactcctagtgtgcctctgggcttgcttccggaaagccacgacgcctggtcctcttaaaccccacgcctcttgttttgtaaacagatgattttgttgaggataaatgaatacagcttaatacttagaactgttcctcgcatatagtaagtgcagttgaagtgttagattttattttattttgagatggagttttgctcttgttgcccaggctggagtgcaatggcacgatcttggctcaccacagcctccgcctcccgggttcaagtgattctcctgcctcagcctcctgagtagctgagattacaggcatgtgccaccaggcccggctaattttctattttcagtagagatggggtttctccatgttggtcaggctggtctcgaactcaggtgatccgcccacctcagcctaagtgctgggattacagctgtgagccactgtgcttggcctagatgttatttttattgttacttgtcttaaataaagttaatagaaatatataacctgttatattaacatgttaacctgtgtacagtgaaacaagcaacacagtgggaactctaatataaagagacataagaggaaggtaataatattttatgtatcctaatacgttagtaacctagacaatgtagtgaggagtcagatcttgagacctcaggtggaaacaccgtgaaggcagcatctgcaagtgctgaccgagaggggagttttgaaataatgagagggggttgccttcactgacatttttgcaaatagtggacttctgctatgttctgaataaagcaaagtccattttcccttaagtttacacagtagtttcattccaggaaaatttattttatattaaaactgtaaggccaggagcagtggctccccagcactttgggaggccagggcaggtggatcacttgagctcaggagttcgagaccagcctggccaacatggaggaaccctgtctccactaaaaatacaaaaattagccgggcgcctgtgatcccagcttcttgggaggctgaggcgggagaattgcctgaacccgggaggctgagtttgcaatgagccaagatcataccattgtactccagcctgggagtctcactctgtctcaaaaaaaaaaaaaaaaaaaaccaaaaaactataaaagtactttcttatttatatataaagtgggatcatattctaggtttgcatgatcataaacaccttcatgaattgagttgtgtgggatttgggacagtgcgagaatgtcctacgcattgcaggctagctcacgctcttgtcccccaaccacccactgaatgtcactaaggcccccccaaatgttgtggcaaccagaactgtcccatagggggctgtgcagcctcatgagaaccattccagtaaagggttacagctttaagtttggaaaccacccggctggcccagctgcctggcccggtcgccgaggtggaagagccaggatttgaactgagagtttctcattcccctttgttactctttgtacttccctgagctgcctgaaaaagtcggaactggcactgtgttggcagggccactgggaactgtgggggcaggaggctcacgctgggcccaggctgtgtgtgcctgcttctcagtgctgctcactgtgatgggagctggggaggaggccaccgctgagtgggggagggggatggcttggtccccagccgggcagctggccttttttctctcgcctgttcctctttggggattgagcatgggtccggggctagcctggccacgccctcagctctgacacaccttacgcagacagggatgggtttgctgtgcggtgggtccgcttgcttagctttgaaggtgccaccagcttctttatctgggcccaggatagtgtaggtcagaggtcactctccggtaccactggctgattgcggcctgcagtgtgctttggccagcacgctgtgtgtgcgtgtgcatgcttttcagatctgaactattcagcattgttaaaaagtcaggagaaagacgaatattaagtgaaatcagggaacagaatggtatggttaatgcgtgaatattcgtgtagggacaacagagtctgaagcgtccgcagaagacatcactggcaactcctggggagccgggtggctgtgcagctggggagggaatgagattcgtggctcagtgtgccttctgaatattttaccacgtgcatatattaccttttccaaactttaatggtgagatttcacatgtaaattgggatttatttcttgaaaaaatggaaagctttgacaacactgggccacagtttcttctgacaaccattgatgggatctgagctccctgttgacaggggtgtctgcgagcccaccgcaggccccacccctccctcctgtcttccgcttgctgtggccctgtaggcacttgagtggtggcccgtggagtggtctttggattgttaggagaggctggggtggtcaggcgctgggaggaacttagcttagagctcatctgaccctgagagttttctccgtcacatctaaggagcccatagatgggtctcggggcacattgcaccctagagatttttatcaaatattaggagtaagaacacgtcggtgttcccggagagaccactgttagtttttaaaagattttcaaggactttcgacccctagaaacttagagcaggaatgtgagcacaggttgatcttgggtcactcagtcacagatcacatttcgggagcaagaccctgactcctgactccagggccagggctgtatctccgccgccctaattgtgccctgtggctggcaggaataggggacgtgggtccaggcggttctcggtagcttccctcgggagtcagaaggtggtgtgagcccttccgggtggccgtgtagtgggatgaaggtgagcccaggtcactcgggcaggcccctgttgtccccccacaacccttgtccctgagccactcctccccccacagaggctgggaggcggcagaatgcagccagaggagggcacaggctggctgctggagctgctgtccgaggtgcagctgcaacagtacttcctgcggctccgagatgacctcaacgtcacccgcctgtcccactttgagtacgtcaagaatgaggacctggagaagatcggcatgggtcggcctggtaggtgggatgttggcctggcttgtcttgcccctgaccctttccgtcctctgtcctcaggaccactcggtgcacgggtggcagctgagaactctgtcccagagccctgagggagcaggagggacatcagtaggtgctgatgtgtgatgagaacagttggcagttataaaggtgaattggagtttgaggagagtgaggccttccctaaagctggctacacaggagtcactccatgccccgttgtgattgttctcacgtagagtgtatgtcctccattgcccctccttcataagcatcgaattgagtctgttctcatcattctgactaccggggggtccatgtgcagagatctgtagggagaacgctaactctcagatggtttgctgattcgtgctcacgctctctttcttgctctctcacacgcacacacgcatgcacacgcacaggcatacacacacacacacacacacgcaggcacacacgcacatgcgcacacacgtgcacgcacgcatgcacgtgcacacacgcatgcacgtgcgtacgcacgcgctcacacgcctgcgcacacagacacgcacacacacacacacgtgtgtgcgcacacccgcatgcacacgcacggcatacacacatgtacacacacgcgcgcagacgcacacacgtgcgcacacgcgtgtgcacacacacgcacatacacacaggtttgctctgatttgagttcaacccttatcttcatatttttcctaaaagtgggggttgtagcatctaaaagtcatgatgttcttcatagaacattagaaacgtattagggctttcaagttaaaatagctaaataggtaataatgtgtcaagttagacactgacttagttaaaatagctaaataggtaataatgtgtcaagttagacactgacttagttaaaatagctaaataggtaataacgtgtcaagttagacactgacttagttaaaatagctaaataggtagtaatgtgctaagttagacattgatttatgctactttaggcctggatagttggtgtctgatgccagtagcataaaaaaattttacggagggaaaaaaacctcaacattgagaaaattctgttcattaccttgatttttcctgagaactgggagaagcccatcgcttcaagtttttggttaaacaccttcacccagtttgagagccagtgccaggaagtggagtgcagagaccgtcggtcagttgaggctccgggttagttggggttgatttcattgctatcatcgggtgggcggtgtctagtgacaggctcacccccaaggggaccacaggcagcagcctctctcgggctacggcggccttcacagcacgcggttccccgctctccctgcaggccagcggcggctgtgggaggctgtgaagaggaggaaggccttgtgcaaacgcaagtcgtggatgagtaaggtgggtgaggaggtgggtgaggaggtgggaggggggcagcctcgaacgcccccctccgcttctggtcctgggaaccttccccagctccccggcaggtcgaatctcgccgttctgccggcactttgtacaggaccccctcgtccagggtcttatcgggcagggcacttgtagagctgctgggctaagtgtctgtctccgccagatacggacacgtgagcagcctgtgtgcggtgaggccttcacagcccctctcggcacgcctggaacaggacctcattgacaagtgtgccttaacttagccctgctgtgtctgagcgttggggccagtgtccagcgtggggtggtggacctgtctggacccagaacgtctttgcttggcttccctcctccctgaccctctctaatctctgggtttctctggtcatctgtccctgctgacagcttccttccccacagcctgtccccacctctccccacaccttgtcctaatttgggtctgtggtgtagtgagtccctggtctgactcagtggaactttgcccattgtctggaagacaatgagagaggaagtgagccagccgtggtctttcctccccacttctggcttcagggctgggttggggggtgggcagggccgaacagctgcagtgggattgggcagcagagattttcctggctgcaatccggcaaaggggctgtctcttgggatcctttggcttttcctggaaacactgtcctggtcctttgcccgggttttagggaaggatgagtagtgtcgggatggtggaggcaggagaagagagcagcgtggtttgctgagatttaggggtcttggatctgccactggctcctgataggtccctgggcggtcagtggcctccagatttttgttgtgtcttcagtgaaatgataccggtccccactgcccagctcacctcccggggctgcaggaggcaccggagataatggctgtagagggtcttgtaacctgaacattgcttgcaaacataaggaattctagttactgggaggaagcacagggcagaggccagaagaggccctcagatttgaggcaccctagcccagacggataaggatccaccagctctgggggcgtgagacccaagctggcaagaatctgcaatctggagccaaggctgtgggtgcctcagtggaggccgagtcagaccgacgtggccagctttgaccctcatggcctcctttcttctgtcccttgaccttcggctcctccctgtccaccctggcctccgagtctcctccacttttccttccgtctcagccctcagctctaggcgcccctccagagacccagctgtcttcccaggccccttcccagcaaggactagcttcatctgaaccacacacacactcacggttcaacctcagactaaaattatcctctcccctgggcaggatgaagggcagccgactccctggtgagggtggagacagacagcaccaaatggtcaggccagagaaggggccagggctaaaaatggacaaggaggtgtctgtggagggcccctgcggctccatcgatgcgggttagggctggagtctgcggggtggcgggtgcaggaagggagggtggggcaggactgggaggagactccgaccttggctgggcggtgccctccctctccacacagctgggtgtggggccgctcagccacaggctgcatgcctgtcggtctctttctggcaccctccttgaggccagcatcaggctttgggttcatgtttgggggtgtgccctggacggagtgtgggcctccagccaggctgccccactgacagtttggcaaaaccaggacctatctggaagccgaagccggggatcaccaggtggacccagcggggtgggactgagtgactgaccctggggtgttggattccatctggcccccggctgccttcaaacaggtgttcagtggaaagcgactggaggctgagttcccacctcatcactctcagagcaccttccggaagacctcgcccgcccctgggggcccagcaggggaggggcccctgcagagcctcacctgcctcattggggagaaggacctgcgcctcctggagaagctgggtgatggttcctttggcgtggtgcgcaggggcgagtgggacgcgccctcagggaagacggtgagctctctgtgtcctgccagcgcagcagaggcatgggacccggggctggtagtggctcttctgcccccaaccagggtgtggatgggactggggatgcgtcacagtgtggctcatcccagagtccgtgctcaggatttttggggttttatttatttatttatttttgagatggagtctcgctctgtcgcccaggctggagtgcagtaggcacgatctcggcttcctgcaacctccactttccgggttcaagcaatcctcctgcctcagcctcctgagtagctgggattacaggcatgcaccaccacactcagttaatttttgtatttttagtagagacggggtttcaccatgttggccaggctggtctcgaactcctgacctcagatgatctgcccactttagcctcccaaagtgcttggattacaggtgtgagccaccacgtccagcccatgctcaggtttaactaagcacatttattatttcaactataaaaataatttattataaaagtttggaaagtatttgaaaaacaagaaaaaaaaaatcgcctgtaatcccaccactcagaggaagccgagcctcttcctcccactttaggtattttgttggatttagttaagatacaaattctggatacagcttttaaaatcttgttctttcttctcggcgttgcatttaacattttcccctcagggataacgtgtcaccacagcatacagttctggtgtgactgtttcctgtgcagcagccgtgtccttactgctcagatcacgtgcggtgcattcccagcacctcagagggctcctcattctccgtccactcagtgcgtccttctcccggggaagccgctgtcactcagtgcatccttctcccggggaagccgctgtgcagacttccagctccacagctttgtttttggcattacatttacagcattttccttctacagcaaaacaccttttaatattccattttatgaccagcctgagcaatatggagaaaccccatctctactaaaaatacaaaattagccaggcgtggtggcacctgcctgtaatcccagctactcaggaggctgaggcaggagaatcacttgaacccgggaggcagaggttgcagtgagctgagatcacgtcactgcattccagcctgggcgacaagagcgagactgtctcaaaaaaaaaaattccattttataacatttgaatattctctcatcatactggttatctcttactttttggttggtatttaagcccggcattcccccaggaaggggaggtgtggccgacgatggctcctgagggccagccgtctgcccttctccagccaggcctcacgcagagcacgtaagcccaggcactggtgacatgcttacccacccagatgaggagctcacaggcagggatcgttgagccgagttggagggtggagcaggttggctccgcgtgtctgggacctggcaagtcctgagtccttgcaaatcccgctctgggcaggtgagtgtggctgtgaagtgcctgaagcccgatgtcctgagccagccagaagccatggacgacttcatccgggaggtcaatgccatgcactcgctcgaccaccgaaacctcatccgcctctacggggtggtgctcacgccgcccatgaagatggtgagtactgcgggcgggagggggcgggcagggagagggctccggtcccatatgtgtggttcggttcctctctccatcctaaggtcagaggcgccctagatcctactttggtcccccaacctgatggagtaaaggggtccacaggggcccagcctggtacgggctgtgtctgctgcggtccagtccgggtctgtctctggattttgctggtgctcagtgtcaagagagttactcccatgggaggggctggccactgagtttaatttggggaatttatgttttatttatctatttattttgagatggagtctcactttgtcgcccaggctggagtgcaatggcatgatctaggctcactgcaacctcggcctcctgggttcacgcgatattcctgcctcaggcttccaagtagctgggattacagccgtgcgctaccatgcctggctaatttttgtatttttagtagagacggggtttcaccatgttggccaggctggtctcaaactcctgacctcaaatgatccacccacctcggcctcccaaagtgctgggattacaggcgtgagccaccacgtccagctgagttttggaatttctagccactgcctctttgggctccttctctctaggcatcagtttcccaaattgcctcgagggagaggcctgagaaactgcaggactcctagaggtccccagacagcaggccaggaaggtgcgtgcagcctggctctggaaagccttcaggaaggggactgggggcccagcgtgggctgctgagaaggggcagggtcctccagctcattcctcctgcctcctccgtggcctcaggtgacagagctggcacctctgggatcgttgttggaccggctacgtaagcaccagggccacttcctcctggggactctgagccgctacgctgtgcaggtggctgagggcatgggctacctggagtccaagcgctttattcaccgtgacctggctgcccgcaatctgctgttggctacccgcgacctggtcaagatcggggactttgggctgatgcgagcactacctcagaatgacgaccattacgtcatgcaggaacatcgcaaggtgcccttcgcctggtgaggggcaggtgctgccagctcacagagtccctgcagacccaggcctcaaagcttctggggctttctggacccaccacagcccctggttttgcttgggcctgcccttgtctgttctaagcctggggtgccctcctttgcacccattcgctcaccatccatctaggaattcttgagggcccacgtgccagggtctgggtgctggaaatcacagggatacatgctgtgggactctccaaggggctttgctgggtggggtgatacggggatagatgctgtgtcctctccaaggggcattgttgggggtcgtgtttcagggatagatcctgtgtcctctccaaggggcattgctggcgggggggtgttatagggataaatgctgtgtcctctccaaagggcgttgctggggggggggtgttacaaggatagatgctgtgtcctcttcaaggggcatcgctgggggggtgttacagggatagatgctgtgtcctcttcaaggggcattgctggggggggtgttacagggatagatgccgtgtcctctccaaggggcgttgctggggggggtgttagagggacagatcctgtgtcctctccaaggggcatcgctgggggcgggtgttacagggatagatgctgtgtcctctccaaggggcactgctgggggggtgttacagggatagatgctgtgtcctctccaaggggcactgctgggggggtgttagagggacagatcctgtgtcctcttcaaggggcattgctggcgggtggtgttagagggatagacactgtgtcctctccaaggggcatcgctgggggcgggtgttacagggatagacgctgtgtcctctccaaggggcattgctgggggggtgttacagggatagatgctgtgtcctctccaaggggcactgctgggggggtgttacagggatagatgctgtgtcctctccaaggggcactgctgggggggtgttagagggacagatcctgtgtcctcttcaaggggcattgctggcgggtggtgttagagggatagacactgtgtcctctccaaggggcatcgctgggggcgggtgttacagggatagacgctgtgtcctctccaaggggcattgctgggggggtgttacagggatagatgctgtgtcctctccaaggggcattgctggggggcgggtgttacagggttagatgctgtgtcctctccaaggggcattgctggggggggtgttacagggatagatgctgtgtcctctccaaggggcattgctggggggggtgttacagggatagatgctgtgtcctctccaaggggcattgctgggggggtgttacagggatagatgctgtgtcctctccgagggtcattgctgagttaggtgatacagggatatatgctgtgtcctcttcaaggggcattgctgggggggtgttacagggatagatgctgtgtcctctccgaggggcattgctggggggcgggtgttacagggttagatgctgtgtcctctccaaggggcattgctgggggggggggtgttacagggatagatgctgtgtcctctccgagggtcactgctgagttaggtgatacagggatatatgctgtgtcctcttcaaggggcattgctgggggggtgttacagggatagatgctgtgtcctctccaaggggcatttctgtggggaggtattcaaaggtttcctaaaacatcagggaagttcgccagggaaagactcgttggtaagcatgttctagggagagctagtggtagacaggcccaggccacagcaggccttgtagatgggccagggctgcttacctgtgcactaggggtggtacttggccctgccctggcccctgtgtgggcttatcctctgctgagaccattgtggttctctggtgccagaggcacccagaggtctgtgatctgcctgctttgaggcgggaagggttgttccagttctgctttcccaagcggtggctgtgggcaacccttatgatccaggacgcatggtcatcttaacgagcagctggctttacacccagggcgagcagaggtcttaaattatgcccgttgtcctggagtaatttagagcagcctcttttgtattcaggcatcctggtttgcatggtaaggtatgaatatagttgcctttaaacagcacgatgaagtgggcgggttattgttctcatttcaccaaggaggataatgaaccttagcgatctcgagtgactttcccggccccatcccctttgaggggcagggctcgctctgcttccctgtctgggcaccaccctcctctctgcacctcagtccacgccgggatgtcctttctgacctcactgcagtggcacttccccctcaaccgggggtgcccagaacgaatgggtgtatttgggtgaagccagtatgactgtttctacccattttggttcttccccaggccctacccgaatttcccacccactgcttcctgccaaaggacccaaatccgaggatcccgccccaaatctgggaattgtcattctcccaccacagtcagaaaacagcctgtgatcttctctccctgccccatcccagagcctctgacctccttcctttccatgcttctctggctgggaaacttcctttcctcttcccccaccaggctgcaagtgaataagaggcctgggcttagacgatttccccaagtccctgcatcgtgtcgtcaaggggtcctgcccgcttcacacggcgcccctgagacccactgttgaacctggcacagggggtcacaacaagtgtttgctgcatgagtgttttaagtccctggggcggacgcaggtagggtgtttgagagggcttctctttgacccctgcctctgccaggtgtgcccccgagagcctgaagacacgcaccttctcccatgccagcgacacctggatgttcggggtgacactgtgggaaatgttcacctacggccaggagccctggatcggcctcaacggcagtcaggtgagggctgggagacgggcccccatagggctggtggggtgaattccattccctgcttgcagcctggccctgctggaactgcctctcaccaatggactccctcctcccacgccccgtgcctccccccacttcccgtgcctcccaccacgccccgtgtctcctctcacgccccgtatctgtatggcctcagggagagcccagcaaagagacggggagggaaaagctggggcctgccctccttctctagcccttgccacatccacttgttccgaggctccagacctgggaagaagggactggggctctggagagggcccctcccaggcaggcagatcccttctttggaggccaggcatggcagcagccgctgcagctgtggatgggctggagggaaggcgggaagtgaagggctgggcgctctgtttgtcgtcaaactctgcacctcctcaccttcagatcctgcataagatcgacaaggagggggagcggctgccccggcccgaggactgtccccaggacatctacaacgtcatggtccagtgctgggctcacaagccagaggacagacccacgtttgtggccctgcgggacttcctgctggaggtgagggacaggtcagcccaggagagctggggtgttcaagctgaggggctacccaggcgtcagtcccagagttggccacgaccttcctcttcctccaggcccagcccacagacatgcgggcccttcaggactttgaggaaccggacaagctgcacatccagatgaatgatgtcatcaccgtcatcgagggaaggtagggagtgcagggctgggccccgccctgggatcgcttgaagggcacaggtcggagggacctgtggacagatctgtttggcctccaagattcccttggccacatacaggctggcggttgggcctgaaccctgcagtgtgaggggaggacaggcctgcctccgtcttcctagtgcctttccctgcccagcttccctccaccaccctttcccactgggctgcagccctggctgtgtggttgggccaggctgcctttatggaggggtagggagtggcctggcctcggtggcagcagagttctggactcccgtgcttcctcctctgctcctccccgcttctctccctgcttcttcctggcacagggactcagccatccacctgggtgcgtttcagtagctgaagcagcccagcctgccctcttgcagctttccatccttcctgctgagcccaccaccccctcccaggcctgcctccagcctctggtcctctcttcccatctccccttgggaggaccctctctatacctaaccctcctcccacagcctctcgggagtccctgtcttccacctgagcccccgcagttctagcgcctgccctgaggccccaccactgctggccctgccttgtgctggctgatccccagggtgtctgagcaactggctggggcagggcaggtttcaggtacctttgaggcaggggcagtattgaggaccaggaagaagagtgaagtggaggaaatcccctgtgctcgcagctcctgactcaggccaggcaaggatggggctagggctgcttcccagggagcctcttccacctgcactgcagcttttggagtctgcggccttcggtgcaatcctgtgcctcttgggggtgggtggaggagacctggggggctgtgtggagtgtgacctgcaccgctgtggccccgacaccccgagccttcccaggcccggctccctcacccttgggcccagggtctgggaataggaatgacatactgagactgcagggcctgtggttaggggtgttatgctggggaagaatgcagaaggttctagaaagagaggcctggggacaggaggcaaacagtctgcaggtttggagctgaggggccagggatgggattgcaagcgtggcgctccggggagcattctggaaataggaagattaagggtgggggggtcccctggaagtacctggcagggcctccagcccgaagtccagcctcatgaccgtgtccacctccacgagctggaaagccgtgggcctggcccctcttgtgctgctgccggagccccagatctttaccacctgcttcccttgctctcagcaggagcctgtgtgcctgccagtgtccccaggggtgactcagagtggcctgtgtttggggcgtgtgtctctggagctggtgttttaggtcaccgcccgggcaaggcgggcagtgggaggggccgggagcggctgctcctgggagggttgtgggtgtgccccgccccgcccttccgtcgaaggcccccgttggccccagccgctggttccctgtggctgctgctggtggggctctgggggctccttccccctgggccaccagccctggcttggaaccacagcacctgccctccgtgcctggagctgctcaggaggtgggaggtgaggggcaggaggccacaacagccggtgaggcttgggagcgggcctgggtgtcggtggtggcagagcttgactctgcccccttgtttcttcagtccctgaatatctccatgtttgtttggctgcctccgtctccatgtctccaggcggatggctctgtgtgagtctttgggcctgggtgtgcatctgtgggtctgtgtttggagttccctcctagcctggccttctcttcgccgtggcttcccacttgcgaagctgtgtccagtatttgtttcctggtgcggagtctgggaggccacctgccgcagctctgactgagtctaggctcagtccttctcagggtaccaggctgtgggcagaggggagacacctagatgtttcgtgctgtgtctagatttggagacacaaatgatgactggtctttcccaggggctcgtttggaggaaggggtggctggcagcacttttgttccgcatacagagcgggtgttggaatccattgcgggtccttggcctggtctggccctggagcctcggcttcctgtggtgggtgggagccaggcatccgggttatccctccaggcctgggcgcctgggacccctagggagaagagcgggcgggcgttttgaacagaatgtccggcattagttgagccatttctggactaccttcggcccggacgggaacgtggtgctgagatttccagagctggggcagccttaggcagttctcagcaccggcctctgttttccatcttgtctaccccagagatgttgaccagaggcccgggggcagcaggaggtagaaggttcatgcggaggtgttgggcccttttcctgctcccccaggaagtcctcatccgcccctgcttcagtcacggccgggtagcagccctggccctcccatggccacggggactccggcctgttcatggcgggagagagagggcgcggacagggcgggcctggaaggaagggctggcctcagtcccctctggactgctggtgcctcggccacactgagcctcacacgggtgcgtgtgggctgcgagaagtgacacggtcctcttggaagtcccactggagccttgggatgaagctgccttggagtgtgcgtgggcgccatcccgagggggagcttcctgtgcctccgagcgtgcgtgggcgccatcccgagggggagcttcttgtgcctcggagcgtgcgtgggcgccatcccgagggggagtttcttgtgcctcggagcgtgcgtgggcgccatcccgagggggagtttcttgtgcctcggagcgtgcgtgggcgccatcccgaggggagcttcgtgtgcctcggagcgtgcgtgggcgccatcccgaggggagcttcctgtgcctcggagcgtgcgtgggcgccatcccgagggggagtttcttgtgcctcggagcgtgcgtgggcgccatcccgaggggagcttcttgtgcctcggagtgtgcgtgggcgccatcccgaggggagcttcttgtgcctcggagtgtgcgtgggcgccatcccgagggggagcttcctgtgcctccgagcgtgcgtgggcgccatcccgagggggagtttcttgtgcctcggagcgtgcgtgggcgccatcccgaggggagcttcttgtgcctcggagtgtgcgtgggcgccatcccgaggggagcttcttgtgcctcggagcgtgcgtgggcgccatcccgagggggagtttcttgtgcctcggagcgtgcgtgggcgccatcccgaggggagcttcttgtgcctcggagtgtgcgtgggcgccatcccgaggggagcttcctgtgcctcggagcgtgcgtgggcgccatcccgaggggagcttcctgtgcctcggagcgtgcgtgggcgccatcccgagggagagtttcttgtgcctcggagcgtgcgtgggcgccatcccgaggggagcttcttgtgcctcggagtgtgcgtgggcgccatcccgaggggagcttcttgtgcctcggagtgtgcgtgggcgccatcccgagggggagcttcttgtgcctcggagcgtgcgtgggcgccatcccgagggggagtttcttgtgcctcggagtgtgcgtgggcgccatcccgaggggagcttcttgcacacgtcctccgcactcttactctccttcccccaggagcaagcatgttttctcgagtggtgtcaggactcccagcagccatgggggctcttgcctcggccatacctgcactaagggaggtgggcttgatgtctcctttccctctcagaagtgggtcccaaaggaggcttctgtgcctggagctgggcagtgttggcggaagggagaggccagacggagtgacctgccttgggcacgagtcacgctgctctgagcaaggtctcggcctcagcggcattctcacccagttactgagcgcctctgaagaggtgtggagagcagagtccggcgtctggcccgcggcagccaccggggagcccgtgggtgtagcgggagagccgcagcccagccggtgccggggttcctcctctacgggccgccgtgggaggctgtgtgcgtgctggggagccggggctctgctccttcgagtggccctgctatttttcagatgggactcgtctcgtctcggggtactgtcctctctccttccttccctccctgcaggcagggtgggaatcacagggtggctgtgtgtggtggggccaggccagtggccctgtgtatgaggaggctgggcagggggagcacagccccgtctccccgcgccccgcgccccccgcctccccgccgaccgtggtgctctcgggtttgactttggtctctgggatgggctgttccggagtcaccccgctccagccaggcctcgtcaccttacaaggctgtgggtctgggtgcccaggcgtcgccacctcctccgtcctctctccccggcctggctgggtttcagaggagcccttcttcacgctttggccctgggacaggagaagtgggggttggtggggagggcgtgcagtgtggtgccacacgtgtccaccctagcagctctgggctgtcaccgcccccgcgtgcccagactctgcccacggggctgtcaccgcccccgcctgcccagacactgcccacggggctctcaccgcccccgcctgcccagacactgcccacggggctctcaccgcccccgcctgcccagactctgctcacggcatcacgtatgacaagtccagcagcagacgcgggagcctcacaacctgtgagagccttcgggagtcaggagtgtcttgcgggagccctgtgcttcctggcctgcctgcccctgcccctgcccctgcccctgcccaggccccggcttaggccacatcagcagaggtttcgtgtctgaggtcagagggggactggcagccctactgtctggtcactgtgggagagctgagttcccttttggacacaggtagagcccctcctgaggagacggggaggctcccgcaggccttccgggaggtggtggaaagctccggaagcaggtgaagcggtggagggagggactgagttgcccgagtgctcctagactctcccgcgtctgcattcgggaggcaggttgtagctggaggcctggcccccagcctagtgcaaggccctaggtgtcccccggcacccccgcacctctcagaactcctggaacccagccgaggagtgaaatcaagtggccagaagaggactggggccccggccttgccagggaactgaggggtgaggaggaggtgtgggcggggcgctggccccacagacctgaaagctggcgttgggtcccaggtctgctgggatctttctggtaaccgtggacaggtcatgttgcctgctgcagcagcttccagcgtgcctccttatttgcaaaccatagggaaagctgcctgacccacctagagagttgtgggtaaggccgtgtgcaaacaggcctgtacggggcatggtgggtcacgggggctgttggggaggagggccggtggcacacagcctggtcctgaggcctgagctccatcccccttctgccacagtggccagggtgtgaggagggtcccagtgccggggctgccccgccacgcctggcgttcaccgtgccatctctgtcgcgcagggccgagaactactggtggcgtggccagaacacacggacgctgtgtgtggggcccttccctcgcaacgtggtgacctccgtggccggcctgtcggcccaggacatcagccagcccctgcagaacagcttcatccacacagggcatggcgacagtgacccccgccactgctggggcttcccggacaggattgacga

SEQ ID NO: 14531 - DNA, 304 bp, Homo sapiens
ggcgatggcctcgcgccagtgctgggcgcggcacccccgcgtgggcctgtgttgggcggcttttgagcaggagtccgggccctcgtgtcaccgctctgaagtcaaggagggccgagaactactggtggcgtggccagaacacacggacgctgtgtgtggggcccttccctcgcaacgtggtgacctccgtggccggcctgtcggcccaggacatcagccagcccctgcagaacagcttcatccacacagggcatggcgacagtgacccccgccactgctggggcttcccggacaggattgacga

SEQ ID NO: 14532 - DNA, 10108 bp, Homo sapiens
agccagaggagggcacaggctggctgctggagctgctgtccgaggtgcagctgcaacagtacttcctgcggctccgagatgacctcaacgtcacccgcctgtcccactttgagtacgtcaagaatgaggacctggagaagatcggcatgggtcggcctggtaggtgggatgttggcctggcttgtcttgcccctgaccctttccgtcctctgtcctcaggaccactcggtgcacgggtggcagctgagaactctgtcccagagccctgagggagcaggagggacatcagtaggtgctgatgtgtgatgagaacagttggcagttataaaggtgaattggagtttgaggagagtgaggccttccctaaagctggctacacaggagtcactccatgccccgttgtgattgttctcacgtagagtgtatgtcctccattgcccctccttcataagcatcgaattgagtctgttctcatcattctgactaccggggggtccatgtgcagagatctgtagggagaacgctaactctcagatggtttgctgattcgtgctcacgctctctttcttgctctctcacacgcacacacgcatgcacacgcacaggcatacacacacacacacacacacgcaggcacacacgcacatgcgcacacacgtgcacgcacgcatgcacgtgcacacacgcatgcacgtgcgtacgcacgcgctcacacgcctgcgcacacagacacgcacacacacacacacgtgtgtgcgcacacccgcatgcacacgcacggcatacacacatgtacacacacgcgcgcagacgcacacacgtgcgcacacgcgtgtgcacacacacgcacatacacacaggtttgctctgatttgagttcaacccttatcttcatatttttcctaaaagtgggggttgtagcatctaaaagtcatgatgttcttcatagaacattagaaacgtattagggctttcaagttaaaatagctaaataggtaataatgtgtcaagttagacactgacttagttaaaatagctaaataggtaataatgtgtcaagttagacactgacttagttaaaatagctaaataggtaataacgtgtcaagttagacactgacttagttaaaatagctaaataggtagtaatgtgctaagttagacattgatttatgctactttaggcctggatagttggtgtctgatgccagtagcataaaaaaattttacggagggaaaaaaacctcaacattgagaaaattctgttcattaccttgatttttcctgagaactgggagaagcccatcgcttcaagtttttggttaaacaccttcacccagtttgagagccagtgccaggaagtggagtgcagagaccgtcggtcagttgaggctccgggttagttggggttgatttcattgctatcatcgggtgggcggtgtctagtgacaggctcacccccaaggggaccacaggcagcagcctctctcgggctacggcggccttcacagcacgcggttccccgctctccctgcaggccagcggcggctgtgggaggctgtgaagaggaggaaggccttgtgcaaacgcaagtcgtggatgagtaaggtgggtgaggaggtgggtgaggaggtgggaggggggcagcctcgaacgcccccctccgcttctggtcctgggaaccttccccagctccccggcaggtcgaatctcgccgttctgccggcactttgtacaggaccccctcgtccagggtcttatcgggcagggcacttgtagagctgctgggctaagtgtctgtctccgccagatacggacacgtgagcagcctgtgtgcggtgaggccttcacagcccctctcggcacgcctggaacaggacctcattgacaagtgtgccttaacttagccctgctgtgtctgagcgttggggccagtgtccagcgtggggtggtggacctgtctggacccagaacgtctttgcttggcttccctcctccctgaccctctctaatctctgggtttctctggtcatctgtccctgctgacagcttccttccccacagcctgtccccacctctccccacaccttgtcctaatttgggtctgtggtgtagtgagtccctggtctgactcagtggaactttgcccattgtctggaagacaatgagagaggaagtgagccagccgtggtctttcctccccacttctggcttcagggctgggttggggggtgggcagggccgaacagctgcagtgggattgggcagcagagattttcctggctgcaatccggcaaaggggctgtctcttgggatcctttggcttttcctggaaacactgtcctggtcctttgcccgggttttagggaaggatgagtagtgtcgggatggtggaggcaggagaagagagcagcgtggtttgctgagatttaggggtcttggatctgccactggctcctgataggtccctgggcggtcagtggcctccagatttttgttgtgtcttcagtgaaatgataccggtccccactgcccagctcacctcccggggctgcaggaggcaccggagataatggctgtagagggtcttgtaacctgaacattgcttgcaaacataaggaattctagttactgggaggaagcacagggcagaggccagaagaggccctcagatttgaggcaccctagcccagacggataaggatccaccagctctgggggcgtgagacccaagctggcaagaatctgcaatctggagccaaggctgtgggtgcctcagtggaggccgagtcagaccgacgtggccagctttgaccctcatggcctcctttcttctgtcccttgaccttcggctcctccctgtccaccctggcctccgagtctcctccacttttccttccgtctcagccctcagctctaggcgcccctccagagacccagctgtcttcccaggccccttcccagcaaggactagcttcatctgaaccacacacacactcacggttcaacctcagactaaaattatcctctcccctgggcaggatgaagggcagccgactccctggtgagggtggagacagacagcaccaaatggtcaggccagagaaggggccagggctaaaaatggacaaggaggtgtctgtggagggcccctgcggctccatcgatgcgggttagggctggagtctgcggggtggcgggtgcaggaagggagggtggggcaggactgggaggagactccgaccttggctgggcggtgccctccctctccacacagctgggtgtggggccgctcagccacaggctgcatgcctgtcggtctctttctggcaccctccttgaggccagcatcaggctttgggttcatgtttgggggtgtgccctggacggagtgtgggcctccagccaggctgccccactgacagtttggcaaaaccaggacctatctggaagccgaagccggggatcaccaggtggacccagcggggtgggactgagtgactgaccctggggtgttggattccatctggcccccggctgccttcaaacaggtgttcagtggaaagcgactggaggctgagttcccacctcatcactctcagagcaccttccggaagacctcgcccgcccctgggggcccagcaggggaggggcccctgcagagcctcacctgcctcattggggagaaggacctgcgcctcctggagaagctgggtgatggttcctttggcgtggtgcgcaggggcgagtgggacgcgccctcagggaagacggtgagctctctgtgtcctgccagcgcagcagaggcatgggacccggggctggtagtggctcttctgcccccaaccagggtgtggatgggactggggatgcgtcacagtgtggctcatcccagagtccgtgctcaggatttttggggttttatttatttatttatttttgagatggagtctcgctctgtcgcccaggctggagtgcagtaggcacgatctcggcttcctgcaacctccactttccgggttcaagcaatcctcctgcctcagcctcctgagtagctgggattacaggcatgcaccaccacactcagttaatttttgtatttttagtagagacggggtttcaccatgttggccaggctggtctcgaactcctgacctcagatgatctgcccactttagcctcccaaagtgcttggattacaggtgtgagccaccacgtccagcccatgctcaggtttaactaagcacatttattatttcaactataaaaataatttattataaaagtttggaaagtatttgaaaaacaagaaaaaaaaaatcgcctgtaatcccaccactcagaggaagccgagcctcttcctcccactttaggtattttgttggatttagttaagatacaaattctggatacagcttttaaaatcttgttctttcttctcggcgttgcatttaacattttcccctcagggataacgtgtcaccacagcatacagttctggtgtgactgtttcctgtgcagcagccgtgtccttactgctcagatcacgtgcggtgcattcccagcacctcagagggctcctcattctccgtccactcagtgcgtccttctcccggggaagccgctgtcactcagtgcatccttctcccggggaagccgctgtgcagacttccagctccacagctttgtttttggcattacatttacagcattttccttctacagcaaaacaccttttaatattccattttatgaccagcctgagcaatatggagaaaccccatctctactaaaaatacaaaattagccaggcgtggtggcacctgcctgtaatcccagctactcaggaggctgaggcaggagaatcacttgaacccgggaggcagaggttgcagtgagctgagatcacgtcactgcattccagcctgggcgacaagagcgagactgtctcaaaaaaaaaaattccattttataacatttgaatattctctcatcatactggttatctcttactttttggttggtatttaagcccggcattcccccaggaaggggaggtgtggccgacgatggctcctgagggccagccgtctgcccttctccagccaggcctcacgcagagcacgtaagcccaggcactggtgacatgcttacccacccagatgaggagctcacaggcagggatcgttgagccgagttggagggtggagcaggttggctccgcgtgtctgggacctggcaagtcctgagtccttgcaaatcccgctctgggcaggtgagtgtggctgtgaagtgcctgaagcccgatgtcctgagccagccagaagccatggacgacttcatccgggaggtcaatgccatgcactcgctcgaccaccgaaacctcatccgcctctacggggtggtgctcacgccgcccatgaagatggtgagtactgcgggcgggagggggcgggcagggagagggctccggtcccatatgtgtggttcggttcctctctccatcctaaggtcagaggcgccctagatcctactttggtcccccaacctgatggagtaaaggggtccacaggggcccagcctggtacgggctgtgtctgctgcggtccagtccgggtctgtctctggattttgctggtgctcagtgtcaagagagttactcccatgggaggggctggccactgagtttaatttggggaatttatgttttatttatctatttattttgagatggagtctcactttgtcgcccaggctggagtgcaatggcatgatctaggctcactgcaacctcggcctcctgggttcacgcgatattcctgcctcaggcttccaagtagctgggattacagccgtgcgctaccatgcctggctaatttttgtatttttagtagagacggggtttcaccatgttggccaggctggtctcaaactcctgacctcaaatgatccacccacctcggcctcccaaagtgctgggattacaggcgtgagccaccacgtccagctgagttttggaatttctagccactgcctctttgggctccttctctctaggcatcagtttcccaaattgcctcgagggagaggcctgagaaactgcaggactcctagaggtccccagacagcaggccaggaaggtgcgtgcagcctggctctggaaagccttcaggaaggggactgggggcccagcgtgggctgctgagaaggggcagggtcctccagctcattcctcctgcctcctccgtggcctcaggtgacagagctggcacctctgggatcgttgttggaccggctacgtaagcaccagggccacttcctcctggggactctgagccgctacgctgtgcaggtggctgagggcatgggctacctggagtccaagcgctttattcaccgtgacctggctgcccgcaatctgctgttggctacccgcgacctggtcaagatcggggactttgggctgatgcgagcactacctcagaatgacgaccattacgtcatgcaggaacatcgcaaggtgcccttcgcctggtgaggggcaggtgctgccagctcacagagtccctgcagacccaggcctcaaagcttctggggctttctggacccaccacagcccctggttttgcttgggcctgcccttgtctgttctaagcctggggtgccctcctttgcacccattcgctcaccatccatctaggaattcttgagggcccacgtgccagggtctgggtgctggaaatcacagggatacatgctgtgggactctccaaggggctttgctgggtggggtgatacggggatagatgctgtgtcctctccaaggggcattgttgggggtcgtgtttcagggatagatcctgtgtcctctccaaggggcattgctggcgggggggtgttatagggataaatgctgtgtcctctccaaagggcgttgctggggggggggtgttacaaggatagatgctgtgtcctcttcaaggggcatcgctgggggggtgttacagggatagatgctgtgtcctcttcaaggggcattgctggggggggtgttacagggatagatgccgtgtcctctccaaggggcgttgctggggggggtgttagagggacagatcctgtgtcctctccaaggggcatcgctgggggcgggtgttacagggatagatgctgtgtcctctccaaggggcactgctgggggggtgttacagggatagatgctgtgtcctctccaaggggcactgctgggggggtgttagagggacagatcctgtgtcctcttcaaggggcattgctggcgggtggtgttagagggatagacactgtgtcctctccaaggggcatcgctgggggcgggtgttacagggatagacgctgtgtcctctccaaggggcattgctgggggggtgttacagggatagatgctgtgtcctctccaaggggcactgctgggggggtgttacagggatagatgctgtgtcctctccaaggggcactgctgggggggtgttagagggacagatcctgtgtcctcttcaaggggcattgctggcgggtggtgttagagggatagacactgtgtcctctccaaggggcatcgctgggggcgggtgttacagggatagacgctgtgtcctctccaaggggcattgctgggggggtgttacagggatagatgctgtgtcctctccaaggggcattgctggggggcgggtgttacagggttagatgctgtgtcctctccaaggggcattgctggggggggtgttacagggatagatgctgtgtcctctccaaggggcattgctggggggggtgttacagggatagatgctgtgtcctctccaaggggcattgctgggggggtgttacagggatagatgctgtgtcctctccgagggtcattgctgagttaggtgatacagggatatatgctgtgtcctcttcaaggggcattgctgggggggtgttacagggatagatgctgtgtcctctccgaggggcattgctggggggcgggtgttacagggttagatgctgtgtcctctccaaggggcattgctgggggggggggtgttacagggatagatgctgtgtcctctccgagggtcactgctgagttaggtgatacagggatatatgctgtgtcctcttcaaggggcattgctgggggggtgttacagggatagatgctgtgtcctctccaaggggcatttctgtggggaggtattcaaaggtttcctaaaacatcagggaagttcgccagggaaagactcgttggtaagcatgttctagggagagctagtggtagacaggcccaggccacagcaggccttgtagatgggccagggctgcttacctgtgcactaggggtggtacttggccctgccctggcccctgtgtgggcttatcctctgctgagaccattgtggttctctggtgccagaggcacccagaggtctgtgatctgcctgctttgaggcgggaagggttgttccagttctgctttcccaagcggtggctgtgggcaacccttatgatccaggacgcatggtcatcttaacgagcagctggctttacacccagggcgagcagaggtcttaaattatgcccgttgtcctggagtaatttagagcagcctcttttgtattcaggcatcctggtttgcatggtaaggtatgaatatagttgcctttaaacagcacgatgaagtgggcgggttattgttctcatttcaccaaggaggataatgaaccttagcgatctcgagtgactttcccggccccatcccctttgaggggcagggctcgctctgcttccctgtctgggcaccaccctcctctctgcacctcagtccacgccgggatgtcctttctgacctcactgcagtggcacttccccctcaaccgggggtgcccagaacgaatgggtgtatttgggtgaagccagtatgactgtttctacccattttggttcttccccaggccctacccgaatttcccacccactgcttcctgccaaaggacccaaatccgaggatcccgccccaaatctgggaattgtcattctcccaccacagtcagaaaacagcctgtgatcttctctccctgccccatcccagagcctctgacctccttcctttccatgcttctctggctgggaaacttcctttcctcttcccccaccaggctgcaagtgaataagaggcctgggcttagacgatttccccaagtccctgcatcgtgtcgtcaaggggtcctgcccgcttcacacggcgcccctgagacccactgttgaacctggcacagggggtcacaacaagtgtttgctgcatgagtgttttaagtccctggggcggacgcaggtagggtgtttgagagggcttctctttgacccctgcctctgccaggtgtgcccccgagagcctgaagacacgcaccttctcccatgccagcgacacctggatgttcggggtgacactgtgggaaatgttcacctacggccaggagccctggatcggcctcaacggcagtcaggtgagggctgggagacgggcccccatagggctggtggggtgaattccattccctgcttgcagcctggccctgctggaactgcctctcaccaatggactccctcctcccacgccccgtgcctccccccacttcccgtgcctcccaccacgccccgtgtctcctctcacgccccgtatctgtatggcctcagggagagcccagcaaagagacggggagggaaaagctggggcctgccctccttctctagcccttgccacatccacttgttccgaggctccagacctgggaagaagggactggggctctggagagggcccctcccaggcaggcagatcccttctttggaggccaggcatggcagcagccgctgcagctgtggatgggctggagggaaggcgggaagtgaagggctgggcgctctgtttgtcgtcaaactctgcacctcctcaccttcagatcctgcataagatcgacaaggagggggagcggctgccccggcccgaggactgtccccaggacatctacaacgtcatggtccagtgctgggctcacaagccagaggacagacccac

SEQ ID NO: 14533 - DNA, 904 bp, Homo sapiens
agccagaggagggcacaggctggctgctggagctgctgtccgaggtgcagctgcaacagtacttcctgcggctccgagatgacctcaacgtcacccgcctgtcccactttgagtacgtcaagaatgaggacctggagaagatcggcatgggtcggcctggccagcggcggctgtgggaggctgtgaagaggaggaaggccttgtgcaaacgcaagtcgtggatgagtaaggtgagtgtggctgtgaagtgcctgaagcccgatgtcctgagccagccagaagccatggacgacttcatccgggaggtcaatgccatgcactcgctcgaccaccgaaacctcatccgcctctacggggtggtgctcacgccgcccatgaagatggtgacagagctggcacctctgggatcgttgttggaccggctacgtaagcaccagggccacttcctcctggggactctgagccgctacgctgtgcaggtggctgagggcatgggctacctggagtccaagcgctttattcaccgtgacctggctgcccgcaatctgctgttggctacccgcgacctggtcaagatcggggactttgggctgatgcgagcactacctcagaatgacgaccattacgtcatgcaggaacatcgcaaggtgcccttcgcctggtgtgcccccgagagcctgaagacacgcaccttctcccatgccagcgacacctggatgttcggggtgacactgtgggaaatgttcacctacggccaggagccctggatcggcctcaacggcagtcagatcctgcataagatcgacaaggagggggagcggctgccccggcccgaggactgtccccaggacatctacaacgtcatggtccagtgctgggctcacaagccagaggacagacccac

SEQ ID NO: 14534 - DNA, 4223 bp, Homo sapiens
ggagaggaggaacggagctgggacgggctgcaggagggaatggccgcaggccggcaggaggaggggcgcgaccacccggccgccggccgatggcggatgaggctatgggggctgagacgcagtagcggccctgcacttctggaggatgctcgaggcccggccccccaggacgcagggcagtgacgctgccggtgccgctgcggggcgggggctgcgggcgctgcttctctccctgaccgcagccgctgggatttggggctccatgggggagagatctgcttaccagcgcctggctgggggcgaggagggaccgcagaggctgggaggcggcagaatgcagccagaggagggcacaggctggctgctggagctgctgtccgaggtgcagctgcaacagtacttcctgcggctccgagatgacctcaacgtcacccgcctgtcccactttgagtacgtcaagaatgaggacctggagaagatcggcatgggtcggcctggccagcggcggctgtgggaggctgtgaagaggaggaaggccttgtgcaaacgcaagtcgtggatgagtaaggtgttcagtggaaagcgactggaggctgagttcccacctcatcactctcagagcaccttccggaagacctcgcccgcccctgggggcccagcaggggaggggcccctgcagagcctcacctgcctcattggggagaaggacctgcgcctcctggagaagctgggtgatggttcctttggcgtggtgcgcaggggcgagtgggacgcgccctcagggaagacggtgagtgtggctgtgaagtgcctgaagcccgatgtcctgagccagccagaagccatggacgacttcatccgggaggtcaatgccatgcactcgctcgaccaccgaaacctcatccgcctctacggggtggtgctcacgccgcccatgaagatggtgacagagctggcacctctgggatcgttgttggaccggctacgtaagcaccagggccacttcctcctggggactctgagccgctacgctgtgcaggtggctgagggcatgggctacctggagtccaagcgctttattcaccgtgacctggctgcccgcaatctgctgttggctacccgcgacctggtcaagatcggggactttgggctgatgcgagcactacctcagaatgacgaccattacgtcatgcaggaacatcgcaaggtgcccttcgcctggtgtgcccccgagagcctgaagacacgcaccttctcccatgccagcgacacctggatgttcggggtgacactgtgggaaatgttcacctacggccaggagccctggatcggcctcaacggcagtcagatcctgcataagatcgacaaggagggggagcggctgccccggcccgaggactgtccccaggacatctacaacgtcatggtccagtgctgggctcacaagccagaggacagacccacgtttgtggccctgcgggacttcctgctggaggcccagcccacagacatgcgggcccttcaggactttgaggaaccggacaagctgcacatccagatgaatgatgtcatcaccgtcatcgagggaagggccgagaactactggtggcgtggccagaacacacggacgctgtgtgtggggcccttccctcgcaacgtggtgacctccgtggccggcctgtcggcccaggacatcagccagcccctgcagaacagcttcatccacacagggcatggcgacagtgacccccgccactgctggggcttcccggacaggattgacgaactgtatctgggaaaccccatggacccccccgacctcctgagcgtggaactgagcacctcccggcccccccagcatctaggaggggtgaaaagggagcctccacctcgcccacctcagcctgccttcttcactcagaaaccaacctatgaccctgtgagcgaggaccaagaccccttgtccagcgacttcaagaggctgggcctgcggaagccaggcctgccccgagggctgtggctggcgaagccctcggcgcgggtgccgggcaccaaggccagccgaggcagcggggctgaggtcacgctcatcgacttcggtgaggagcccgtggtcccggccctacggccctgcgcgccctccctggcgcagctggccatggacgcctgctccctgctggacgagaccccgcctcagagccccacgcgggcactgccccggcccctgcaccccacgcctgtggtggactgggacgcacgcccgctgccccccccgcccgcctatgacgacgtggcccaggatgaggatgactttgagatctgctccatcaacagcaccctcgtgggcgcgggggtccctgccgggcccagccagggccagaccaactacgcctttgtgcctgagcaggcgcggccgccccctcccctggaggacaacctgttcctcccgccccagggtgggggcaagccgcccagctccgcacagaccgcagagatcttccaggcgctacagcaggagtgcatgaggcaactgcaggctccggccggctccccggccccctctcccagcccggggggtgacgacaagccccaggtgcctcctcgggtacccatcccccctcggcccacgcgcccacacgtccagctgtctccagcccccccgggcgaggaggagaccagccagtggcctggacctgcttcccctccccgggtgcctccgcgggagcccctgtcccctcaaggctcgaggacacccagccccctggtaccacctggcagctccccgctgccaccccggctctcaagctcacctgggaagaccatgcccaccacccagagctttgcctcagaccccaagtacgccaccccccaggtgatccaggcccctggcccgcgggctggtccctgcatcctgcccatcgtccgggatggcaagaaggtcagcagcacccactattacttgctgcccgagcgaccatcctacctggagcgctaccagcgcttcctgcgtgaggcccagagccccgaggagcctacccccctgcctgtgcctctgctgctgcccccacccagcaccccagcccccgccgcccccacggccaccgtgcggccgatgccccaggctgccttggaccccaaggccaacttctccaccaacaacagcaacccaggggcccggccaccacccccgagggccactgctcggctgccacagaggggctgccctggcgatgggccagaggcgggccggccagcagacaagatccagatggtggagcagctcttcgggctgggtctgcggcccagaggggagtgccacaaagtgctggagatgttcgactggaacctggagcaggccggctgccaccttctgggctcctggggccctgcccaccacaagcgctgagatgcgtctggagagccagagggcctgcctgaaggaatcacctgagcctgtccgtccaccaggagtggggagatgcccccatccagtcctggaggacccgctgctcctgctgctcccggggatggagcaaggccaaggctgcgggaggctgggagccctgccctgcccatccctcctgcaccagcgctgtccctgcacactttggttcagtcccggtgcccctgccaagatgtggaaggggccgggtgaagacaggcttgagggctgccccagcaggctctgggtatgacctgcctctggccctggtcctgggcggggcctgtgggtggagtagtacccccaggccctgccctgggtgacagactgggaggaaaccaggctggacctgggcaggcgggatgtgttggccacagggagaggcggaccggcacccggtgggacctcctaggactgggccttcttccagggggcccctggcagcagctggggtgtcgggcagaatgtgacttgtggccttaccatggacttgaatgggacttggctggcctcaggatcttgtgcctggaaatagcctgaggtggctcaggaagcggagaaagggtgccagaccattctctggcggggaccagggcccaaggccccagggctggaaggagaccaaggggcagccgccctggagggacatcagtgcttcctcttccacccaattcccccacgcggttccatgttttcccaccagcctgttggcgaagttgctgctccggcattcagtacctgcttcttccagagaaataaagttagtttctattttatgtta

SEQ ID NO: 14535 - DNA, 8149 bp, Homo sapiens
gttggccccagccgctggttccctgtggctgctgctggtggggctctgggggctccttccccctgggccaccagccctggcttggaaccacagcacctgccctccgtgcctggagctgctcaggaggtgggaggtgaggggcaggaggccacaacagccggtgaggcttgggagcgggcctgggtgtcggtggtggcagagcttgactctgcccccttgtttcttcagtccctgaatatctccatgtttgtttggctgcctccgtctccatgtctccaggcggatggctctgtgtgagtctttgggcctgggtgtgcatctgtgggtctgtgtttggagttccctcctagcctggccttctcttcgccgtggcttcccacttgcgaagctgtgtccagtatttgtttcctggtgcggagtctgggaggccacctgccgcagctctgactgagtctaggctcagtccttctcagggtaccaggctgtgggcagaggggagacacctagatgtttcgtgctgtgtctagatttggagacacaaatgatgactggtctttcccaggggctcgtttggaggaaggggtggctggcagcacttttgttccgcatacagagcgggtgttggaatccattgcgggtccttggcctggtctggccctggagcctcggcttcctgtggtgggtgggagccaggcatccgggttatccctccaggcctgggcgcctgggacccctagggagaagagcgggcgggcgttttgaacagaatgtccggcattagttgagccatttctggactaccttcggcccggacgggaacgtggtgctgagatttccagagctggggcagccttaggcagttctcagcaccggcctctgttttccatcttgtctaccccagagatgttgaccagaggcccgggggcagcaggaggtagaaggttcatgcggaggtgttgggcccttttcctgctcccccaggaagtcctcatccgcccctgcttcagtcacggccgggtagcagccctggccctcccatggccacggggactccggcctgttcatggcgggagagagagggcgcggacagggcgggcctggaaggaagggctggcctcagtcccctctggactgctggtgcctcggccacactgagcctcacacgggtgcgtgtgggctgcgagaagtgacacggtcctcttggaagtcccactggagccttgggatgaagctgccttggagtgtgcgtgggcgccatcccgagggggagcttcctgtgcctccgagcgtgcgtgggcgccatcccgagggggagcttcttgtgcctcggagcgtgcgtgggcgccatcccgagggggagtttcttgtgcctcggagcgtgcgtgggcgccatcccgagggggagtttcttgtgcctcggagcgtgcgtgggcgccatcccgaggggagcttcgtgtgcctcggagcgtgcgtgggcgccatcccgaggggagcttcctgtgcctcggagcgtgcgtgggcgccatcccgagggggagtttcttgtgcctcggagcgtgcgtgggcgccatcccgaggggagcttcttgtgcctcggagtgtgcgtgggcgccatcccgaggggagcttcttgtgcctcggagtgtgcgtgggcgccatcccgagggggagcttcctgtgcctccgagcgtgcgtgggcgccatcccgagggggagtttcttgtgcctcggagcgtgcgtgggcgccatcccgaggggagcttcttgtgcctcggagtgtgcgtgggcgccatcccgaggggagcttcttgtgcctcggagcgtgcgtgggcgccatcccgagggggagtttcttgtgcctcggagcgtgcgtgggcgccatcccgaggggagcttcttgtgcctcggagtgtgcgtgggcgccatcccgaggggagcttcctgtgcctcggagcgtgcgtgggcgccatcccgaggggagcttcctgtgcctcggagcgtgcgtgggcgccatcccgagggagagtttcttgtgcctcggagcgtgcgtgggcgccatcccgaggggagcttcttgtgcctcggagtgtgcgtgggcgccatcccgaggggagcttcttgtgcctcggagtgtgcgtgggcgccatcccgagggggagcttcttgtgcctcggagcgtgcgtgggcgccatcccgagggggagtttcttgtgcctcggagtgtgcgtgggcgccatcccgaggggagcttcttgcacacgtcctccgcactcttactctccttcccccaggagcaagcatgttttctcgagtggtgtcaggactcccagcagccatgggggctcttgcctcggccatacctgcactaagggaggtgggcttgatgtctcctttccctctcagaagtgggtcccaaaggaggcttctgtgcctggagctgggcagtgttggcggaagggagaggccagacggagtgacctgccttgggcacgagtcacgctgctctgagcaaggtctcggcctcagcggcattctcacccagttactgagcgcctctgaagaggtgtggagagcagagtccggcgtctggcccgcggcagccaccggggagcccgtgggtgtagcgggagagccgcagcccagccggtgccggggttcctcctctacgggccgccgtgggaggctgtgtgcgtgctggggagccggggctctgctccttcgagtggccctgctatttttcagatgggactcgtctcgtctcggggtactgtcctctctccttccttccctccctgcaggcagggtgggaatcacagggtggctgtgtgtggtggggccaggccagtggccctgtgtatgaggaggctgggcagggggagcacagccccgtctccccgcgccccgcgccccccgcctccccgccgaccgtggtgctctcgggtttgactttggtctctgggatgggctgttccggagtcaccccgctccagccaggcctcgtcaccttacaaggctgtgggtctgggtgcccaggcgtcgccacctcctccgtcctctctccccggcctggctgggtttcagaggagcccttcttcacgctttggccctgggacaggagaagtgggggttggtggggagggcgtgcagtgtggtgccacacgtgtccaccctagcagctctgggctgtcaccgcccccgcgtgcccagactctgcccacggggctgtcaccgcccccgcctgcccagacactgcccacggggctctcaccgcccccgcctgcccagacactgcccacggggctctcaccgcccccgcctgcccagactctgctcacggcatcacgtatgacaagtccagcagcagacgcgggagcctcacaacctgtgagagccttcgggagtcaggagtgtcttgcgggagccctgtgcttcctggcctgcctgcccctgcccctgcccctgcccctgcccaggccccggcttaggccacatcagcagaggtttcgtgtctgaggtcagagggggactggcagccctactgtctggtcactgtgggagagctgagttcccttttggacacaggtagagcccctcctgaggagacggggaggctcccgcaggccttccgggaggtggtggaaagctccggaagcaggtgaagcggtggagggagggactgagttgcccgagtgctcctagactctcccgcgtctgcattcgggaggcaggttgtagctggaggcctggcccccagcctagtgcaaggccctaggtgtcccccggcacccccgcacctctcagaactcctggaacccagccgaggagtgaaatcaagtggccagaagaggactggggccccggccttgccagggaactgaggggtgaggaggaggtgtgggcggggcgctggccccacagacctgaaagctggcgttgggtcccaggtctgctgggatctttctggtaaccgtggacaggtcatgttgcctgctgcagcagcttccagcgtgcctccttatttgcaaaccatagggaaagctgcctgacccacctagagagttgtgggtaaggccgtgtgcaaacaggcctgtacggggcatggtgggtcacgggggctgttggggaggagggccggtggcacacagcctggtcctgaggcctgagctccatcccccttctgccacagtggccagggtgtgaggagggtcccagtgccggggctgccccgccacgcctggcgttcaccgtgccatctctgtcgcgcagggccgagaactactggtggcgtggccagaacacacggacgctgtgtgtggggcccttccctcgcaacgtggtgacctccgtggccggcctgtcggcccaggacatcagccagcccctgcagaacagcttcatccacacagggcatggcgacagtgacccccgccactgctggggcttcccggacaggattgacgagtgagtactgggcggggatggatgctgacctggccccgctcgggactccagggccctcagcacggcacgcgtgggcggaatctgctcttcaccctttcgcccgggcttcagcccccgacccgccactctcccctcctcaccctggccttactctcgggaagctgtggaaccctaggaagcccagcctggtgggggttctccaggggaatgttctccaggggagtgttctccaggggagggttctccaggggagggttctccaggggaatgttctccaggggagggttctccaggggagggttctccaggggagggttctccaggggaatgttctccaggggagggttctccaggggagggttctccggggagcgttctccaggggaatgctgtccctgccattttcaagctttggggggccgatctcctaactctgagacacttcatctgtgaaacaggttcacccccccaataaggggaaggctgtaaatgcactctgaattagcacttgctgctcagatgcaggggtcctgagagaagctttcccactcactgtagatgaaagtagggtcaggagcttctgaggatggactcctgtttggtggaaaggtccccggagccacagctgtaacccctcttggtactcgggccttaggaaaatgaacttgggaggaacccggtgggagctgctgaggaggagagcttctcccatgacccccctgtggccccctgtgaccctgtgaccctgtgacccctgcacacgagcagtggttttccttctcctgctggtggtgccagagtcctggagacgtgaacctgctggctcaggccctggggatgtatgcaggtccacatgggagtgagcctgctttccagaaccagagtgggactggggaccttggggactgcagagggaacgttaggtggcagctccgcctccccaccacacagtactctacggagctcactccatacctgggagaggccctgtctcctatgtaagaggataaggccaccgaggggcatctgggaaggacacgcagaatcagtcacttccgggatgccaccccccaccccccgaagcttcttgcgccaggcctccaagcctctctgctggccgcagggggattccaggcccctggcctctgcagcccttctcctgctgacttctgatactctggtctgccctgagaggcgtggaaagcaggggccttcacccaccgggccccacacaccagaaccccacacagcgggcccccacacaccagaacccacacagcgggcccccacacaccagaaccccacacagcgagtccccccacaccagaacccacacagcgggcccccacacaccagaacccacacagcgggcccacacacactggaaccccaagctcacagggctcagcccatgtgttttgcctaaaaagaacccagcaagggcctgagagttggggtgaaagactgcagacacctccaggagaggctggtgccctctgccccactcctggcatgctgtggccagcccagccccattcctccaggctttaatcagccccagtgactaagtctcagatactgacagttggtgcagggacggagggtggatccggagcaggacaggtggcccagcctctcccgcacctcctggccatgtggcagaagggtgcctcctgcccaccctggctgggcaccatagctgggatgccccgttcttaggccctccatcgtggcctgcgggacaggagtgtctgccctctggccgctgcctggtgtgggctgggggcctggggggttgtggaggaccacctctgcccttgtagggtgtagttggagtccctgaggtcctaggctttccatcctggggtcaggtgtcctttctctgccttctctccaggacaccccccagctgagacgtgcggtcaggttctgtggactgggaggcgggaggcctgtgcttcagacccaagactacacccggtttcctccaggacgaaggggctctgatgagattctgccacccctccacacgcttcccctgctctcttgacccagctctctcccccacagactgtatctgggaaaccccatggacccccccgacctcctgagcgtggaactgagcacctcccggcccccccagcatctaggaggggtgaaaagtaagagcccctctgctccctggtgtccctaactcatcggctactcaggaaggggcactgtcttcacaggccaccctaaggctgctgttctgtttttggggacagtggggtcagggcagcaggcgggacagctgtgtccctggctccggctgggcgtggggtggaagacaggcagctgtatccgccgaggtgggcctcctcgggctgggtctgcagcaggcccgtccgccccggcgtccctcctccctccttccacggccgagctcagatcctggctttcctcacttccccctaatcctgctctcctgtcccaagccaaaaccaccccacggctccggctctgcctggggcctcctccatctcccggtcctctgcctatcatactggaccgccgtgttcctcatcctgccgcctgcggcctcccgtttgctgggggcttgtacattcactcgcccccattcacttctctcccttcgtctctctacactctgccctctcgtccggccgtctccctcctttgtcctctgtcctgctccgtctctctccccctgtccgcatggcctttcttgcaggggagcctccacctcgcccacctcagcctgccttcttcactcagagtaagtggggctgcttccgatgccttggcccccgcccccgccccctctctctcactcctctcctggaaggtacagagcctgggcggctgggccggaggggaggtgggtgggtgtgtgctgtgagcttccgcggctgccctggcctagcatgcctgccccccctcgagcccgccccccggagcctgggcttctgctcacgagtgtggccctggcttccgcctcggcctcactccctcccagacctgtctgagcttctggagcacgagtgtggccctggcttctgccttggcctcgctgcctcccagacctgcaggcgctgtctgggctttgtggccgttggtcaggagtactgtcctctccaaggatagtccttatagcccctgatggcaggaggcggctccgtgcctgcactaatggtgtgccgtgacaggggcggggatgagggctcactaactcgccagggcgcaggagcagggccgccggggtcttgtgctggtggaggcagcgtcaggcaggagccagtgttgcttgctgcagcttagacggagcgaggcggggctcaccggcccacatggggctgccgggcagagcaggttccgccctcctgatggagtggtcggaggtgcgctgagaacctggccgccggtggctgacctcagacctcggggggagttgggagtggagggttgctgggggacacttggctttctctcccacgtgccacctcccctcgtgtcccagaccctgcctgactgccttcctgttgggctctccctttccatcacagaaccaacctatgaccctgtgagcgaggaccaagaccccttgtccagcgacttcaagaggctgggcctgcggaagccaggcctgccccgagggctgtggctggcgaagccctcggcgcgggtg

SEQ ID NO: 14536 - DNA, 600 bp, Homo sapiens
gttggccccagccgctggttccctgtggctgctgctggtggggctctgggggctccttccccctgggccaccagccctggcttggaaccacagcacctgccctccgtgcctggagctgctcaggagtccctgaatatctccatgtttgtttggctgcctccgtctccatgtctccaggcggatggctctgtggccgagaactactggtggcgtggccagaacacacggacgctgtgtgtggggcccttccctcgcaacgtggtgacctccgtggccggcctgtcggcccaggacatcagccagcccctgcagaacagcttcatccacacagggcatggcgacagtgacccccgccactgctggggcttcccggacaggattgacgaactgtatctgggaaaccccatggacccccccgacctcctgagcgtggaactgagcacctcccggcccccccagcatctaggaggggtgaaaaaaccaacctatgaccctgtgagcgaggaccaagaccccttgtccagcgacttcaagaggctgggcctgcggaagccaggcctgccccgagggctgtggctggcgaagccctcggcgcgggtg

SEQ ID NO: 14537 - DNA, 2634 bp, Homo sapiens
gcgttgggtcccaggtctgctgggatctttctggtaaccgtggacaggtcatgttgcctgctgcagcagcttccagcgtgcctccttatttgcaaaccatagggaaagctgcctgacccacctagagagttgtgggtaaggccgtgtgcaaacaggcctgtacggggcatggtgggtcacgggggctgttggggaggagggccggtggcacacagcctggtcctgaggcctgagctccatcccccttctgccacagtggccagggtgtgaggagggtcccagtgccggggctgccccgccacgcctggcgttcaccgtgccatctctgtcgcgcagggccgagaactactggtggcgtggccagaacacacggacgctgtgtgtggggcccttccctcgcaacgtggtgacctccgtggccggcctgtcggcccaggacatcagccagcccctgcagaacagcttcatccacacagggcatggcgacagtgacccccgccactgctggggcttcccggacaggattgacgagtgagtactgggcggggatggatgctgacctggccccgctcgggactccagggccctcagcacggcacgcgtgggcggaatctgctcttcaccctttcgcccgggcttcagcccccgacccgccactctcccctcctcaccctggccttactctcgggaagctgtggaaccctaggaagcccagcctggtgggggttctccaggggaatgttctccaggggagtgttctccaggggagggttctccaggggagggttctccaggggaatgttctccaggggagggttctccaggggagggttctccaggggagggttctccaggggaatgttctccaggggagggttctccaggggagggttctccggggagcgttctccaggggaatgctgtccctgccattttcaagctttggggggccgatctcctaactctgagacacttcatctgtgaaacaggttcacccccccaataaggggaaggctgtaaatgcactctgaattagcacttgctgctcagatgcaggggtcctgagagaagctttcccactcactgtagatgaaagtagggtcaggagcttctgaggatggactcctgtttggtggaaaggtccccggagccacagctgtaacccctcttggtactcgggccttaggaaaatgaacttgggaggaacccggtgggagctgctgaggaggagagcttctcccatgacccccctgtggccccctgtgaccctgtgaccctgtgacccctgcacacgagcagtggttttccttctcctgctggtggtgccagagtcctggagacgtgaacctgctggctcaggccctggggatgtatgcaggtccacatgggagtgagcctgctttccagaaccagagtgggactggggaccttggggactgcagagggaacgttaggtggcagctccgcctccccaccacacagtactctacggagctcactccatacctgggagaggccctgtctcctatgtaagaggataaggccaccgaggggcatctgggaaggacacgcagaatcagtcacttccgggatgccaccccccaccccccgaagcttcttgcgccaggcctccaagcctctctgctggccgcagggggattccaggcccctggcctctgcagcccttctcctgctgacttctgatactctggtctgccctgagaggcgtggaaagcaggggccttcacccaccgggccccacacaccagaaccccacacagcgggcccccacacaccagaacccacacagcgggcccccacacaccagaaccccacacagcgagtccccccacaccagaacccacacagcgggcccccacacaccagaacccacacagcgggcccacacacactggaaccccaagctcacagggctcagcccatgtgttttgcctaaaaagaacccagcaagggcctgagagttggggtgaaagactgcagacacctccaggagaggctggtgccctctgccccactcctggcatgctgtggccagcccagccccattcctccaggctttaatcagccccagtgactaagtctcagatactgacagttggtgcagggacggagggtggatccggagcaggacaggtggcccagcctctcccgcacctcctggccatgtggcagaagggtgcctcctgcccaccctggctgggcaccatagctgggatgccccgttcttaggccctccatcgtggcctgcgggacaggagtgtctgccctctggccgctgcctggtgtgggctgggggcctggggggttgtggaggaccacctctgcccttgtagggtgtagttggagtccctgaggtcctaggctttccatcctggggtcaggtgtcctttctctgccttctctccaggacaccccccagctgagacgtgcggtcaggttctgtggactgggaggcgggaggcctgtgcttcagacccaagactacacccggtttcctccaggacgaaggggctctgatgagattctgccacccctccacacgcttcccctgctctcttgacccagctctctcccccacagactgtatctgggaaaccccatggacccccccga

SEQ ID NO: 14538 - DNA, 737 bp, Homo sapiens
gcgttgggtcccaggtctgctgggatctttctggtaaccgtggacaggtcatgttgcctgctgcagcagcttccagcgtgcctccttatttgcaaaccatagggaaagctgcctgacccacctagagagttgtgggtaaggccgtgtgcaaacaggcctgtacggggcatggtgggtcacgggggctgttggggaggagggccggtggcacacagcctggtcctgaggcctgagctccatcccccttctgccacagtggccagggtgtgaggagggtcccagtgccggggctgccccgccacgcctggcgttcaccgtgccatctctgtcgcgcagggccgagaactactggtggcgtggccagaacacacggacgctgtgtgtggggcccttccctcgcaacgtggtgacctccgtggccggcctgtcggcccaggacatcagccagcccctgcagaacagcttcatccacacagggcatggcgacagtgacccccgccactgctggggcttcccggacaggattgacgagacaccccccagctgagacgtgcggtcaggttctgtggactgggaggcgggaggcctgtgcttcagacccaagactacacccggtttcctccaggacgaaggggctctgatgagattctgccacccctccacacgcttcccctgctctcttgacccagctctctcccccacagactgtatctgggaaaccccatggacccccccga

SEQ ID NO: 14539 - DNA, 12288 bp, Homo sapiens
gacctgaaggtgcagggttgcctggtgcaggttcctctgggatgaggttctgagggcacccagcctggccttgctccagaagcctgggctctgcgcacagaggggtgagttaaggctgactaaacttggtggggctgacatgtggaagcaagataatcctctggctgggggaggagctgtaagcccccctctcctcatcagtatgttcttttttccttcagggcttggagaagaggtaggtggaggtgggagagggcgggctgggaggtagggttggcatatattcctgagaatacggtagattgttttggaaaaatcctcttggccggaaattgcctgtcatgtctgcgccttggtgtggatttgtcacttcgcatgcagttggagaggctggagaggggaatggacagcagagctgggctggtttccagcctcttgtttcctttagctctgcagagtggagatataaagagacaagtgaagagcagagggggtgtacacgtggggtggattctcgaactcctagaggtagtttagatcctgtggatgtcttacgataggatggtactaggacgccagagatttacagggggaggtgaggcagggagaaagcaggaaagggcactggtttggatcagatcctttatccagccagggcaagaagggaggggcctggtattttctgccttgccttctacagtctcccggctttgcagctactcccaagactagtatgtgcctttagctgcagtaagatgccgaggagcttctgtacagcatagaagcaggcgttcgggggcctcgccggcagtcatccacctaccctggtgtgcttggggtgtggaaggggctgtgtgaggagagtgggccgtagagggagcctcacctagtgaccttccagggtctggctcagccttgacgctgcgtggggaggagaggtcacagcatctgtctctcctctgccccaacccagggaaggtgccctgagctcagccctaaatacctggtactaaagagtcagtggctgcttcagatgccaccagaatgagaagcggtgccttggggccccgggggagaggaagagcctctgccctgggacttcctgtgccggcgatggcctcgcgccagtgctgggcgcggcacccccgcgtgggcctgtgttgggcggcttttgagcaggagtccgggccctcgtgtcaccgctctgaagtcaaggaggtcagtgcgtgcccagcgcacagcgcgtgcggcgttgcgggagtggcgcgcggggaaccggccgcgggggcctcggggcgggggcgtggcctgcgcgggaggcgggcgctgggaggcggcgcggagccggctgagcgcagggccgagctgcggggcaggtgggcgcccggcgttctgggagcagagtggccgccggggcaggctgggggcggggtgggctgcagccccgggatgcctcggaggagggggtctcagatggagtcggacggaggcccctctgctgtgggcttctcggatggccccttaccgtgaatacgggggactcgtgaatccccaaggccccagttggtggctctggggccctggaggcgggctgagggctgagtggagcccggttccgcggccggcgaaggcagagccccggctctcggtgggggtcagcccggggctggcacagctggctcactgggagagggtgggagccgcgccccggagaggaggaacggagctgggacgggctgcaggagggaatggccgcaggccggcaggaggaggggcgcgaccacccggccgccggccgatggcggatgaggctatgggggctgagacgcagtagcggccctgcacttctggaggatgctcgaggcccggccccccaggacgcagggcagtgacgctgccggtgccgctgcggggcgggggctgcgggcgctgcttctctccctgaccgcagccgctgggatttggggctccatgggggagagatctgcttaccagcgcctggctgggggcgaggagggaccgcaggtaatggggaaggctaggggatagccagatacctgggccccagaccccttcgtctgctgtgagccgggctcagccctgccccctgcggcggcctcaggagtgagagtgtctgctcctgggccaggggacagagagcggtgtgtttatgtgggtgtggcggtggtgacttagtgatgctggcatctgcctgtgtgtgcatggatcccctgggaccccaaaaagctgcccgttgggctttcttccatgccccaagggagtccaggaagtactgctaggattggggttcagtcttttaggagaactgagtctgtatgtcctgggcattcccgtttactaggcttctgaatatgaatatcaagccagatgtccttgtttgcttttgaaaatatggtcacggtgttgatggatggggtagcttcccttccccttggagagaacgcacttcctctcccgaccggcagagggcagtagctgacaggagaaagggggactcggtaggagcgttggggcttaaggtcgggctgttttcctgggcgaggagaaagggggccgggccgggccgggcgcggtggctcacgcctgtcatctcagcactttgggaggccgaggcgggcagatcacctgagacgaggacgctgaggtcaggaattcgggaccagcctggccaacatggcggaaaaaaaaaaaatagctgggcacggtggcgggggcctgtaatcccagctactcgggaggctgaggcaggagaatcacttgaacccgggatcgcgccactgcactcaagcctgggcgatagagcaagactctcaaaaaaaaaaagggggtgggggttccaggagccggcctggcgctgacccacacatactttgcttcttcccgcagctggattactgggccagttacaggtcttgttcttactggacatccaaggtcaggcatggggttctggtgactttgagacacatatttctggggacgctagagtttttaatctggccattctgatccagcagacccattttgaaatagagggaataaccctgcttaaattgttccccggcccccggtccctgggtctccttccaggtgtgcttggtgccagggtaaggctgtaggcttctctgatgcaagggcacagtcagccaaggtttggggaaaagtcagctccagtgtaacgcaggcctgatcttgtccacctgacctcagcccccactccatccacacctgccatctccacaagctttgtgggctggatggcagggggatgaggaagagggactgaagttgggggtgtccttctccccacctcctggagttagaccaggaaatggctgtcccttttggcatcatcagggaggtcaagtgctgggagaggccctgggaagggagcctgggatgctgagtccccaaagccctgctccccagctgcccacccctccagccagctgaggctccctgagctggtggccagctggacagggacaagagagcagtgtgcaagaaacaggggctccctaggcatggctcagcagggaggggggtgcctggggagctggagagggcttcctgcagctgtcaggtgtgtctgggggccgtagcgaggggggtgtaagagcagctggcaccctttgaggagggccagagagatcatttgtcagttctagaaacatgagggccccacgggggcttgatggagtgtctctaggccccttaatctgaggccgtggtctgtgtcaggggttatacaggagacatcctacagctttggggtgggggcgtcccagcaggagtctcagggcatatttgtttgttttgagcgggtttgggaacttggccacctggtctgagtaggaggcaccctgggtgtttgggcagcagacagggccaccccaggggagggggtgaggatcctcaccccaccctacccttgctcttggctggactgccccactctggcaggctgccggccgcctatttccgtcgggcaccagggtaacagggccacatcagggtctgagccaggagacacccagccaaggctgggactcgggggtgggggagggtctctgaggagtcatcgcagggcccagcggagcctctggggtccaagcctcccactcaggctgtgtgttagtccccacgtccccacacaggtccatgagggagtccacagccctgcttcatacgtgctgtttgagtcacatagccgccaccctaaagtcccaggagttgtctgcaactgtgagggctggggtagaagccagagacaggagctttgtgtatggggaggcaggggggccagcgcgggtggctgggaggaagagtcccccccattcctgccgccctcttggcagtgattcagaaaggtcctttttcagccagtgtcagagctgctcagctggggagggagggagagagggagagagagaggcaggcaagagggagggcggccgggcgggcagttgggtggggaagccggggagtagggctggactgtgaccactgccctggagagaagacagaaacaggacagaggatcccggctgcagccagcgtgaggaaagctctgctccctgccagaccggccagctgtggaaacccagcggggcttgcagcagagcggaggggcccaccccgttcttcctcatttcccacccctggtgtgggatttggggggctcctgggcagagtgcgaagctccggagccgaggccactggatccccagtgactgctcgggggggtcccgctgcgtggagatgccggcagcacgtcggttccctggcctggagctctccttccctctcctggccagactgcggcgacgcctgtacacagtgagtggggggcaggggctggactgctggggactggttgggctcctcagcaccagcacttgactgagaggcagaaagcaagactgggagcggctgagggaccccgccagtgagggcttgacggggagtccgggccaagtggcctctcctgcggctgctgcattccttcttcttggcctgtgtgtttgcacgccggccacagagtagtgacggacacaggtgtgcagactccatgaggtgcgggggccaggaccatgcagaattggagagtgtttgaactctggaggagctgcagccatgccctgtgctgcacaaagaaccttgggctggagggggacttagaggggaggcggacccctgcggagtcaccctggactgagaccctgaccgcttgcctcaccagcatcccggagttccttcccgtcctcccacatgcatcccctgtgcagagctgcgctgttgctgggtcagggagcatggagtgcacagctgaacagaggtgcattagctggtgtttcagggagagggaacaggccgggctgtgctttctgaagagcttcaggggaggggcctctgggtctcccccagccctgaccaccccgggcatggctttgagctgttttcaggagcctagaggagggggcctggatccttgggagttggtggtgggaaaaagaagaggagccctggagactgctctccctgcgggagactaggagcctccatcctgaggctgagccctggagggggggggtcactttgctccagggacagggcagcggtggccgtggccgggtggagaggagacgctgcctaggcccgtgactcctagtgtgcctctgggcttgcttccggaaagccacgacgcctggtcctcttaaaccccacgcctcttgttttgtaaacagatgattttgttgaggataaatgaatacagcttaatacttagaactgttcctcgcatatagtaagtgcagttgaagtgttagattttattttattttgagatggagttttgctcttgttgcccaggctggagtgcaatggcacgatcttggctcaccacagcctccgcctcccgggttcaagtgattctcctgcctcagcctcctgagtagctgagattacaggcatgtgccaccaggcccggctaattttctattttcagtagagatggggtttctccatgttggtcaggctggtctcgaactcaggtgatccgcccacctcagcctaagtgctgggattacagctgtgagccactgtgcttggcctagatgttatttttattgttacttgtcttaaataaagttaatagaaatatataacctgttatattaacatgttaacctgtgtacagtgaaacaagcaacacagtgggaactctaatataaagagacataagaggaaggtaataatattttatgtatcctaatacgttagtaacctagacaatgtagtgaggagtcagatcttgagacctcaggtggaaacaccgtgaaggcagcatctgcaagtgctgaccgagaggggagttttgaaataatgagagggggttgccttcactgacatttttgcaaatagtggacttctgctatgttctgaataaagcaaagtccattttcccttaagtttacacagtagtttcattccaggaaaatttattttatattaaaactgtaaggccaggagcagtggctccccagcactttgggaggccagggcaggtggatcacttgagctcaggagttcgagaccagcctggccaacatggaggaaccctgtctccactaaaaatacaaaaattagccgggcgcctgtgatcccagcttcttgggaggctgaggcgggagaattgcctgaacccgggaggctgagtttgcaatgagccaagatcataccattgtactccagcctgggagtctcactctgtctcaaaaaaaaaaaaaaaaaaaaccaaaaaactataaaagtactttcttatttatatataaagtgggatcatattctaggtttgcatgatcataaacaccttcatgaattgagttgtgtgggatttgggacagtgcgagaatgtcctacgcattgcaggctagctcacgctcttgtcccccaaccacccactgaatgtcactaaggcccccccaaatgttgtggcaaccagaactgtcccatagggggctgtgcagcctcatgagaaccattccagtaaagggttacagctttaagtttggaaaccacccggctggcccagctgcctggcccggtcgccgaggtggaagagccaggatttgaactgagagtttctcattcccctttgttactctttgtacttccctgagctgcctgaaaaagtcggaactggcactgtgttggcagggccactgggaactgtgggggcaggaggctcacgctgggcccaggctgtgtgtgcctgcttctcagtgctgctcactgtgatgggagctggggaggaggccaccgctgagtgggggagggggatggcttggtccccagccgggcagctggccttttttctctcgcctgttcctctttggggattgagcatgggtccggggctagcctggccacgccctcagctctgacacaccttacgcagacagggatgggtttgctgtgcggtgggtccgcttgcttagctttgaaggtgccaccagcttctttatctgggcccaggatagtgtaggtcagaggtcactctccggtaccactggctgattgcggcctgcagtgtgctttggccagcacgctgtgtgtgcgtgtgcatgcttttcagatctgaactattcagcattgttaaaaagtcaggagaaagacgaatattaagtgaaatcagggaacagaatggtatggttaatgcgtgaatattcgtgtagggacaacagagtctgaagcgtccgcagaagacatcactggcaactcctggggagccgggtggctgtgcagctggggagggaatgagattcgtggctcagtgtgccttctgaatattttaccacgtgcatatattaccttttccaaactttaatggtgagatttcacatgtaaattgggatttatttcttgaaaaaatggaaagctttgacaacactgggccacagtttcttctgacaaccattgatgggatctgagctccctgttgacaggggtgtctgcgagcccaccgcaggccccacccctccctcctgtcttccgcttgctgtggccctgtaggcacttgagtggtggcccgtggagtggtctttggattgttaggagaggctggggtggtcaggcgctgggaggaacttagcttagagctcatctgaccctgagagttttctccgtcacatctaaggagcccatagatgggtctcggggcacattgcaccctagagatttttatcaaatattaggagtaagaacacgtcggtgttcccggagagaccactgttagtttttaaaagattttcaaggactttcgacccctagaaacttagagcaggaatgtgagcacaggttgatcttgggtcactcagtcacagatcacatttcgggagcaagaccctgactcctgactccagggccagggctgtatctccgccgccctaattgtgccctgtggctggcaggaataggggacgtgggtccaggcggttctcggtagcttccctcgggagtcagaaggtggtgtgagcccttccgggtggccgtgtagtgggatgaaggtgagcccaggtcactcgggcaggcccctgttgtccccccacaacccttgtccctgagccactcctccccccacagaggctgggaggcggcagaatgcagccagaggagggcacaggctggctgctggagctgctgtccgaggtgcagctgcaacagtacttcctgcggctccgagatgacctcaacgtcacccgcctgtcccactttgagtacgtcaagaatgaggacctggagaagatcggcatgggtcggcctggtaggtgggatgttggcctggcttgtcttgcccctgaccctttccgtcctctgtcctcaggaccactcggtgcacgggtggcagctgagaactctgtcccagagccctgagggagcaggagggacatcagtaggtgctgatgtgtgatgagaacagttggcagttataaaggtgaattggagtttgaggagagtgaggccttccctaaagctggctacacaggagtcactccatgccccgttgtgattgttctcacgtagagtgtatgtcctccattgcccctccttcataagcatcgaattgagtctgttctcatcattctgactaccggggggtccatgtgcagagatctgtagggagaacgctaactctcagatggtttgctgattcgtgctcacgctctctttcttgctctctcacacgcacacacgcatgcacacgcacaggcatacacacacacacacacacacgcaggcacacacgcacatgcgcacacacgtgcacgcacgcatgcacgtgcacacacgcatgcacgtgcgtacgcacgcgctcacacgcctgcgcacacagacacgcacacacacacacacgtgtgtgcgcacacccgcatgcacacgcacggcatacacacatgtacacacacgcgcgcagacgcacacacgtgcgcacacgcgtgtgcacacacacgcacatacacacaggtttgctctgatttgagttcaacccttatcttcatatttttcctaaaagtgggggttgtagcatctaaaagtcatgatgttcttcatagaacattagaaacgtattagggctttcaagttaaaatagctaaataggtaataatgtgtcaagttagacactgacttagttaaaatagctaaataggtaataatgtgtcaagttagacactgacttagttaaaatagctaaataggtaataacgtgtcaagttagacactgacttagttaaaatagctaaataggtagtaatgtgctaagttagacattgatttatgctactttaggcctggatagttggtgtctgatgccagtagcataaaaaaattttacggagggaaaaaaacctcaacattgagaaaattctgttcattaccttgatttttcctgagaactgggagaagcccatcgcttcaagtttttggttaaacaccttcacccagtttgagagccagtgccaggaagtggagtgcagagaccgtcggtcagttgaggctccgggttagttggggttgatttcattgctatcatcgggtgggcggtgtctagtgacaggctcacccccaaggggaccacaggcagcagcctctctcgggctacggcggccttcacagcacgcggttccccgctctccctgcaggccagcggcggctgtgggaggctgtgaagaggaggaaggccttgtgcaaacgcaagtcgtggatgagtaaggtgggtgaggaggtgggtgaggaggtgggaggggggcagcctcgaacgcccccctccgcttctggtcctgggaaccttccccagctccccggcaggtcgaatctcgccgttctgccggcactttgtacaggaccccctcgtccagggtcttatcgggcagggcacttgtagagctgctgggctaagtgtctgtctccgccagatacggacacgtgagcagcctgtgtgcggtgaggccttcacagcccctctcggcacgcctggaacaggacctcattgacaagtgtgccttaacttagccctgctgtgtctgagcgttggggccagtgtccagcgtggggtggtggacctgtctggacccagaacgtctttgcttggcttccctcctccctgaccctctctaatctctgggtttctctggtcatctgtccctgctgacagcttccttccccacagcctgtccccacctctccccacaccttgtcctaatttgggtctgtggtgtagtgagtccctggtctgactcagtggaactttgcccattgtctggaagacaatgagagaggaagtgagccagccgtggtctttcctccccacttctggcttcagggctgggttggggggtgggcagggccgaacagctgcagtgggattgggcagcagagattttcctggctgcaatccggcaaaggggctgtctcttgggatcctttggcttttcctggaaacactgtcctggtcctttgcccgggttttagggaaggatgagtagtgtcgggatggtggaggcaggagaagagagcagcgtggtttgctgagatttaggggtcttggatctgccactggctcctgataggtccctgggcggtcagtggcctccagatttttgttgtgtcttcagtgaaatgataccggtccccactgcccagctcacctcccggggctgcaggaggcaccggagataatggctgtagagggtcttgtaacctgaacattgcttgcaaacataaggaattctagttactgggaggaagcacagggcagaggccagaagaggccctcagatttgaggcaccctagcccagacggataaggatccaccagctctgggggcgtgagacccaagctggcaagaatctgcaatctggagccaaggctgtgggtgcctcagtggaggccgagtcagaccgacgtggccagctttgaccctcatggcctcctttcttctgtcccttgaccttcggctcctccctgtccaccctggcctccgagtctcctccacttttccttccgtctcagccctcagctctaggcgcccctccagagacccagctgtcttcccaggccccttcccagcaaggactagcttcatctgaaccacacacacactcacggttcaacctcagactaaaattatcctctcccctgggcaggatgaagggcagccgactccctggtgagggtggagacagacagcaccaaatggtcaggccagagaaggggccagggctaaaaatggacaaggaggtgtctgtggagggcccctgcggctccatcgatgcgggttagggctggagtctgcggggtggcgggtgcaggaagggagggtggggcaggactgggaggagactccgaccttggctgggcggtgccctccctctccacacagctgggtgtggggccgctcagccacaggctgcatgcctgtcggtctctttctggcaccctccttgaggccagcatcaggctttgggttcatgtttgggggtgtgccctggacggagtgtgggcctccagccaggctgccccactgacagtttggcaaaaccaggacctatctggaagccgaagccggggatcaccaggtggacccagcggggtgggactgagtgactgaccctggggtgttggattccatctggcccccggctgccttcaaacaggtgttcagtggaaagcgactggaggctgagttcccacctcatcactctcag

SEQ ID NO: 14540 - DNA, 407 bp, Homo sapiens
gacctgaaggtgcagggttgcctggtgcaggttcctctgggatgaggttctgagggcacccagcctggccttgctccagaagcctgggctctgcgcacagagggaggctgggaggcggcagaatgcagccagaggagggcacaggctggctgctggagctgctgtccgaggtgcagctgcaacagtacttcctgcggctccgagatgacctcaacgtcacccgcctgtcccactttgagtacgtcaagaatgaggacctggagaagatcggcatgggtcggcctggccagcggcggctgtgggaggctgtgaagaggaggaaggccttgtgcaaacgcaagtcgtggatgagtaaggtgttcagtggaaagcgactggaggctgagttcccacctcatcactctcag

SEQ ID NO: 14541 - DNA, 4325 bp, Homo sapiens
ggtcctgggagcggccccggcgccccgaagccgccccgagctggtggggagggcccggccggtggggccccgggggcctgcgggggaggggcgcctgggggtgcaagaggcgaattggctgcccggggtgcaggagggacaggtggtgcgggctgtccaggaaacctacctgaacgggaaggagccccaggagggagagggacccggcgaggggctcaggacccggaggcgccggcggaggaggaggtggtgactggcaggcccgggccccacggtacctccggggctgaaggggacgcaggatgtaggggcatggggagtcgggcgcagaagagtgcggggaaccgctgagctctgggagccactgcctgagggcaggccgcggccggcgggaacctcttctgccgtctcagcctgggcgtcgctgaagctgtgtctgcggggaggcagcggaaggcggcagaggctgggaggcggcagaatgcagccagaggagggcacaggctggctgctggagctgctgtccgaggtgcagctgcaacagtacttcctgcggctccgagatgacctcaacgtcacccgcctgtcccactttgagtacgtcaagaatgaggacctggagaagatcggcatgggtcggcctggccagcggcggctgtgggaggctgtgaagaggaggaaggccttgtgcaaacgcaagtcgtggatgagtaaggtgttcagtggaaagcgactggaggctgagttcccacctcatcactctcagagcaccttccggaagacctcgcccgcccctgggggcccagcaggggaggggcccctgcagagcctcacctgcctcattggggagaaggacctgcgcctcctggagaagctgggtgatggttcctttggcgtggtgcgcaggggcgagtgggacgcgccctcagggaagacggtgagtgtggctgtgaagtgcctgaagcccgatgtcctgagccagccagaagccatggacgacttcatccgggaggtcaatgccatgcactcgctcgaccaccgaaacctcatccgcctctacggggtggtgctcacgccgcccatgaagatggtgacagagctggcacctctgggatcgttgttggaccggctacgtaagcaccagggccacttcctcctggggactctgagccgctacgctgtgcaggtggctgagggcatgggctacctggagtccaagcgctttattcaccgtgacctggctgcccgcaatctgctgttggctacccgcgacctggtcaagatcggggactttgggctgatgcgagcactacctcagaatgacgaccattacgtcatgcaggaacatcgcaaggtgcccttcgcctggtgtgcccccgagagcctgaagacacgcaccttctcccatgccagcgacacctggatgttcggggtgacactgtgggaaatgttcacctacggccaggagccctggatcggcctcaacggcagtcagatcctgcataagatcgacaaggagggggagcggctgccccggcccgaggactgtccccaggacatctacaacgtcatggtccagtgctgggctcacaagccagaggacagacccacgtttgtggccctgcgggacttcctgctggaggcccagcccacagacatgcgggcccttcaggactttgaggaaccggacaagctgcacatccagatgaatgatgtcatcaccgtcatcgagggaagggccgagaactactggtggcgtggccagaacacacggacgctgtgtgtggggcccttccctcgcaacgtggtgacctccgtggccggcctgtcggcccaggacatcagccagcccctgcagaacagcttcatccacacagggcatggcgacagtgacccccgccactgctggggcttcccggacaggattgacgaactgtatctgggaaaccccatggacccccccgacctcctgagcgtggaactgagcacctcccggcccccccagcatctaggaggggtgaaaaaaccaacctatgaccctgtgagcgaggaccaagaccccttgtccagcgacttcaagaggctgggcctgcggaagccaggcctgccccgagggctgtggctggcgaagccctcggcgcgggtgccgggcaccaaggccagccgaggcagcggggctgaggtcacgctcatcgacttcggtgaggagcccgtggtcccggccctacggccctgcgcgccctccctggcgcagctggccatggacgcctgctccctgctggacgagaccccgcctcagagccccacgcgggcactgccccggcccctgcaccccacgcctgtggtggactgggacgcacgcccgctgccccccccgcccgcctatgacgacgtggcccaggatgaggatgactttgagatctgctccatcaacagcaccctcgtgggcgcgggggtccctgccgggcccagccagggccagaccaactacgcctttgtgcctgagcaggcgcggccgccccctcccctggaggacaacctgttcctcccgccccagggtgggggcaagccgcccagctccgcacagaccgcagagatcttccaggcgctacagcaggagtgcatgaggcaactgcaggctccggccggctccccggccccctctcccagcccggggggtgacgacaagccccaggtgcctcctcgggtacccatcccccctcggcccacgcgcccacacgtccagctgtctccagcccccccgggcgaggaggagaccagccagtggcctggacctgcttcccctccccgggtgcctccgcgggagcccctgtcccctcaaggctcgaggacacccagccccctggtaccacctggcagctccccgctgccaccccggctctcaagctcacctgggaagaccatgcccaccacccagagctttgcctcagaccccaagtacgccaccccccaggtgatccaggcccctggcccgcgggctggtccctgcatcctgcccatcgtccgggatggcaagaaggtcagcagcacccactattacttgctgcccgagcgaccatcctacctggagcgctaccagcgcttcctgcgtgaggcccagagccccgaggagcctacccccctgcctgtgcctctgctgctgcccccacccagcaccccagcccccgccgcccccacggccaccgtgcggccgatgccccaggctgccttggaccccaaggccaacttctccaccaacaacagcaacccaggggcccggccaccacccccgagggccactgctcggctgccacagaggggctgccctggcgatgggccagaggcgggccggccagcagacaagatccagatggtggagcagctcttcgggctgggtctgcggcccagaggggagtgccacaaagtgctggagatgttcgactggaacctggagcaggccggctgccaccttctgggctcctggggccctgcccaccacaagcgctgagatgcgtctggagagccagagggcctgcctgaaggaatcacctgagcctgtccgtccaccaggagtggggagatgcccccatccagtcctggaggacccgctgctcctgctgctcccggggatggagcaaggccaaggctgcgggaggctgggagccctgccctgcccatccctcctgcaccagcgctgtccctgcacactttggttcagtcccggtgcccctgccaagatgtggaaggggccgggtgaagacaggcttgagggctgccccagcaggctctgggtatgacctgcctctggccctggtcctgggcggggcctgtgggtggagtagtacccccaggccctgccctgggtgacagactgggaggaaaccaggctggacctgggcaggcgggatgtgttggccacagggagaggcggaccggcacccggtgggacctcctaggactgggccttcttccagggggcccctggcagcagctggggtgtcgggcagaatgtgacttgtggccttaccatggacttgaatgggacttggctggcctcaggatcttgtgcctggaaatagcctgaggtggctcaggaagcggagaaagggtgccagaccattctctggcggggaccagggcccaaggccccagggctggaaggagaccaaggggcagccgccctggagggacatcagtgcttcctcttccacccaattcccccacgcggttccatgttttcccaccagcctgttggcgaagttgctgctccggcattcagtacctgcttcttccagagaaataaagttagtttctattttatgtta

SEQ ID NO: 14542 - DNA, 8347 bp, Homo sapiens
ggctctgggggctccttccccctgggccaccagccctggcttggaaccacagcacctgccctccgtgcctggagctgctcaggaggtgggaggtgaggggcaggaggccacaacagccggtgaggcttgggagcgggcctgggtgtcggtggtggcagagcttgactctgcccccttgtttcttcagtccctgaatatctccatgtttgtttggctgcctccgtctccatgtctccaggcggatggctctgtgtgagtctttgggcctgggtgtgcatctgtgggtctgtgtttggagttccctcctagcctggccttctcttcgccgtggcttcccacttgcgaagctgtgtccagtatttgtttcctggtgcggagtctgggaggccacctgccgcagctctgactgagtctaggctcagtccttctcagggtaccaggctgtgggcagaggggagacacctagatgtttcgtgctgtgtctagatttggagacacaaatgatgactggtctttcccaggggctcgtttggaggaaggggtggctggcagcacttttgttccgcatacagagcgggtgttggaatccattgcgggtccttggcctggtctggccctggagcctcggcttcctgtggtgggtgggagccaggcatccgggttatccctccaggcctgggcgcctgggacccctagggagaagagcgggcgggcgttttgaacagaatgtccggcattagttgagccatttctggactaccttcggcccggacgggaacgtggtgctgagatttccagagctggggcagccttaggcagttctcagcaccggcctctgttttccatcttgtctaccccagagatgttgaccagaggcccgggggcagcaggaggtagaaggttcatgcggaggtgttgggcccttttcctgctcccccaggaagtcctcatccgcccctgcttcagtcacggccgggtagcagccctggccctcccatggccacggggactccggcctgttcatggcgggagagagagggcgcggacagggcgggcctggaaggaagggctggcctcagtcccctctggactgctggtgcctcggccacactgagcctcacacgggtgcgtgtgggctgcgagaagtgacacggtcctcttggaagtcccactggagccttgggatgaagctgccttggagtgtgcgtgggcgccatcccgagggggagcttcctgtgcctccgagcgtgcgtgggcgccatcccgagggggagcttcttgtgcctcggagcgtgcgtgggcgccatcccgagggggagtttcttgtgcctcggagcgtgcgtgggcgccatcccgagggggagtttcttgtgcctcggagcgtgcgtgggcgccatcccgaggggagcttcgtgtgcctcggagcgtgcgtgggcgccatcccgaggggagcttcctgtgcctcggagcgtgcgtgggcgccatcccgagggggagtttcttgtgcctcggagcgtgcgtgggcgccatcccgaggggagcttcttgtgcctcggagtgtgcgtgggcgccatcccgaggggagcttcttgtgcctcggagtgtgcgtgggcgccatcccgagggggagcttcctgtgcctccgagcgtgcgtgggcgccatcccgagggggagtttcttgtgcctcggagcgtgcgtgggcgccatcccgaggggagcttcttgtgcctcggagtgtgcgtgggcgccatcccgaggggagcttcttgtgcctcggagcgtgcgtgggcgccatcccgagggggagtttcttgtgcctcggagcgtgcgtgggcgccatcccgaggggagcttcttgtgcctcggagtgtgcgtgggcgccatcccgaggggagcttcctgtgcctcggagcgtgcgtgggcgccatcccgaggggagcttcctgtgcctcggagcgtgcgtgggcgccatcccgagggagagtttcttgtgcctcggagcgtgcgtgggcgccatcccgaggggagcttcttgtgcctcggagtgtgcgtgggcgccatcccgaggggagcttcttgtgcctcggagtgtgcgtgggcgccatcccgagggggagcttcttgtgcctcggagcgtgcgtgggcgccatcccgagggggagtttcttgtgcctcggagtgtgcgtgggcgccatcccgaggggagcttcttgcacacgtcctccgcactcttactctccttcccccaggagcaagcatgttttctcgagtggtgtcaggactcccagcagccatgggggctcttgcctcggccatacctgcactaagggaggtgggcttgatgtctcctttccctctcagaagtgggtcccaaaggaggcttctgtgcctggagctgggcagtgttggcggaagggagaggccagacggagtgacctgccttgggcacgagtcacgctgctctgagcaaggtctcggcctcagcggcattctcacccagttactgagcgcctctgaagaggtgtggagagcagagtccggcgtctggcccgcggcagccaccggggagcccgtgggtgtagcgggagagccgcagcccagccggtgccggggttcctcctctacgggccgccgtgggaggctgtgtgcgtgctggggagccggggctctgctccttcgagtggccctgctatttttcagatgggactcgtctcgtctcggggtactgtcctctctccttccttccctccctgcaggcagggtgggaatcacagggtggctgtgtgtggtggggccaggccagtggccctgtgtatgaggaggctgggcagggggagcacagccccgtctccccgcgccccgcgccccccgcctccccgccgaccgtggtgctctcgggtttgactttggtctctgggatgggctgttccggagtcaccccgctccagccaggcctcgtcaccttacaaggctgtgggtctgggtgcccaggcgtcgccacctcctccgtcctctctccccggcctggctgggtttcagaggagcccttcttcacgctttggccctgggacaggagaagtgggggttggtggggagggcgtgcagtgtggtgccacacgtgtccaccctagcagctctgggctgtcaccgcccccgcgtgcccagactctgcccacggggctgtcaccgcccccgcctgcccagacactgcccacggggctctcaccgcccccgcctgcccagacactgcccacggggctctcaccgcccccgcctgcccagactctgctcacggcatcacgtatgacaagtccagcagcagacgcgggagcctcacaacctgtgagagccttcgggagtcaggagtgtcttgcgggagccctgtgcttcctggcctgcctgcccctgcccctgcccctgcccctgcccaggccccggcttaggccacatcagcagaggtttcgtgtctgaggtcagagggggactggcagccctactgtctggtcactgtgggagagctgagttcccttttggacacaggtagagcccctcctgaggagacggggaggctcccgcaggccttccgggaggtggtggaaagctccggaagcaggtgaagcggtggagggagggactgagttgcccgagtgctcctagactctcccgcgtctgcattcgggaggcaggttgtagctggaggcctggcccccagcctagtgcaaggccctaggtgtcccccggcacccccgcacctctcagaactcctggaacccagccgaggagtgaaatcaagtggccagaagaggactggggccccggccttgccagggaactgaggggtgaggaggaggtgtgggcggggcgctggccccacagacctgaaagctggcgttgggtcccaggtctgctgggatctttctggtaaccgtggacaggtcatgttgcctgctgcagcagcttccagcgtgcctccttatttgcaaaccatagggaaagctgcctgacccacctagagagttgtgggtaaggccgtgtgcaaacaggcctgtacggggcatggtgggtcacgggggctgttggggaggagggccggtggcacacagcctggtcctgaggcctgagctccatcccccttctgccacagtggccagggtgtgaggagggtcccagtgccggggctgccccgccacgcctggcgttcaccgtgccatctctgtcgcgcagggccgagaactactggtggcgtggccagaacacacggacgctgtgtgtggggcccttccctcgcaacgtggtgacctccgtggccggcctgtcggcccaggacatcagccagcccctgcagaacagcttcatccacacagggcatggcgacagtgacccccgccactgctggggcttcccggacaggattgacgagtgagtactgggcggggatggatgctgacctggccccgctcgggactccagggccctcagcacggcacgcgtgggcggaatctgctcttcaccctttcgcccgggcttcagcccccgacccgccactctcccctcctcaccctggccttactctcgggaagctgtggaaccctaggaagcccagcctggtgggggttctccaggggaatgttctccaggggagtgttctccaggggagggttctccaggggagggttctccaggggaatgttctccaggggagggttctccaggggagggttctccaggggagggttctccaggggaatgttctccaggggagggttctccaggggagggttctccggggagcgttctccaggggaatgctgtccctgccattttcaagctttggggggccgatctcctaactctgagacacttcatctgtgaaacaggttcacccccccaataaggggaaggctgtaaatgcactctgaattagcacttgctgctcagatgcaggggtcctgagagaagctttcccactcactgtagatgaaagtagggtcaggagcttctgaggatggactcctgtttggtggaaaggtccccggagccacagctgtaacccctcttggtactcgggccttaggaaaatgaacttgggaggaacccggtgggagctgctgaggaggagagcttctcccatgacccccctgtggccccctgtgaccctgtgaccctgtgacccctgcacacgagcagtggttttccttctcctgctggtggtgccagagtcctggagacgtgaacctgctggctcaggccctggggatgtatgcaggtccacatgggagtgagcctgctttccagaaccagagtgggactggggaccttggggactgcagagggaacgttaggtggcagctccgcctccccaccacacagtactctacggagctcactccatacctgggagaggccctgtctcctatgtaagaggataaggccaccgaggggcatctgggaaggacacgcagaatcagtcacttccgggatgccaccccccaccccccgaagcttcttgcgccaggcctccaagcctctctgctggccgcagggggattccaggcccctggcctctgcagcccttctcctgctgacttctgatactctggtctgccctgagaggcgtggaaagcaggggccttcacccaccgggccccacacaccagaaccccacacagcgggcccccacacaccagaacccacacagcgggcccccacacaccagaaccccacacagcgagtccccccacaccagaacccacacagcgggcccccacacaccagaacccacacagcgggcccacacacactggaaccccaagctcacagggctcagcccatgtgttttgcctaaaaagaacccagcaagggcctgagagttggggtgaaagactgcagacacctccaggagaggctggtgccctctgccccactcctggcatgctgtggccagcccagccccattcctccaggctttaatcagccccagtgactaagtctcagatactgacagttggtgcagggacggagggtggatccggagcaggacaggtggcccagcctctcccgcacctcctggccatgtggcagaagggtgcctcctgcccaccctggctgggcaccatagctgggatgccccgttcttaggccctccatcgtggcctgcgggacaggagtgtctgccctctggccgctgcctggtgtgggctgggggcctggggggttgtggaggaccacctctgcccttgtagggtgtagttggagtccctgaggtcctaggctttccatcctggggtcaggtgtcctttctctgccttctctccaggacaccccccagctgagacgtgcggtcaggttctgtggactgggaggcgggaggcctgtgcttcagacccaagactacacccggtttcctccaggacgaaggggctctgatgagattctgccacccctccacacgcttcccctgctctcttgacccagctctctcccccacagactgtatctgggaaaccccatggacccccccgacctcctgagcgtggaactgagcacctcccggcccccccagcatctaggaggggtgaaaagtaagagcccctctgctccctggtgtccctaactcatcggctactcaggaaggggcactgtcttcacaggccaccctaaggctgctgttctgtttttggggacagtggggtcagggcagcaggcgggacagctgtgtccctggctccggctgggcgtggggtggaagacaggcagctgtatccgccgaggtgggcctcctcgggctgggtctgcagcaggcccgtccgccccggcgtccctcctccctccttccacggccgagctcagatcctggctttcctcacttccccctaatcctgctctcctgtcccaagccaaaaccaccccacggctccggctctgcctggggcctcctccatctcccggtcctctgcctatcatactggaccgccgtgttcctcatcctgccgcctgcggcctcccgtttgctgggggcttgtacattcactcgcccccattcacttctctcccttcgtctctctacactctgccctctcgtccggccgtctccctcctttgtcctctgtcctgctccgtctctctccccctgtccgcatggcctttcttgcaggggagcctccacctcgcccacctcagcctgccttcttcactcagagtaagtggggctgcttccgatgccttggcccccgcccccgccccctctctctcactcctctcctggaaggtacagagcctgggcggctgggccggaggggaggtgggtgggtgtgtgctgtgagcttccgcggctgccctggcctagcatgcctgccccccctcgagcccgccccccggagcctgggcttctgctcacgagtgtggccctggcttccgcctcggcctcactccctcccagacctgtctgagcttctggagcacgagtgtggccctggcttctgccttggcctcgctgcctcccagacctgcaggcgctgtctgggctttgtggccgttggtcaggagtactgtcctctccaaggatagtccttatagcccctgatggcaggaggcggctccgtgcctgcactaatggtgtgccgtgacaggggcggggatgagggctcactaactcgccagggcgcaggagcagggccgccggggtcttgtgctggtggaggcagcgtcaggcaggagccagtgttgcttgctgcagcttagacggagcgaggcggggctcaccggcccacatggggctgccgggcagagcaggttccgccctcctgatggagtggtcggaggtgcgctgagaacctggccgccggtggctgacctcagacctcggggggagttgggagtggagggttgctgggggacacttggctttctctcccacgtgccacctcccctcgtgtcccagaccctgcctgactgccttcctgttgggctctccctttccatcacagaaccaacctatgaccctgtgagcgaggaccaagaccccttgtccagcgacttcaagaggctgggcctgcggaagccaggcctgccccgagggctgtggctggcgaagccctcggcgcgggtgccgggcaccaaggccagccgaggcagcggggctgaggtcacgctcatcgacttcggtgaggagcccgtggtcccggccctacggccctgcgcgccctccctggcgcagctggccatggacgcctgctccctgctggacgagaccccgcctcagagccccacgcgggcactgccccggcccctgcaccccacgcctgtggtggactgggacgcacgcccgctgccccccccgcccgccta

SEQ ID NO: 14543 - DNA, 733 bp, Homo sapiens
ggctctgggggctccttccccctgggccaccagccctggcttggaaccacagcacctgccctccgtgcctggagctgctcaggagggccgagaactactggtggcgtggccagaacacacggacgctgtgtgtggggcccttccctcgcaacgtggtgacctccgtggccggcctgtcggcccaggacatcagccagcccctgcagaacagcttcatccacacagggcatggcgacagtgacccccgccactgctggggcttcccggacaggattgacgaactgtatctgggaaaccccatggacccccccgacctcctgagcgtggaactgagcacctcccggcccccccagcatctaggaggggtgaaaaaaccaacctatgaccctgtgagcgaggaccaagaccccttgtccagcgacttcaagaggctgggcctgcggaagccaggcctgccccgagggctgtggctggcgaagccctcggcgcgggtgccgggcaccaaggccagccgaggcagcggggctgaggtcacgctcatcgacttcggtgaggagcccgtggtcccggccctacggccctgcgcgccctccctggcgcagctggccatggacgcctgctccctgctggacgagaccccgcctcagagccccacgcgggcactgccccggcccctgcaccccacgcctgtggtggactgggacgcacgcccgctgccccccccgcccgccta

SEQ ID NO: 14544 - DNA, 14522 bp, Homo sapiens
gagggggtgtacacgtggggtggattctcgaactcctagaggtagtttagatcctgtggatgtcttacgataggatggtactaggacgccagagatttacagggggaggtgaggcagggagaaagcaggaaagggcactggtttggatcagatcctttatccagccagggcaagaagggaggggcctggtattttctgccttgccttctacagtctcccggctttgcagctactcccaagactagtatgtgcctttagctgcagtaagatgccgaggagcttctgtacagcatagaagcaggcgttcgggggcctcgccggcagtcatccacctaccctggtgtgcttggggtgtggaaggggctgtgtgaggagagtgggccgtagagggagcctcacctagtgaccttccagggtctggctcagccttgacgctgcgtggggaggagaggtcacagcatctgtctctcctctgccccaacccagggaaggtgccctgagctcagccctaaatacctggtactaaagagtcagtggctgcttcagatgccaccagaatgagaagcggtgccttggggccccgggggagaggaagagcctctgccctgggacttcctgtgccggcgatggcctcgcgccagtgctgggcgcggcacccccgcgtgggcctgtgttgggcggcttttgagcaggagtccgggccctcgtgtcaccgctctgaagtcaaggaggtcagtgcgtgcccagcgcacagcgcgtgcggcgttgcgggagtggcgcgcggggaaccggccgcgggggcctcggggcgggggcgtggcctgcgcgggaggcgggcgctgggaggcggcgcggagccggctgagcgcagggccgagctgcggggcaggtgggcgcccggcgttctgggagcagagtggccgccggggcaggctgggggcggggtgggctgcagccccgggatgcctcggaggagggggtctcagatggagtcggacggaggcccctctgctgtgggcttctcggatggccccttaccgtgaatacgggggactcgtgaatccccaaggccccagttggtggctctggggccctggaggcgggctgagggctgagtggagcccggttccgcggccggcgaaggcagagccccggctctcggtgggggtcagcccggggctggcacagctggctcactgggagagggtgggagccgcgccccggagaggaggaacggagctgggacgggctgcaggagggaatggccgcaggccggcaggaggaggggcgcgaccacccggccgccggccgatggcggatgaggctatgggggctgagacgcagtagcggccctgcacttctggaggatgctcgaggcccggccccccaggacgcagggcagtgacgctgccggtgccgctgcggggcgggggctgcgggcgctgcttctctccctgaccgcagccgctgggatttggggctccatgggggagagatctgcttaccagcgcctggctgggggcgaggagggaccgcaggtaatggggaaggctaggggatagccagatacctgggccccagaccccttcgtctgctgtgagccgggctcagccctgccccctgcggcggcctcaggagtgagagtgtctgctcctgggccaggggacagagagcggtgtgtttatgtgggtgtggcggtggtgacttagtgatgctggcatctgcctgtgtgtgcatggatcccctgggaccccaaaaagctgcccgttgggctttcttccatgccccaagggagtccaggaagtactgctaggattggggttcagtcttttaggagaactgagtctgtatgtcctgggcattcccgtttactaggcttctgaatatgaatatcaagccagatgtccttgtttgcttttgaaaatatggtcacggtgttgatggatggggtagcttcccttccccttggagagaacgcacttcctctcccgaccggcagagggcagtagctgacaggagaaagggggactcggtaggagcgttggggcttaaggtcgggctgttttcctgggcgaggagaaagggggccgggccgggccgggcgcggtggctcacgcctgtcatctcagcactttgggaggccgaggcgggcagatcacctgagacgaggacgctgaggtcaggaattcgggaccagcctggccaacatggcggaaaaaaaaaaaatagctgggcacggtggcgggggcctgtaatcccagctactcgggaggctgaggcaggagaatcacttgaacccgggatcgcgccactgcactcaagcctgggcgatagagcaagactctcaaaaaaaaaaagggggtgggggttccaggagccggcctggcgctgacccacacatactttgcttcttcccgcagctggattactgggccagttacaggtcttgttcttactggacatccaaggtcaggcatggggttctggtgactttgagacacatatttctggggacgctagagtttttaatctggccattctgatccagcagacccattttgaaatagagggaataaccctgcttaaattgttccccggcccccggtccctgggtctccttccaggtgtgcttggtgccagggtaaggctgtaggcttctctgatgcaagggcacagtcagccaaggtttggggaaaagtcagctccagtgtaacgcaggcctgatcttgtccacctgacctcagcccccactccatccacacctgccatctccacaagctttgtgggctggatggcagggggatgaggaagagggactgaagttgggggtgtccttctccccacctcctggagttagaccaggaaatggctgtcccttttggcatcatcagggaggtcaagtgctgggagaggccctgggaagggagcctgggatgctgagtccccaaagccctgctccccagctgcccacccctccagccagctgaggctccctgagctggtggccagctggacagggacaagagagcagtgtgcaagaaacaggggctccctaggcatggctcagcagggaggggggtgcctggggagctggagagggcttcctgcagctgtcaggtgtgtctgggggccgtagcgaggggggtgtaagagcagctggcaccctttgaggagggccagagagatcatttgtcagttctagaaacatgagggccccacgggggcttgatggagtgtctctaggccccttaatctgaggccgtggtctgtgtcaggggttatacaggagacatcctacagctttggggtgggggcgtcccagcaggagtctcagggcatatttgtttgttttgagcgggtttgggaacttggccacctggtctgagtaggaggcaccctgggtgtttgggcagcagacagggccaccccaggggagggggtgaggatcctcaccccaccctacccttgctcttggctggactgccccactctggcaggctgccggccgcctatttccgtcgggcaccagggtaacagggccacatcagggtctgagccaggagacacccagccaaggctgggactcgggggtgggggagggtctctgaggagtcatcgcagggcccagcggagcctctggggtccaagcctcccactcaggctgtgtgttagtccccacgtccccacacaggtccatgagggagtccacagccctgcttcatacgtgctgtttgagtcacatagccgccaccctaaagtcccaggagttgtctgcaactgtgagggctggggtagaagccagagacaggagctttgtgtatggggaggcaggggggccagcgcgggtggctgggaggaagagtcccccccattcctgccgccctcttggcagtgattcagaaaggtcctttttcagccagtgtcagagctgctcagctggggagggagggagagagggagagagagaggcaggcaagagggagggcggccgggcgggcagttgggtggggaagccggggagtagggctggactgtgaccactgccctggagagaagacagaaacaggacagaggatcccggctgcagccagcgtgaggaaagctctgctccctgccagaccggccagctgtggaaacccagcggggcttgcagcagagcggaggggcccaccccgttcttcctcatttcccacccctggtgtgggatttggggggctcctgggcagagtgcgaagctccggagccgaggccactggatccccagtgactgctcgggggggtcccgctgcgtggagatgccggcagcacgtcggttccctggcctggagctctccttccctctcctggccagactgcggcgacgcctgtacacagtgagtggggggcaggggctggactgctggggactggttgggctcctcagcaccagcacttgactgagaggcagaaagcaagactgggagcggctgagggaccccgccagtgagggcttgacggggagtccgggccaagtggcctctcctgcggctgctgcattccttcttcttggcctgtgtgtttgcacgccggccacagagtagtgacggacacaggtgtgcagactccatgaggtgcgggggccaggaccatgcagaattggagagtgtttgaactctggaggagctgcagccatgccctgtgctgcacaaagaaccttgggctggagggggacttagaggggaggcggacccctgcggagtcaccctggactgagaccctgaccgcttgcctcaccagcatcccggagttccttcccgtcctcccacatgcatcccctgtgcagagctgcgctgttgctgggtcagggagcatggagtgcacagctgaacagaggtgcattagctggtgtttcagggagagggaacaggccgggctgtgctttctgaagagcttcaggggaggggcctctgggtctcccccagccctgaccaccccgggcatggctttgagctgttttcaggagcctagaggagggggcctggatccttgggagttggtggtgggaaaaagaagaggagccctggagactgctctccctgcgggagactaggagcctccatcctgaggctgagccctggagggggggggtcactttgctccagggacagggcagcggtggccgtggccgggtggagaggagacgctgcctaggcccgtgactcctagtgtgcctctgggcttgcttccggaaagccacgacgcctggtcctcttaaaccccacgcctcttgttttgtaaacagatgattttgttgaggataaatgaatacagcttaatacttagaactgttcctcgcatatagtaagtgcagttgaagtgttagattttattttattttgagatggagttttgctcttgttgcccaggctggagtgcaatggcacgatcttggctcaccacagcctccgcctcccgggttcaagtgattctcctgcctcagcctcctgagtagctgagattacaggcatgtgccaccaggcccggctaattttctattttcagtagagatggggtttctccatgttggtcaggctggtctcgaactcaggtgatccgcccacctcagcctaagtgctgggattacagctgtgagccactgtgcttggcctagatgttatttttattgttacttgtcttaaataaagttaatagaaatatataacctgttatattaacatgttaacctgtgtacagtgaaacaagcaacacagtgggaactctaatataaagagacataagaggaaggtaataatattttatgtatcctaatacgttagtaacctagacaatgtagtgaggagtcagatcttgagacctcaggtggaaacaccgtgaaggcagcatctgcaagtgctgaccgagaggggagttttgaaataatgagagggggttgccttcactgacatttttgcaaatagtggacttctgctatgttctgaataaagcaaagtccattttcccttaagtttacacagtagtttcattccaggaaaatttattttatattaaaactgtaaggccaggagcagtggctccccagcactttgggaggccagggcaggtggatcacttgagctcaggagttcgagaccagcctggccaacatggaggaaccctgtctccactaaaaatacaaaaattagccgggcgcctgtgatcccagcttcttgggaggctgaggcgggagaattgcctgaacccgggaggctgagtttgcaatgagccaagatcataccattgtactccagcctgggagtctcactctgtctcaaaaaaaaaaaaaaaaaaaaccaaaaaactataaaagtactttcttatttatatataaagtgggatcatattctaggtttgcatgatcataaacaccttcatgaattgagttgtgtgggatttgggacagtgcgagaatgtcctacgcattgcaggctagctcacgctcttgtcccccaaccacccactgaatgtcactaaggcccccccaaatgttgtggcaaccagaactgtcccatagggggctgtgcagcctcatgagaaccattccagtaaagggttacagctttaagtttggaaaccacccggctggcccagctgcctggcccggtcgccgaggtggaagagccaggatttgaactgagagtttctcattcccctttgttactctttgtacttccctgagctgcctgaaaaagtcggaactggcactgtgttggcagggccactgggaactgtgggggcaggaggctcacgctgggcccaggctgtgtgtgcctgcttctcagtgctgctcactgtgatgggagctggggaggaggccaccgctgagtgggggagggggatggcttggtccccagccgggcagctggccttttttctctcgcctgttcctctttggggattgagcatgggtccggggctagcctggccacgccctcagctctgacacaccttacgcagacagggatgggtttgctgtgcggtgggtccgcttgcttagctttgaaggtgccaccagcttctttatctgggcccaggatagtgtaggtcagaggtcactctccggtaccactggctgattgcggcctgcagtgtgctttggccagcacgctgtgtgtgcgtgtgcatgcttttcagatctgaactattcagcattgttaaaaagtcaggagaaagacgaatattaagtgaaatcagggaacagaatggtatggttaatgcgtgaatattcgtgtagggacaacagagtctgaagcgtccgcagaagacatcactggcaactcctggggagccgggtggctgtgcagctggggagggaatgagattcgtggctcagtgtgccttctgaatattttaccacgtgcatatattaccttttccaaactttaatggtgagatttcacatgtaaattgggatttatttcttgaaaaaatggaaagctttgacaacactgggccacagtttcttctgacaaccattgatgggatctgagctccctgttgacaggggtgtctgcgagcccaccgcaggccccacccctccctcctgtcttccgcttgctgtggccctgtaggcacttgagtggtggcccgtggagtggtctttggattgttaggagaggctggggtggtcaggcgctgggaggaacttagcttagagctcatctgaccctgagagttttctccgtcacatctaaggagcccatagatgggtctcggggcacattgcaccctagagatttttatcaaatattaggagtaagaacacgtcggtgttcccggagagaccactgttagtttttaaaagattttcaaggactttcgacccctagaaacttagagcaggaatgtgagcacaggttgatcttgggtcactcagtcacagatcacatttcgggagcaagaccctgactcctgactccagggccagggctgtatctccgccgccctaattgtgccctgtggctggcaggaataggggacgtgggtccaggcggttctcggtagcttccctcgggagtcagaaggtggtgtgagcccttccgggtggccgtgtagtgggatgaaggtgagcccaggtcactcgggcaggcccctgttgtccccccacaacccttgtccctgagccactcctccccccacagaggctgggaggcggcagaatgcagccagaggagggcacaggctggctgctggagctgctgtccgaggtgcagctgcaacagtacttcctgcggctccgagatgacctcaacgtcacccgcctgtcccactttgagtacgtcaagaatgaggacctggagaagatcggcatgggtcggcctggtaggtgggatgttggcctggcttgtcttgcccctgaccctttccgtcctctgtcctcaggaccactcggtgcacgggtggcagctgagaactctgtcccagagccctgagggagcaggagggacatcagtaggtgctgatgtgtgatgagaacagttggcagttataaaggtgaattggagtttgaggagagtgaggccttccctaaagctggctacacaggagtcactccatgccccgttgtgattgttctcacgtagagtgtatgtcctccattgcccctccttcataagcatcgaattgagtctgttctcatcattctgactaccggggggtccatgtgcagagatctgtagggagaacgctaactctcagatggtttgctgattcgtgctcacgctctctttcttgctctctcacacgcacacacgcatgcacacgcacaggcatacacacacacacacacacacgcaggcacacacgcacatgcgcacacacgtgcacgcacgcatgcacgtgcacacacgcatgcacgtgcgtacgcacgcgctcacacgcctgcgcacacagacacgcacacacacacacacgtgtgtgcgcacacccgcatgcacacgcacggcatacacacatgtacacacacgcgcgcagacgcacacacgtgcgcacacgcgtgtgcacacacacgcacatacacacaggtttgctctgatttgagttcaacccttatcttcatatttttcctaaaagtgggggttgtagcatctaaaagtcatgatgttcttcatagaacattagaaacgtattagggctttcaagttaaaatagctaaataggtaataatgtgtcaagttagacactgacttagttaaaatagctaaataggtaataatgtgtcaagttagacactgacttagttaaaatagctaaataggtaataacgtgtcaagttagacactgacttagttaaaatagctaaataggtagtaatgtgctaagttagacattgatttatgctactttaggcctggatagttggtgtctgatgccagtagcataaaaaaattttacggagggaaaaaaacctcaacattgagaaaattctgttcattaccttgatttttcctgagaactgggagaagcccatcgcttcaagtttttggttaaacaccttcacccagtttgagagccagtgccaggaagtggagtgcagagaccgtcggtcagttgaggctccgggttagttggggttgatttcattgctatcatcgggtgggcggtgtctagtgacaggctcacccccaaggggaccacaggcagcagcctctctcgggctacggcggccttcacagcacgcggttccccgctctccctgcaggccagcggcggctgtgggaggctgtgaagaggaggaaggccttgtgcaaacgcaagtcgtggatgagtaaggtgggtgaggaggtgggtgaggaggtgggaggggggcagcctcgaacgcccccctccgcttctggtcctgggaaccttccccagctccccggcaggtcgaatctcgccgttctgccggcactttgtacaggaccccctcgtccagggtcttatcgggcagggcacttgtagagctgctgggctaagtgtctgtctccgccagatacggacacgtgagcagcctgtgtgcggtgaggccttcacagcccctctcggcacgcctggaacaggacctcattgacaagtgtgccttaacttagccctgctgtgtctgagcgttggggccagtgtccagcgtggggtggtggacctgtctggacccagaacgtctttgcttggcttccctcctccctgaccctctctaatctctgggtttctctggtcatctgtccctgctgacagcttccttccccacagcctgtccccacctctccccacaccttgtcctaatttgggtctgtggtgtagtgagtccctggtctgactcagtggaactttgcccattgtctggaagacaatgagagaggaagtgagccagccgtggtctttcctccccacttctggcttcagggctgggttggggggtgggcagggccgaacagctgcagtgggattgggcagcagagattttcctggctgcaatccggcaaaggggctgtctcttgggatcctttggcttttcctggaaacactgtcctggtcctttgcccgggttttagggaaggatgagtagtgtcgggatggtggaggcaggagaagagagcagcgtggtttgctgagatttaggggtcttggatctgccactggctcctgataggtccctgggcggtcagtggcctccagatttttgttgtgtcttcagtgaaatgataccggtccccactgcccagctcacctcccggggctgcaggaggcaccggagataatggctgtagagggtcttgtaacctgaacattgcttgcaaacataaggaattctagttactgggaggaagcacagggcagaggccagaagaggccctcagatttgaggcaccctagcccagacggataaggatccaccagctctgggggcgtgagacccaagctggcaagaatctgcaatctggagccaaggctgtgggtgcctcagtggaggccgagtcagaccgacgtggccagctttgaccctcatggcctcctttcttctgtcccttgaccttcggctcctccctgtccaccctggcctccgagtctcctccacttttccttccgtctcagccctcagctctaggcgcccctccagagacccagctgtcttcccaggccccttcccagcaaggactagcttcatctgaaccacacacacactcacggttcaacctcagactaaaattatcctctcccctgggcaggatgaagggcagccgactccctggtgagggtggagacagacagcaccaaatggtcaggccagagaaggggccagggctaaaaatggacaaggaggtgtctgtggagggcccctgcggctccatcgatgcgggttagggctggagtctgcggggtggcgggtgcaggaagggagggtggggcaggactgggaggagactccgaccttggctgggcggtgccctccctctccacacagctgggtgtggggccgctcagccacaggctgcatgcctgtcggtctctttctggcaccctccttgaggccagcatcaggctttgggttcatgtttgggggtgtgccctggacggagtgtgggcctccagccaggctgccccactgacagtttggcaaaaccaggacctatctggaagccgaagccggggatcaccaggtggacccagcggggtgggactgagtgactgaccctggggtgttggattccatctggcccccggctgccttcaaacaggtgttcagtggaaagcgactggaggctgagttcccacctcatcactctcagagcaccttccggaagacctcgcccgcccctgggggcccagcaggggaggggcccctgcagagcctcacctgcctcattggggagaaggacctgcgcctcctggagaagctgggtgatggttcctttggcgtggtgcgcaggggcgagtgggacgcgccctcagggaagacggtgagctctctgtgtcctgccagcgcagcagaggcatgggacccggggctggtagtggctcttctgcccccaaccagggtgtggatgggactggggatgcgtcacagtgtggctcatcccagagtccgtgctcaggatttttggggttttatttatttatttatttttgagatggagtctcgctctgtcgcccaggctggagtgcagtaggcacgatctcggcttcctgcaacctccactttccgggttcaagcaatcctcctgcctcagcctcctgagtagctgggattacaggcatgcaccaccacactcagttaatttttgtatttttagtagagacggggtttcaccatgttggccaggctggtctcgaactcctgacctcagatgatctgcccactttagcctcccaaagtgcttggattacaggtgtgagccaccacgtccagcccatgctcaggtttaactaagcacatttattatttcaactataaaaataatttattataaaagtttggaaagtatttgaaaaacaagaaaaaaaaaatcgcctgtaatcccaccactcagaggaagccgagcctcttcctcccactttaggtattttgttggatttagttaagatacaaattctggatacagcttttaaaatcttgttctttcttctcggcgttgcatttaacattttcccctcagggataacgtgtcaccacagcatacagttctggtgtgactgtttcctgtgcagcagccgtgtccttactgctcagatcacgtgcggtgcattcccagcacctcagagggctcctcattctccgtccactcagtgcgtccttctcccggggaagccgctgtcactcagtgcatccttctcccggggaagccgctgtgcagacttccagctccacagctttgtttttggcattacatttacagcattttccttctacagcaaaacaccttttaatattccattttatgaccagcctgagcaatatggagaaaccccatctctactaaaaatacaaaattagccaggcgtggtggcacctgcctgtaatcccagctactcaggaggctgaggcaggagaatcacttgaacccgggaggcagaggttgcagtgagctgagatcacgtcactgcattccagcctgggcgacaagagcgagactgtctcaaaaaaaaaaattccattttataacatttgaatattctctcatcatactggttatctcttactttttggttggtatttaagcccggcattcccccaggaaggggaggtgtggccgacgatggctcctgagggccagccgtctgcccttctccagccaggcctcacgcagagcacgtaagcccaggcactggtgacatgcttacccacccagatgaggagctcacaggcagggatcgttgagccgagttggagggtggagcaggttggctccgcgtgtctgggacctggcaagtcctgagtccttgcaaatcccgctctgggcaggtgagtgtggctgtgaagtgcctgaagcccgatgtcctgagccagccagaagccatggacgacttcatccgggaggtcaatgccatgcactcgctcgaccaccgaaacctcatccgcctctacggggtggtgctcacgccgcccatgaagatggtgagtactgcgggcgggagggggcgggcagggagagggctccggtcccatatgtgtggttcggttcctctctccatcctaaggtcagaggcgccctagatcctactttggtcccccaacctgatggagtaaaggggtccacaggggcccagcctggtacgggctgtgtctgctgcggtccagtccgggtctgtctctggattttgctggtgctcagtgtcaagagagttactcccatgggaggggctggccactgagtttaatttggggaatttatgttttatttatctatttattttgagatggagtctcactttgtcgcccaggctggagtgcaatggcatgatctaggctcactgcaacctcggcctcctgggttcacgcgatattcctgcctcaggcttccaagtagctgggattacagccgtgcgctaccatgcctggctaatttttgtatttttagtagagacggggtttcaccatgttggccaggctggtctcaaactcctgacctcaaatgatccacccacctcggcctcccaaagtgctgggattacaggcgtgagccaccacgtccagctgagttttggaatttctagccactgcctctttgggctccttctctctaggcatcagtttcccaaattgcctcgagggagaggcctgagaaactgcaggactcctagaggtccccagacagcaggccaggaaggtgcgtgcagcctggctctggaaagccttcaggaaggggactgggggcccagcgtgggctgctgagaaggggcagggtcctccagctcattcctcctgcctcctccgtggcctcaggtgacagagctggcacctctgggatcgttgttggaccggctacgtaagcaccagggccacttcctcc

SEQ ID NO: 14545 - DNA, 980 bp, Homo sapiens
gagggggtgtacacgtggggtggattctcgaactcctagagggaaggtgccctgagctcagccctaaatacctggtactaaagagtcagtggctgcttcagatgccaccagaatgagaagcggtgccttggggccccgggggagaggaagagcctctgccctgggacttcctgtgccggcgatggcctcgcgccagtgctgggcgcggcacccccgcgtgggcctgtgttgggcggcttttgagcaggagtccgggccctcgtgtcaccgctctgaagtcaaggagaggctgggaggcggcagaatgcagccagaggagggcacaggctggctgctggagctgctgtccgaggtgcagctgcaacagtacttcctgcggctccgagatgacctcaacgtcacccgcctgtcccactttgagtacgtcaagaatgaggacctggagaagatcggcatgggtcggcctggccagcggcggctgtgggaggctgtgaagaggaggaaggccttgtgcaaacgcaagtcgtggatgagtaaggtgttcagtggaaagcgactggaggctgagttcccacctcatcactctcagagcaccttccggaagacctcgcccgcccctgggggcccagcaggggaggggcccctgcagagcctcacctgcctcattggggagaaggacctgcgcctcctggagaagctgggtgatggttcctttggcgtggtgcgcaggggcgagtgggacgcgccctcagggaagacggtgagtgtggctgtgaagtgcctgaagcccgatgtcctgagccagccagaagccatggacgacttcatccgggaggtcaatgccatgcactcgctcgaccaccgaaacctcatccgcctctacggggtggtgctcacgccgcccatgaagatggtgacagagctggcacctctgggatcgttgttggaccggctacgtaagcaccagggccacttcctcc

SEQ ID NO: 14546 - DNA, 2945 bp, Homo sapiens
gtggtgacctccgtggccggcctgtcggcccaggacatcagccagcccctgcagaacagcttcatccacacagggcatggcgacagtgacccccgccactgctggggcttcccggacaggattgacgagtgagtactgggcggggatggatgctgacctggccccgctcgggactccagggccctcagcacggcacgcgtgggcggaatctgctcttcaccctttcgcccgggcttcagcccccgacccgccactctcccctcctcaccctggccttactctcgggaagctgtggaaccctaggaagcccagcctggtgggggttctccaggggaatgttctccaggggagtgttctccaggggagggttctccaggggagggttctccaggggaatgttctccaggggagggttctccaggggagggttctccaggggagggttctccaggggaatgttctccaggggagggttctccaggggagggttctccggggagcgttctccaggggaatgctgtccctgccattttcaagctttggggggccgatctcctaactctgagacacttcatctgtgaaacaggttcacccccccaataaggggaaggctgtaaatgcactctgaattagcacttgctgctcagatgcaggggtcctgagagaagctttcccactcactgtagatgaaagtagggtcaggagcttctgaggatggactcctgtttggtggaaaggtccccggagccacagctgtaacccctcttggtactcgggccttaggaaaatgaacttgggaggaacccggtgggagctgctgaggaggagagcttctcccatgacccccctgtggccccctgtgaccctgtgaccctgtgacccctgcacacgagcagtggttttccttctcctgctggtggtgccagagtcctggagacgtgaacctgctggctcaggccctggggatgtatgcaggtccacatgggagtgagcctgctttccagaaccagagtgggactggggaccttggggactgcagagggaacgttaggtggcagctccgcctccccaccacacagtactctacggagctcactccatacctgggagaggccctgtctcctatgtaagaggataaggccaccgaggggcatctgggaaggacacgcagaatcagtcacttccgggatgccaccccccaccccccgaagcttcttgcgccaggcctccaagcctctctgctggccgcagggggattccaggcccctggcctctgcagcccttctcctgctgacttctgatactctggtctgccctgagaggcgtggaaagcaggggccttcacccaccgggccccacacaccagaaccccacacagcgggcccccacacaccagaacccacacagcgggcccccacacaccagaaccccacacagcgagtccccccacaccagaacccacacagcgggcccccacacaccagaacccacacagcgggcccacacacactggaaccccaagctcacagggctcagcccatgtgttttgcctaaaaagaacccagcaagggcctgagagttggggtgaaagactgcagacacctccaggagaggctggtgccctctgccccactcctggcatgctgtggccagcccagccccattcctccaggctttaatcagccccagtgactaagtctcagatactgacagttggtgcagggacggagggtggatccggagcaggacaggtggcccagcctctcccgcacctcctggccatgtggcagaagggtgcctcctgcccaccctggctgggcaccatagctgggatgccccgttcttaggccctccatcgtggcctgcgggacaggagtgtctgccctctggccgctgcctggtgtgggctgggggcctggggggttgtggaggaccacctctgcccttgtagggtgtagttggagtccctgaggtcctaggctttccatcctggggtcaggtgtcctttctctgccttctctccaggacaccccccagctgagacgtgcggtcaggttctgtggactgggaggcgggaggcctgtgcttcagacccaagactacacccggtttcctccaggacgaaggggctctgatgagattctgccacccctccacacgcttcccctgctctcttgacccagctctctcccccacagactgtatctgggaaaccccatggacccccccgacctcctgagcgtggaactgagcacctcccggcccccccagcatctaggaggggtgaaaagtaagagcccctctgctccctggtgtccctaactcatcggctactcaggaaggggcactgtcttcacaggccaccctaaggctgctgttctgtttttggggacagtggggtcagggcagcaggcgggacagctgtgtccctggctccggctgggcgtggggtggaagacaggcagctgtatccgccgaggtgggcctcctcgggctgggtctgcagcaggcccgtccgccccggcgtccctcctccctccttccacggccgagctcagatcctggctttcctcacttccccctaatcctgctctcctgtcccaagccaaaaccaccccacggctccggctctgcctggggcctcctccatctcccggtcctctgcctatcatactggaccgccgtgttcctcatcctgccgcctgcggcctcccgtttgctgggggcttgtacattcactcgcccccattcacttctctcccttcgtctctctacactctgccctctcgtccggccgtctccctcctttgtcctctgtcctgctccgtctctctccccctgtccgcatggcctttcttgcaggggagcctccacctcgcccacctcagcctgccttcttcactcagagtaagtggggctgcttccgatgccttggcccccgcccc

SEQ ID NO: 14547 - DNA, 1048 bp, Homo sapiens
gtggtgacctccgtggccggcctgtcggcccaggacatcagccagcccctgcagaacagcttcatccacacagggcatggcgacagtgacccccgccactgctggggcttcccggacaggattgacgagacaccccccagctgagacgtgcggtcaggttctgtggactgggaggcgggaggcctgtgcttcagacccaagactacacccggtttcctccaggacgaaggggctctgatgagattctgccacccctccacacgcttcccctgctctcttgacccagctctctcccccacagactgtatctgggaaaccccatggacccccccgacctcctgagcgtggaactgagcacctcccggcccccccagcatctaggaggggtgaaaagtaagagcccctctgctccctggtgtccctaactcatcggctactcaggaaggggcactgtcttcacaggccaccctaaggctgctgttctgtttttggggacagtggggtcagggcagcaggcgggacagctgtgtccctggctccggctgggcgtggggtggaagacaggcagctgtatccgccgaggtgggcctcctcgggctgggtctgcagcaggcccgtccgccccggcgtccctcctccctccttccacggccgagctcagatcctggctttcctcacttccccctaatcctgctctcctgtcccaagccaaaaccaccccacggctccggctctgcctggggcctcctccatctcccggtcctctgcctatcatactggaccgccgtgttcctcatcctgccgcctgcggcctcccgtttgctgggggcttgtacattcactcgcccccattcacttctctcccttcgtctctctacactctgccctctcgtccggccgtctccctcctttgtcctctgtcctgctccgtctctctccccctgtccgcatggcctttcttgcaggggagcctccacctcgcccacctcagcctgccttcttcactcagagtaagtggggctgcttccgatgccttggcccccgcccc

SEQ ID NO: 14548 - DNA, 11423 bp, Homo sapiens
gctgttttcctgggcgaggagaaagggggccgggccgggccgggcgcggtggctcacgcctgtcatctcagcactttgggaggccgaggcgggcagatcacctgagacgaggacgctgaggtcaggaattcgggaccagcctggccaacatggcggaaaaaaaaaaaatagctgggcacggtggcgggggcctgtaatcccagctactcgggaggctgaggcaggagaatcacttgaacccgggatcgcgccactgcactcaagcctgggcgatagagcaagactctcaaaaaaaaaaagggggtgggggttccaggagccggcctggcgctgacccacacatactttgcttcttcccgcagctggattactgggccagttacaggtcttgttcttactggacatccaaggtcaggcatggggttctggtgactttgagacacatatttctggggacgctagagtttttaatctggccattctgatccagcagacccattttgaaatagagggaataaccctgcttaaattgttccccggcccccggtccctgggtctccttccaggtgtgcttggtgccagggtaaggctgtaggcttctctgatgcaagggcacagtcagccaaggtttggggaaaagtcagctccagtgtaacgcaggcctgatcttgtccacctgacctcagcccccactccatccacacctgccatctccacaagctttgtgggctggatggcagggggatgaggaagagggactgaagttgggggtgtccttctccccacctcctggagttagaccaggaaatggctgtcccttttggcatcatcagggaggtcaagtgctgggagaggccctgggaagggagcctgggatgctgagtccccaaagccctgctccccagctgcccacccctccagccagctgaggctccctgagctggtggccagctggacagggacaagagagcagtgtgcaagaaacaggggctccctaggcatggctcagcagggaggggggtgcctggggagctggagagggcttcctgcagctgtcaggtgtgtctgggggccgtagcgaggggggtgtaagagcagctggcaccctttgaggagggccagagagatcatttgtcagttctagaaacatgagggccccacgggggcttgatggagtgtctctaggccccttaatctgaggccgtggtctgtgtcaggggttatacaggagacatcctacagctttggggtgggggcgtcccagcaggagtctcagggcatatttgtttgttttgagcgggtttgggaacttggccacctggtctgagtaggaggcaccctgggtgtttgggcagcagacagggccaccccaggggagggggtgaggatcctcaccccaccctacccttgctcttggctggactgccccactctggcaggctgccggccgcctatttccgtcgggcaccagggtaacagggccacatcagggtctgagccaggagacacccagccaaggctgggactcgggggtgggggagggtctctgaggagtcatcgcagggcccagcggagcctctggggtccaagcctcccactcaggctgtgtgttagtccccacgtccccacacaggtccatgagggagtccacagccctgcttcatacgtgctgtttgagtcacatagccgccaccctaaagtcccaggagttgtctgcaactgtgagggctggggtagaagccagagacaggagctttgtgtatggggaggcaggggggccagcgcgggtggctgggaggaagagtcccccccattcctgccgccctcttggcagtgattcagaaaggtcctttttcagccagtgtcagagctgctcagctggggagggagggagagagggagagagagaggcaggcaagagggagggcggccgggcgggcagttgggtggggaagccggggagtagggctggactgtgaccactgccctggagagaagacagaaacaggacagaggatcccggctgcagccagcgtgaggaaagctctgctccctgccagaccggccagctgtggaaacccagcggggcttgcagcagagcggaggggcccaccccgttcttcctcatttcccacccctggtgtgggatttggggggctcctgggcagagtgcgaagctccggagccgaggccactggatccccagtgactgctcgggggggtcccgctgcgtggagatgccggcagcacgtcggttccctggcctggagctctccttccctctcctggccagactgcggcgacgcctgtacacagtgagtggggggcaggggctggactgctggggactggttgggctcctcagcaccagcacttgactgagaggcagaaagcaagactgggagcggctgagggaccccgccagtgagggcttgacggggagtccgggccaagtggcctctcctgcggctgctgcattccttcttcttggcctgtgtgtttgcacgccggccacagagtagtgacggacacaggtgtgcagactccatgaggtgcgggggccaggaccatgcagaattggagagtgtttgaactctggaggagctgcagccatgccctgtgctgcacaaagaaccttgggctggagggggacttagaggggaggcggacccctgcggagtcaccctggactgagaccctgaccgcttgcctcaccagcatcccggagttccttcccgtcctcccacatgcatcccctgtgcagagctgcgctgttgctgggtcagggagcatggagtgcacagctgaacagaggtgcattagctggtgtttcagggagagggaacaggccgggctgtgctttctgaagagcttcaggggaggggcctctgggtctcccccagccctgaccaccccgggcatggctttgagctgttttcaggagcctagaggagggggcctggatccttgggagttggtggtgggaaaaagaagaggagccctggagactgctctccctgcgggagactaggagcctccatcctgaggctgagccctggagggggggggtcactttgctccagggacagggcagcggtggccgtggccgggtggagaggagacgctgcctaggcccgtgactcctagtgtgcctctgggcttgcttccggaaagccacgacgcctggtcctcttaaaccccacgcctcttgttttgtaaacagatgattttgttgaggataaatgaatacagcttaatacttagaactgttcctcgcatatagtaagtgcagttgaagtgttagattttattttattttgagatggagttttgctcttgttgcccaggctggagtgcaatggcacgatcttggctcaccacagcctccgcctcccgggttcaagtgattctcctgcctcagcctcctgagtagctgagattacaggcatgtgccaccaggcccggctaattttctattttcagtagagatggggtttctccatgttggtcaggctggtctcgaactcaggtgatccgcccacctcagcctaagtgctgggattacagctgtgagccactgtgcttggcctagatgttatttttattgttacttgtcttaaataaagttaatagaaatatataacctgttatattaacatgttaacctgtgtacagtgaaacaagcaacacagtgggaactctaatataaagagacataagaggaaggtaataatattttatgtatcctaatacgttagtaacctagacaatgtagtgaggagtcagatcttgagacctcaggtggaaacaccgtgaaggcagcatctgcaagtgctgaccgagaggggagttttgaaataatgagagggggttgccttcactgacatttttgcaaatagtggacttctgctatgttctgaataaagcaaagtccattttcccttaagtttacacagtagtttcattccaggaaaatttattttatattaaaactgtaaggccaggagcagtggctccccagcactttgggaggccagggcaggtggatcacttgagctcaggagttcgagaccagcctggccaacatggaggaaccctgtctccactaaaaatacaaaaattagccgggcgcctgtgatcccagcttcttgggaggctgaggcgggagaattgcctgaacccgggaggctgagtttgcaatgagccaagatcataccattgtactccagcctgggagtctcactctgtctcaaaaaaaaaaaaaaaaaaaaccaaaaaactataaaagtactttcttatttatatataaagtgggatcatattctaggtttgcatgatcataaacaccttcatgaattgagttgtgtgggatttgggacagtgcgagaatgtcctacgcattgcaggctagctcacgctcttgtcccccaaccacccactgaatgtcactaaggcccccccaaatgttgtggcaaccagaactgtcccatagggggctgtgcagcctcatgagaaccattccagtaaagggttacagctttaagtttggaaaccacccggctggcccagctgcctggcccggtcgccgaggtggaagagccaggatttgaactgagagtttctcattcccctttgttactctttgtacttccctgagctgcctgaaaaagtcggaactggcactgtgttggcagggccactgggaactgtgggggcaggaggctcacgctgggcccaggctgtgtgtgcctgcttctcagtgctgctcactgtgatgggagctggggaggaggccaccgctgagtgggggagggggatggcttggtccccagccgggcagctggccttttttctctcgcctgttcctctttggggattgagcatgggtccggggctagcctggccacgccctcagctctgacacaccttacgcagacagggatgggtttgctgtgcggtgggtccgcttgcttagctttgaaggtgccaccagcttctttatctgggcccaggatagtgtaggtcagaggtcactctccggtaccactggctgattgcggcctgcagtgtgctttggccagcacgctgtgtgtgcgtgtgcatgcttttcagatctgaactattcagcattgttaaaaagtcaggagaaagacgaatattaagtgaaatcagggaacagaatggtatggttaatgcgtgaatattcgtgtagggacaacagagtctgaagcgtccgcagaagacatcactggcaactcctggggagccgggtggctgtgcagctggggagggaatgagattcgtggctcagtgtgccttctgaatattttaccacgtgcatatattaccttttccaaactttaatggtgagatttcacatgtaaattgggatttatttcttgaaaaaatggaaagctttgacaacactgggccacagtttcttctgacaaccattgatgggatctgagctccctgttgacaggggtgtctgcgagcccaccgcaggccccacccctccctcctgtcttccgcttgctgtggccctgtaggcacttgagtggtggcccgtggagtggtctttggattgttaggagaggctggggtggtcaggcgctgggaggaacttagcttagagctcatctgaccctgagagttttctccgtcacatctaaggagcccatagatgggtctcggggcacattgcaccctagagatttttatcaaatattaggagtaagaacacgtcggtgttcccggagagaccactgttagtttttaaaagattttcaaggactttcgacccctagaaacttagagcaggaatgtgagcacaggttgatcttgggtcactcagtcacagatcacatttcgggagcaagaccctgactcctgactccagggccagggctgtatctccgccgccctaattgtgccctgtggctggcaggaataggggacgtgggtccaggcggttctcggtagcttccctcgggagtcagaaggtggtgtgagcccttccgggtggccgtgtagtgggatgaaggtgagcccaggtcactcgggcaggcccctgttgtccccccacaacccttgtccctgagccactcctccccccacagaggctgggaggcggcagaatgcagccagaggagggcacaggctggctgctggagctgctgtccgaggtgcagctgcaacagtacttcctgcggctccgagatgacctcaacgtcacccgcctgtcccactttgagtacgtcaagaatgaggacctggagaagatcggcatgggtcggcctggtaggtgggatgttggcctggcttgtcttgcccctgaccctttccgtcctctgtcctcaggaccactcggtgcacgggtggcagctgagaactctgtcccagagccctgagggagcaggagggacatcagtaggtgctgatgtgtgatgagaacagttggcagttataaaggtgaattggagtttgaggagagtgaggccttccctaaagctggctacacaggagtcactccatgccccgttgtgattgttctcacgtagagtgtatgtcctccattgcccctccttcataagcatcgaattgagtctgttctcatcattctgactaccggggggtccatgtgcagagatctgtagggagaacgctaactctcagatggtttgctgattcgtgctcacgctctctttcttgctctctcacacgcacacacgcatgcacacgcacaggcatacacacacacacacacacacgcaggcacacacgcacatgcgcacacacgtgcacgcacgcatgcacgtgcacacacgcatgcacgtgcgtacgcacgcgctcacacgcctgcgcacacagacacgcacacacacacacacgtgtgtgcgcacacccgcatgcacacgcacggcatacacacatgtacacacacgcgcgcagacgcacacacgtgcgcacacgcgtgtgcacacacacgcacatacacacaggtttgctctgatttgagttcaacccttatcttcatatttttcctaaaagtgggggttgtagcatctaaaagtcatgatgttcttcatagaacattagaaacgtattagggctttcaagttaaaatagctaaataggtaataatgtgtcaagttagacactgacttagttaaaatagctaaataggtaataatgtgtcaagttagacactgacttagttaaaatagctaaataggtaataacgtgtcaagttagacactgacttagttaaaatagctaaataggtagtaatgtgctaagttagacattgatttatgctactttaggcctggatagttggtgtctgatgccagtagcataaaaaaattttacggagggaaaaaaacctcaacattgagaaaattctgttcattaccttgatttttcctgagaactgggagaagcccatcgcttcaagtttttggttaaacaccttcacccagtttgagagccagtgccaggaagtggagtgcagagaccgtcggtcagttgaggctccgggttagttggggttgatttcattgctatcatcgggtgggcggtgtctagtgacaggctcacccccaaggggaccacaggcagcagcctctctcgggctacggcggccttcacagcacgcggttccccgctctccctgcaggccagcggcggctgtgggaggctgtgaagaggaggaaggccttgtgcaaacgcaagtcgtggatgagtaaggtgggtgaggaggtgggtgaggaggtgggaggggggcagcctcgaacgcccccctccgcttctggtcctgggaaccttccccagctccccggcaggtcgaatctcgccgttctgccggcactttgtacaggaccccctcgtccagggtcttatcgggcagggcacttgtagagctgctgggctaagtgtctgtctccgccagatacggacacgtgagcagcctgtgtgcggtgaggccttcacagcccctctcggcacgcctggaacaggacctcattgacaagtgtgccttaacttagccctgctgtgtctgagcgttggggccagtgtccagcgtggggtggtggacctgtctggacccagaacgtctttgcttggcttccctcctccctgaccctctctaatctctgggtttctctggtcatctgtccctgctgacagcttccttccccacagcctgtccccacctctccccacaccttgtcctaatttgggtctgtggtgtagtgagtccctggtctgactcagtggaactttgcccattgtctggaagacaatgagagaggaagtgagccagccgtggtctttcctccccacttctggcttcagggctgggttggggggtgggcagggccgaacagctgcagtgggattgggcagcagagattttcctggctgcaatccggcaaaggggctgtctcttgggatcctttggcttttcctggaaacactgtcctggtcctttgcccgggttttagggaaggatgagtagtgtcgggatggtggaggcaggagaagagagcagcgtggtttgctgagatttaggggtcttggatctgccactggctcctgataggtccctgggcggtcagtggcctccagatttttgttgtgtcttcagtgaaatgataccggtccccactgcccagctcacctcccggggctgcaggaggcaccggagataatggctgtagagggtcttgtaacctgaacattgcttgcaaacataaggaattctagttactgggaggaagcacagggcagaggccagaagaggccctcagatttgaggcaccctagcccagacggataaggatccaccagctctgggggcgtgagacccaagctggcaagaatctgcaatctggagccaaggctgtgggtgcctcagtggaggccgagtcagaccgacgtggccagctttgaccctcatggcctcctttcttctgtcccttgaccttcggctcctccctgtccaccctggcctccgagtctcctccacttttccttccgtctcagccctcagctctaggcgcccctccagagacccagctgtcttcccaggccccttcccagcaaggactagcttcatctgaaccacacacacactcacggttcaacctcagactaaaattatcctctcccctgggcaggatgaagggcagccgactccctggtgagggtggagacagacagcaccaaatggtcaggccagagaaggggccagggctaaaaatggacaaggaggtgtctgtggagggcccctgcggctccatcgatgcgggttagggctggagtctgcggggtggcgggtgcaggaagggagggtggggcaggactgggaggagactccgaccttggctgggcggtgccctccctctccacacagctgggtgtggggccgctcagccacaggctgcatgcctgtcggtctctttctggcaccctccttgaggccagcatcaggctttgggttcatgtttgggggtgtgccctggacggagtgtgggcctccagccaggctgccccactgacagtttggcaaaaccaggacctatctggaagccgaagccggggatcaccaggtggacccagcggggtgggactgagtgactgaccctggggtgttggattccatctggcccccggctgccttcaaacaggtgttcagtggaaagcgactggaggctgagttcccacctcatcactctcagagcaccttccggaagacctcgcccgcccctgggggcccagcaggggaggggcccctgcagagcctcacctgcctcattggggagaaggacctgcgcctcctggagaagctgggtgatggttcctttggcgtggtgcgcaggggcgagtgggacgcgccctcagggaagacggtgagctctctgtgtcctgccagcgcagcagaggcatgggacccggggctggtagtggctcttctgcccccaaccagggtgtggatgggactggggatgcgtcacagtgtggctcatcccagagtccgtgctcaggatttttggggttttatttatttatttatttttgagatggagtctcgctctgtcgcccaggctggagtgcagtaggcacgatctcggcttcctgcaacctccactttccgggttcaagcaatcctcctgcctcagcctcctgagtagctgggattacaggcatgcaccaccacactcagttaatttttgtatttttagtagagacggggtttcaccatgttggccaggctggtctcgaactcctgacctcagatgatctgcccactttagcctcccaaagtgcttggattacaggtgtgagccaccacgtccagcccatgctcaggtttaactaagcacatttattatttcaactataaaaataatttattataaaagtttggaaagtatttgaaaaacaagaaaaaaaaaatcgcctgtaatcccaccactcagaggaagccgagcctcttcctcccactttaggtattttgttggatttagttaagatacaaattctggatacagcttttaaaatcttgttctttcttctcggcgttgcatttaacattttcccctcagggataacgtgtcaccacagcatacagttctggtgtgactgtttcctgtgcagcagccgtgtccttactgctcagatcacgtgcggtgcattcccagcacctcagagggctcctcattctccgtccactcagtgcgtccttctcccggggaagccgctgtcactcagtgcatccttctcccggggaagccgctgtgcagacttccagctccacagctttgtttttggcattacatttacagcattttccttctacagcaaaacaccttttaatattccattttatgaccagcctgagcaatatggagaaaccccatctctactaaaaatacaaaattagccaggcgtggtggcacctgcctgtaatcccagctactcaggaggctgaggcaggagaatcacttgaacccgggaggcagaggttgcagtgagctgagatcacgtcactgcattccagcctgggcgacaagagcgagactgtctcaaaaaaaaaaattccattttataacatttgaatattctctcatcatactggttatctcttactttttggttggtatttaagcccggcattcccccaggaaggggaggtgtggccgacgatggctcctgagggccagccgtctgcccttctccagccaggcctcacgcagagcacgtaagcccaggcactggtgacatgcttacccacccagatgaggagctcacaggcagggatcgttgagccgagttggagggtggagcaggttggctccgcgtgtctgggacctggcaagtcctgagtccttgcaaatcccgctctgggcaggtgagtg

SEQ ID NO: 14549 - DNA, 601 bp, Homo sapiens
gctgttttcctgggcgaggagaaagggggccgggccgggccgggcgcggtggctcacgcctgtcatctcagcactttgggaggccgaggcgggcagatcacctgagacgaggacgctgagaggctgggaggcggcagaatgcagccagaggagggcacaggctggctgctggagctgctgtccgaggtgcagctgcaacagtacttcctgcggctccgagatgacctcaacgtcacccgcctgtcccactttgagtacgtcaagaatgaggacctggagaagatcggcatgggtcggcctggccagcggcggctgtgggaggctgtgaagaggaggaaggccttgtgcaaacgcaagtcgtggatgagtaaggtgttcagtggaaagcgactggaggctgagttcccacctcatcactctcagagcaccttccggaagacctcgcccgcccctgggggcccagcaggggaggggcccctgcagagcctcacctgcctcattggggagaaggacctgcgcctcctggagaagctgggtgatggttcctttggcgtggtgcgcaggggcgagtgggacgcgccctcagggaagacggtgagtg

SEQ ID NO: 14550 - DNA, 13406 bp, Homo sapiens
gtgccccgccccgcccttccgtcgaaggcccccgttggccccagccgctggttccctgtggctgctgctggtggggctctgggggctccttccccctgggccaccagccctggcttggaaccacagcacctgccctccgtgcctggagctgctcaggaggtgggaggtgaggggcaggaggccacaacagccggtgaggcttgggagcgggcctgggtgtcggtggtggcagagcttgactctgcccccttgtttcttcagtccctgaatatctccatgtttgtttggctgcctccgtctccatgtctccaggcggatggctctgtgtgagtctttgggcctgggtgtgcatctgtgggtctgtgtttggagttccctcctagcctggccttctcttcgccgtggcttcccacttgcgaagctgtgtccagtatttgtttcctggtgcggagtctgggaggccacctgccgcagctctgactgagtctaggctcagtccttctcagggtaccaggctgtgggcagaggggagacacctagatgtttcgtgctgtgtctagatttggagacacaaatgatgactggtctttcccaggggctcgtttggaggaaggggtggctggcagcacttttgttccgcatacagagcgggtgttggaatccattgcgggtccttggcctggtctggccctggagcctcggcttcctgtggtgggtgggagccaggcatccgggttatccctccaggcctgggcgcctgggacccctagggagaagagcgggcgggcgttttgaacagaatgtccggcattagttgagccatttctggactaccttcggcccggacgggaacgtggtgctgagatttccagagctggggcagccttaggcagttctcagcaccggcctctgttttccatcttgtctaccccagagatgttgaccagaggcccgggggcagcaggaggtagaaggttcatgcggaggtgttgggcccttttcctgctcccccaggaagtcctcatccgcccctgcttcagtcacggccgggtagcagccctggccctcccatggccacggggactccggcctgttcatggcgggagagagagggcgcggacagggcgggcctggaaggaagggctggcctcagtcccctctggactgctggtgcctcggccacactgagcctcacacgggtgcgtgtgggctgcgagaagtgacacggtcctcttggaagtcccactggagccttgggatgaagctgccttggagtgtgcgtgggcgccatcccgagggggagcttcctgtgcctccgagcgtgcgtgggcgccatcccgagggggagcttcttgtgcctcggagcgtgcgtgggcgccatcccgagggggagtttcttgtgcctcggagcgtgcgtgggcgccatcccgagggggagtttcttgtgcctcggagcgtgcgtgggcgccatcccgaggggagcttcgtgtgcctcggagcgtgcgtgggcgccatcccgaggggagcttcctgtgcctcggagcgtgcgtgggcgccatcccgagggggagtttcttgtgcctcggagcgtgcgtgggcgccatcccgaggggagcttcttgtgcctcggagtgtgcgtgggcgccatcccgaggggagcttcttgtgcctcggagtgtgcgtgggcgccatcccgagggggagcttcctgtgcctccgagcgtgcgtgggcgccatcccgagggggagtttcttgtgcctcggagcgtgcgtgggcgccatcccgaggggagcttcttgtgcctcggagtgtgcgtgggcgccatcccgaggggagcttcttgtgcctcggagcgtgcgtgggcgccatcccgagggggagtttcttgtgcctcggagcgtgcgtgggcgccatcccgaggggagcttcttgtgcctcggagtgtgcgtgggcgccatcccgaggggagcttcctgtgcctcggagcgtgcgtgggcgccatcccgaggggagcttcctgtgcctcggagcgtgcgtgggcgccatcccgagggagagtttcttgtgcctcggagcgtgcgtgggcgccatcccgaggggagcttcttgtgcctcggagtgtgcgtgggcgccatcccgaggggagcttcttgtgcctcggagtgtgcgtgggcgccatcccgagggggagcttcttgtgcctcggagcgtgcgtgggcgccatcccgagggggagtttcttgtgcctcggagtgtgcgtgggcgccatcccgaggggagcttcttgcacacgtcctccgcactcttactctccttcccccaggagcaagcatgttttctcgagtggtgtcaggactcccagcagccatgggggctcttgcctcggccatacctgcactaagggaggtgggcttgatgtctcctttccctctcagaagtgggtcccaaaggaggcttctgtgcctggagctgggcagtgttggcggaagggagaggccagacggagtgacctgccttgggcacgagtcacgctgctctgagcaaggtctcggcctcagcggcattctcacccagttactgagcgcctctgaagaggtgtggagagcagagtccggcgtctggcccgcggcagccaccggggagcccgtgggtgtagcgggagagccgcagcccagccggtgccggggttcctcctctacgggccgccgtgggaggctgtgtgcgtgctggggagccggggctctgctccttcgagtggccctgctatttttcagatgggactcgtctcgtctcggggtactgtcctctctccttccttccctccctgcaggcagggtgggaatcacagggtggctgtgtgtggtggggccaggccagtggccctgtgtatgaggaggctgggcagggggagcacagccccgtctccccgcgccccgcgccccccgcctccccgccgaccgtggtgctctcgggtttgactttggtctctgggatgggctgttccggagtcaccccgctccagccaggcctcgtcaccttacaaggctgtgggtctgggtgcccaggcgtcgccacctcctccgtcctctctccccggcctggctgggtttcagaggagcccttcttcacgctttggccctgggacaggagaagtgggggttggtggggagggcgtgcagtgtggtgccacacgtgtccaccctagcagctctgggctgtcaccgcccccgcgtgcccagactctgcccacggggctgtcaccgcccccgcctgcccagacactgcccacggggctctcaccgcccccgcctgcccagacactgcccacggggctctcaccgcccccgcctgcccagactctgctcacggcatcacgtatgacaagtccagcagcagacgcgggagcctcacaacctgtgagagccttcgggagtcaggagtgtcttgcgggagccctgtgcttcctggcctgcctgcccctgcccctgcccctgcccctgcccaggccccggcttaggccacatcagcagaggtttcgtgtctgaggtcagagggggactggcagccctactgtctggtcactgtgggagagctgagttcccttttggacacaggtagagcccctcctgaggagacggggaggctcccgcaggccttccgggaggtggtggaaagctccggaagcaggtgaagcggtggagggagggactgagttgcccgagtgctcctagactctcccgcgtctgcattcgggaggcaggttgtagctggaggcctggcccccagcctagtgcaaggccctaggtgtcccccggcacccccgcacctctcagaactcctggaacccagccgaggagtgaaatcaagtggccagaagaggactggggccccggccttgccagggaactgaggggtgaggaggaggtgtgggcggggcgctggccccacagacctgaaagctggcgttgggtcccaggtctgctgggatctttctggtaaccgtggacaggtcatgttgcctgctgcagcagcttccagcgtgcctccttatttgcaaaccatagggaaagctgcctgacccacctagagagttgtgggtaaggccgtgtgcaaacaggcctgtacggggcatggtgggtcacgggggctgttggggaggagggccggtggcacacagcctggtcctgaggcctgagctccatcccccttctgccacagtggccagggtgtgaggagggtcccagtgccggggctgccccgccacgcctggcgttcaccgtgccatctctgtcgcgcagggccgagaactactggtggcgtggccagaacacacggacgctgtgtgtggggcccttccctcgcaacgtggtgacctccgtggccggcctgtcggcccaggacatcagccagcccctgcagaacagcttcatccacacagggcatggcgacagtgacccccgccactgctggggcttcccggacaggattgacgagtgagtactgggcggggatggatgctgacctggccccgctcgggactccagggccctcagcacggcacgcgtgggcggaatctgctcttcaccctttcgcccgggcttcagcccccgacccgccactctcccctcctcaccctggccttactctcgggaagctgtggaaccctaggaagcccagcctggtgggggttctccaggggaatgttctccaggggagtgttctccaggggagggttctccaggggagggttctccaggggaatgttctccaggggagggttctccaggggagggttctccaggggagggttctccaggggaatgttctccaggggagggttctccaggggagggttctccggggagcgttctccaggggaatgctgtccctgccattttcaagctttggggggccgatctcctaactctgagacacttcatctgtgaaacaggttcacccccccaataaggggaaggctgtaaatgcactctgaattagcacttgctgctcagatgcaggggtcctgagagaagctttcccactcactgtagatgaaagtagggtcaggagcttctgaggatggactcctgtttggtggaaaggtccccggagccacagctgtaacccctcttggtactcgggccttaggaaaatgaacttgggaggaacccggtgggagctgctgaggaggagagcttctcccatgacccccctgtggccccctgtgaccctgtgaccctgtgacccctgcacacgagcagtggttttccttctcctgctggtggtgccagagtcctggagacgtgaacctgctggctcaggccctggggatgtatgcaggtccacatgggagtgagcctgctttccagaaccagagtgggactggggaccttggggactgcagagggaacgttaggtggcagctccgcctccccaccacacagtactctacggagctcactccatacctgggagaggccctgtctcctatgtaagaggataaggccaccgaggggcatctgggaaggacacgcagaatcagtcacttccgggatgccaccccccaccccccgaagcttcttgcgccaggcctccaagcctctctgctggccgcagggggattccaggcccctggcctctgcagcccttctcctgctgacttctgatactctggtctgccctgagaggcgtggaaagcaggggccttcacccaccgggccccacacaccagaaccccacacagcgggcccccacacaccagaacccacacagcgggcccccacacaccagaaccccacacagcgagtccccccacaccagaacccacacagcgggcccccacacaccagaacccacacagcgggcccacacacactggaaccccaagctcacagggctcagcccatgtgttttgcctaaaaagaacccagcaagggcctgagagttggggtgaaagactgcagacacctccaggagaggctggtgccctctgccccactcctggcatgctgtggccagcccagccccattcctccaggctttaatcagccccagtgactaagtctcagatactgacagttggtgcagggacggagggtggatccggagcaggacaggtggcccagcctctcccgcacctcctggccatgtggcagaagggtgcctcctgcccaccctggctgggcaccatagctgggatgccccgttcttaggccctccatcgtggcctgcgggacaggagtgtctgccctctggccgctgcctggtgtgggctgggggcctggggggttgtggaggaccacctctgcccttgtagggtgtagttggagtccctgaggtcctaggctttccatcctggggtcaggtgtcctttctctgccttctctccaggacaccccccagctgagacgtgcggtcaggttctgtggactgggaggcgggaggcctgtgcttcagacccaagactacacccggtttcctccaggacgaaggggctctgatgagattctgccacccctccacacgcttcccctgctctcttgacccagctctctcccccacagactgtatctgggaaaccccatggacccccccgacctcctgagcgtggaactgagcacctcccggcccccccagcatctaggaggggtgaaaagtaagagcccctctgctccctggtgtccctaactcatcggctactcaggaaggggcactgtcttcacaggccaccctaaggctgctgttctgtttttggggacagtggggtcagggcagcaggcgggacagctgtgtccctggctccggctgggcgtggggtggaagacaggcagctgtatccgccgaggtgggcctcctcgggctgggtctgcagcaggcccgtccgccccggcgtccctcctccctccttccacggccgagctcagatcctggctttcctcacttccccctaatcctgctctcctgtcccaagccaaaaccaccccacggctccggctctgcctggggcctcctccatctcccggtcctctgcctatcatactggaccgccgtgttcctcatcctgccgcctgcggcctcccgtttgctgggggcttgtacattcactcgcccccattcacttctctcccttcgtctctctacactctgccctctcgtccggccgtctccctcctttgtcctctgtcctgctccgtctctctccccctgtccgcatggcctttcttgcaggggagcctccacctcgcccacctcagcctgccttcttcactcagagtaagtggggctgcttccgatgccttggcccccgcccccgccccctctctctcactcctctcctggaaggtacagagcctgggcggctgggccggaggggaggtgggtgggtgtgtgctgtgagcttccgcggctgccctggcctagcatgcctgccccccctcgagcccgccccccggagcctgggcttctgctcacgagtgtggccctggcttccgcctcggcctcactccctcccagacctgtctgagcttctggagcacgagtgtggccctggcttctgccttggcctcgctgcctcccagacctgcaggcgctgtctgggctttgtggccgttggtcaggagtactgtcctctccaaggatagtccttatagcccctgatggcaggaggcggctccgtgcctgcactaatggtgtgccgtgacaggggcggggatgagggctcactaactcgccagggcgcaggagcagggccgccggggtcttgtgctggtggaggcagcgtcaggcaggagccagtgttgcttgctgcagcttagacggagcgaggcggggctcaccggcccacatggggctgccgggcagagcaggttccgccctcctgatggagtggtcggaggtgcgctgagaacctggccgccggtggctgacctcagacctcggggggagttgggagtggagggttgctgggggacacttggctttctctcccacgtgccacctcccctcgtgtcccagaccctgcctgactgccttcctgttgggctctccctttccatcacagaaccaacctatgaccctgtgagcgaggaccaagaccccttgtccagcgacttcaagaggctgggcctgcggaagccaggcctgccccgagggctgtggctggcgaagccctcggcgcgggtgccgggcaccaaggccagccgaggcagcggggctgaggtcacgctcatcgacttcggtgaggagcccgtggtcccggccctacggccctgcgcgccctccctggcgcagctggccatggacgcctgctccctgctggacgagaccccgcctcagagccccacgcgggcactgccccggcccctgcaccccacgcctgtggtggactgggacgcacgcccgctgccccccccgcccgcctatgacgacgtggcccaggatgaggatgactttgagatctgctccatcaacagcaccctcgtgggcgcgggggtccctgccgggcccagccagggccagaccaactacgcctttgtgcctgagcaggcgcggccgccccctcccctggaggacaacctgttcctcccgccccagggtgggggcaagccgcccagctccgcacagaccgcagagatcttccaggcgctacagcaggagtgcatgaggcaactgcaggctccggccggctccccggccccctctcccagcccggggggtgacgacaagccccaggtgcctcctcgggtacccatcccccctcggcccacgcgcccacacgtccagctgtctccagcccccccgggcgaggaggagaccagccagtggcctggacctgcttcccctccccgggtgcctccgcgggagcccctgtcccctcaaggctcgaggacacccagccccctggtaccacctggcagctccccgctgccaccccggctctcaagctcacctgggaagaccatgcccaccacccagagctttgcctcagaccccaagtacgccaccccccaggtgatccaggcccctggcccgcgggctggtccctgcatcctgcccatcgtccgggatggcaagaaggtcagcagcacccactattacttgctgcccgagcgaccatcctacctggagcgctaccagcgcttcctgcgtgaggcccagagccccgaggagcctacccccctgcctgtgcctctgctgctgcccccacccagcaccccagcccccgccgcccccacggccaccgtgcggccgatgccccaggctgccttggaccccaaggccaacttctccaccaacaacagcaacccaggggcccggccaccacccccgagggccactgctcggctgccacagaggggctgccctggcgatgggccagaggcgggccggccagcagacaagatccagatggtgagcacccagcctggctgtgggcgaagcggggcagggcccaaggggcctggagcagtgggccctagtggtgctgacaggggtgggtgtgcccagctgcaggccatggtgcatggggtgaccacagaggagtgccaggcggccctgcagtgccacggctggagcgtgcagagggctgcccagtatctgaaggtaccgccacctcctgctcactctggctctcagggaccctgaagcctggttctgctgcccccagccccacgccccctggctccgactcccctcttccccaccctagtcggtgccctgggcccgcgtgtccatggcgccacccttacccccaggtggagcagctcttcgggctgggtctgcggcccagaggggagtgccacaaagtgctggagatgttcgactggaacctggagcaggccggctgccaccttctgggctcctggggccctgcccaccacaagtgagtgagccccacagtctgccccgctccgtgccccaggagggctgtcccagagcctgccacactgggaggaagcccaacacctcgcaggccgctcccggccagggagacacagctctccagctgcgggagggaggcgctcacagggcccagcaaatcgtttttcctaaatgtgtttatttggacattttagccacttggttttcaaatgagtacaagagggaattggagcctctctggttgaaggaggcttgcttccctagcacctgcagtgaccctgagcggctccaggaatggcactttttaggaccccatgatttgcacacctctttctcacctctgtgtttccatatttctgtttaaagtaacatttaaaatttcagtgttggctgggcaccgtggctcatggctgtaatccccagcactgtgggaggccaaggagggaggatcacctgaggtcaggagttcgagaccagcctggccaacatggcgagaccaggtctctactaaaaatacaaaaattaaccgggtatggtggtgggcacctgtaatcccacctgctggggaggctgaggcaggagaatcgcttcaacctgggaggcggaggttgctgtgagctgagattgcaccactgcactccatcctgggcgacagagggagactgtctccaaaaaaaaaaattttctctaaaaagaaaatatattgtctttcctgtaaaaggtttatattatagtttaacaaaatatatagacatttaaaatatatacatatataaacacactttatatattatgtaaatatatatatgagagcgctgtcaagtcaaaaagaagtgaactgaggtcacatggctggagccagcaccatggcaggaggcactggcgggaggaggggctgacacgggccaggccctggagatacctgctgcccttgtcccagcagcgtggccctgtgcacggtgcggagtttctccacatataaagcgtgtagataatagtgctcaccccgtggaagggactggcgcgatggatgggggacatgtctgtcttattgcgcccagcacgcctggcgccaggatgcaggcactccgtgtcacctgtctgtcccatactgtctcgggtggttcttactgatttgcagctgggatgcaggcactccctgtcacctgtctgtcccatactgtctcgggtcgttcttaactgatttgcacctgggacgcaggcactctgtgtcacctgtctgtcattgtctcgggtggttcttactgatttgcacctgggacgcaggcattcgctgtcacctgtctgtcactgtctcgggtggttcttactgatttgcacctgggatgcaggcactccgtgtcacttgtctgtcccagtctcgggtggttcttactgatttgcacctgggatgcaggcactcggtgtcacctgtctgtcccatcctgtctcgggtcattcttaactgatttgcacccgggacgcaggcactctgtgtcacctgtctgtcactgtctcgggtggttcttactgatttgcacccgggacgcaggcactcgctgtcacctgtctgtcactgtctcgggtggttcttactgatttgcacctgggacgcaggcactcgctgtcacctgtctgtcactgtctcgggtggttcttactgatttgcatctgggacgcaggcactcgctgtcacctgtctgtcactgtctcgggtggttcttactgatttgcatctgggacgcaggcactcgctgtcacctgtctgtcactgtctcgggtggttcttactgatttgcacctgggacgcaggcactccgtgtcacctgtctgtcactgtctcgggtggttcttactgatttgcacccgggacgcaggcactcgctgtcacctgtctgtcgctgtctcgggtggttcttactgatttgcatctgggatgcaggcactccgtgtcacctgtctgtcgctgtctcgggtggttcttactgatttgcacccgggacgcaggcacttgctgtcacctgtctgtcactgtctcgggtgtttcttactgatttgcacctgggacgcaggcactccgtgtcacctgtctgtcactgtctcgggtggttcttactgatttgcacctgggacgcaggcactcgctgtcacctgtctgtcactgtctcgggtggttcttactgatttgcatctgggacgcaggcactcgctgtcacctgtctgtcactgtctcaggtggttcttactgatttgcatctgggatgcaggcactccgtgtcacctgtctgtcactgtctcgggtggttcttactgatttgcatctaggatgcaggcactccgtgtcacctgtctgtcgctgtctggggtggttcttactgatttgcagctgggatgcaggcactccgtgtcacctgtctgtcgctgtctcgggtggttcttactgatttgcatccacataggctttgggctctatcccacctgtcgtcttcggattctctaatacgcaggagtgctcttctgttagtttactcatagtttattaaagtacagagaaaagacatccaggatgataaattttacagtccttgccggggactgccagcttccagtggtgttgcctggcaccagtgtgacccccggtgcctgccccgctgaaccttctgtaaactgtttaactgtgctggtggtttcccattctctaggcgctgagatgcgtctggagagccagagggcctgcctgaaggaatcacctgagcctgtccgtccaccaggagtggggagatgcccccatccagtcctggaggacccgctgctcctgctgctcccggggatggagcaaggccaaggctgcgggaggctgggagccctgccctgcccatccctcctgcaccagcgctgtccctgcacactttggttcagtcccggtgcccctgccaagatgtggaaggggccgggtgaagacaggcttgagggctgccccagcaggctctgggtatgacctgcctctggccctggtcctgggcggggcctgtgggtggagtagtacccccaggccctgccctgggtgacagactgggaggaaaccaggctggacctgggcaggcgggatgtgttggccacagggagaggcggaccggcacccggtgggacctcctaggactgggccttcttccagggggcccctggcagcagctggggtgtcgggcagaatgtgacttgtggccttaccatggacttgaatgggacttggctggcctcaggatcttgtgcctggaaatagcctgaggtggctcaggaagcggagaaagggtgccagaccattctctggcggggaccagggcccaaggccccagggctggaaggagaccaaggggcagccgccctggagggacatcagtgcttcctcttccacccaattcccccacgcggttccatgttttcccaccagcctgttggcgaagttgctgctccggcattcagtacctgcttcttccagagaaataaagttagtttctattttatgtta

SEQ ID NO: 14551 - DNA, 2850 bp, Homo sapiens
gtgccccgccccgcccttccgtcgaaggcccccgttggccccagccgctggttccctgtggctgctgctggtggggctctgggggctccttccccctgggccaccagccctggcttggaaccacagcacctgccctccgtgcctggagctgctcaggaggtgggagggccgagaactactggtggcgtggccagaacacacggacgctgtgtgtggggcccttccctcgcaacgtggtgacctccgtggccggcctgtcggcccaggacatcagccagcccctgcagaacagcttcatccacacagggcatggcgacagtgacccccgccactgctggggcttcccggacaggattgacgaactgtatctgggaaaccccatggacccccccgacctcctgagcgtggaactgagcacctcccggcccccccagcatctaggaggggtgaaaaaaccaacctatgaccctgtgagcgaggaccaagaccccttgtccagcgacttcaagaggctgggcctgcggaagccaggcctgccccgagggctgtggctggcgaagccctcggcgcgggtgccgggcaccaaggccagccgaggcagcggggctgaggtcacgctcatcgacttcggtgaggagcccgtggtcccggccctacggccctgcgcgccctccctggcgcagctggccatggacgcctgctccctgctggacgagaccccgcctcagagccccacgcgggcactgccccggcccctgcaccccacgcctgtggtggactgggacgcacgcccgctgccccccccgcccgcctatgacgacgtggcccaggatgaggatgactttgagatctgctccatcaacagcaccctcgtgggcgcgggggtccctgccgggcccagccagggccagaccaactacgcctttgtgcctgagcaggcgcggccgccccctcccctggaggacaacctgttcctcccgccccagggtgggggcaagccgcccagctccgcacagaccgcagagatcttccaggcgctacagcaggagtgcatgaggcaactgcaggctccggccggctccccggccccctctcccagcccggggggtgacgacaagccccaggtgcctcctcgggtacccatcccccctcggcccacgcgcccacacgtccagctgtctccagcccccccgggcgaggaggagaccagccagtggcctggacctgcttcccctccccgggtgcctccgcgggagcccctgtcccctcaaggctcgaggacacccagccccctggtaccacctggcagctccccgctgccaccccggctctcaagctcacctgggaagaccatgcccaccacccagagctttgcctcagaccccaagtacgccaccccccaggtgatccaggcccctggcccgcgggctggtccctgcatcctgcccatcgtccgggatggcaagaaggtcagcagcacccactattacttgctgcccgagcgaccatcctacctggagcgctaccagcgcttcctgcgtgaggcccagagccccgaggagcctacccccctgcctgtgcctctgctgctgcccccacccagcaccccagcccccgccgcccccacggccaccgtgcggccgatgccccaggctgccttggaccccaaggccaacttctccaccaacaacagcaacccaggggcccggccaccacccccgagggccactgctcggctgccacagaggggctgccctggcgatgggccagaggcgggccggccagcagacaagatccagatgctgcaggccatggtgcatggggtgaccacagaggagtgccaggcggccctgcagtgccacggctggagcgtgcagagggctgcccagtatctgaaggtggagcagctcttcgggctgggtctgcggcccagaggggagtgccacaaagtgctggagatgttcgactggaacctggagcaggccggctgccaccttctgggctcctggggccctgcccaccacaagcgctgagatgcgtctggagagccagagggcctgcctgaaggaatcacctgagcctgtccgtccaccaggagtggggagatgcccccatccagtcctggaggacccgctgctcctgctgctcccggggatggagcaaggccaaggctgcgggaggctgggagccctgccctgcccatccctcctgcaccagcgctgtccctgcacactttggttcagtcccggtgcccctgccaagatgtggaaggggccgggtgaagacaggcttgagggctgccccagcaggctctgggtatgacctgcctctggccctggtcctgggcggggcctgtgggtggagtagtacccccaggccctgccctgggtgacagactgggaggaaaccaggctggacctgggcaggcgggatgtgttggccacagggagaggcggaccggcacccggtgggacctcctaggactgggccttcttccagggggcccctggcagcagctggggtgtcgggcagaatgtgacttgtggccttaccatggacttgaatgggacttggctggcctcaggatcttgtgcctggaaatagcctgaggtggctcaggaagcggagaaagggtgccagaccattctctggcggggaccagggcccaaggccccagggctggaaggagaccaaggggcagccgccctggagggacatcagtgcttcctcttccacccaattcccccacgcggttccatgttttcccaccagcctgttggcgaagttgctgctccggcattcagtacctgcttcttccagagaaataaagttagtttctattttatgtta

SEQ ID NO: 14552 - DNA, 18049 bp, Homo sapiens
gggatcctttggcttttcctggaaacactgtcctggtcctttgcccgggttttagggaaggatgagtagtgtcgggatggtggaggcaggagaagagagcagcgtggtttgctgagatttaggggtcttggatctgccactggctcctgataggtccctgggcggtcagtggcctccagatttttgttgtgtcttcagtgaaatgataccggtccccactgcccagctcacctcccggggctgcaggaggcaccggagataatggctgtagagggtcttgtaacctgaacattgcttgcaaacataaggaattctagttactgggaggaagcacagggcagaggccagaagaggccctcagatttgaggcaccctagcccagacggataaggatccaccagctctgggggcgtgagacccaagctggcaagaatctgcaatctggagccaaggctgtgggtgcctcagtggaggccgagtcagaccgacgtggccagctttgaccctcatggcctcctttcttctgtcccttgaccttcggctcctccctgtccaccctggcctccgagtctcctccacttttccttccgtctcagccctcagctctaggcgcccctccagagacccagctgtcttcccaggccccttcccagcaaggactagcttcatctgaaccacacacacactcacggttcaacctcagactaaaattatcctctcccctgggcaggatgaagggcagccgactccctggtgagggtggagacagacagcaccaaatggtcaggccagagaaggggccagggctaaaaatggacaaggaggtgtctgtggagggcccctgcggctccatcgatgcgggttagggctggagtctgcggggtggcgggtgcaggaagggagggtggggcaggactgggaggagactccgaccttggctgggcggtgccctccctctccacacagctgggtgtggggccgctcagccacaggctgcatgcctgtcggtctctttctggcaccctccttgaggccagcatcaggctttgggttcatgtttgggggtgtgccctggacggagtgtgggcctccagccaggctgccccactgacagtttggcaaaaccaggacctatctggaagccgaagccggggatcaccaggtggacccagcggggtgggactgagtgactgaccctggggtgttggattccatctggcccccggctgccttcaaacaggtgttcagtggaaagcgactggaggctgagttcccacctcatcactctcagagcaccttccggaagacctcgcccgcccctgggggcccagcaggggaggggcccctgcagagcctcacctgcctcattggggagaaggacctgcgcctcctggagaagctgggtgatggttcctttggcgtggtgcgcaggggcgagtgggacgcgccctcagggaagacggtgagctctctgtgtcctgccagcgcagcagaggcatgggacccggggctggtagtggctcttctgcccccaaccagggtgtggatgggactggggatgcgtcacagtgtggctcatcccagagtccgtgctcaggatttttggggttttatttatttatttatttttgagatggagtctcgctctgtcgcccaggctggagtgcagtaggcacgatctcggcttcctgcaacctccactttccgggttcaagcaatcctcctgcctcagcctcctgagtagctgggattacaggcatgcaccaccacactcagttaatttttgtatttttagtagagacggggtttcaccatgttggccaggctggtctcgaactcctgacctcagatgatctgcccactttagcctcccaaagtgcttggattacaggtgtgagccaccacgtccagcccatgctcaggtttaactaagcacatttattatttcaactataaaaataatttattataaaagtttggaaagtatttgaaaaacaagaaaaaaaaaatcgcctgtaatcccaccactcagaggaagccgagcctcttcctcccactttaggtattttgttggatttagttaagatacaaattctggatacagcttttaaaatcttgttctttcttctcggcgttgcatttaacattttcccctcagggataacgtgtcaccacagcatacagttctggtgtgactgtttcctgtgcagcagccgtgtccttactgctcagatcacgtgcggtgcattcccagcacctcagagggctcctcattctccgtccactcagtgcgtccttctcccggggaagccgctgtcactcagtgcatccttctcccggggaagccgctgtgcagacttccagctccacagctttgtttttggcattacatttacagcattttccttctacagcaaaacaccttttaatattccattttatgaccagcctgagcaatatggagaaaccccatctctactaaaaatacaaaattagccaggcgtggtggcacctgcctgtaatcccagctactcaggaggctgaggcaggagaatcacttgaacccgggaggcagaggttgcagtgagctgagatcacgtcactgcattccagcctgggcgacaagagcgagactgtctcaaaaaaaaaaattccattttataacatttgaatattctctcatcatactggttatctcttactttttggttggtatttaagcccggcattcccccaggaaggggaggtgtggccgacgatggctcctgagggccagccgtctgcccttctccagccaggcctcacgcagagcacgtaagcccaggcactggtgacatgcttacccacccagatgaggagctcacaggcagggatcgttgagccgagttggagggtggagcaggttggctccgcgtgtctgggacctggcaagtcctgagtccttgcaaatcccgctctgggcaggtgagtgtggctgtgaagtgcctgaagcccgatgtcctgagccagccagaagccatggacgacttcatccgggaggtcaatgccatgcactcgctcgaccaccgaaacctcatccgcctctacggggtggtgctcacgccgcccatgaagatggtgagtactgcgggcgggagggggcgggcagggagagggctccggtcccatatgtgtggttcggttcctctctccatcctaaggtcagaggcgccctagatcctactttggtcccccaacctgatggagtaaaggggtccacaggggcccagcctggtacgggctgtgtctgctgcggtccagtccgggtctgtctctggattttgctggtgctcagtgtcaagagagttactcccatgggaggggctggccactgagtttaatttggggaatttatgttttatttatctatttattttgagatggagtctcactttgtcgcccaggctggagtgcaatggcatgatctaggctcactgcaacctcggcctcctgggttcacgcgatattcctgcctcaggcttccaagtagctgggattacagccgtgcgctaccatgcctggctaatttttgtatttttagtagagacggggtttcaccatgttggccaggctggtctcaaactcctgacctcaaatgatccacccacctcggcctcccaaagtgctgggattacaggcgtgagccaccacgtccagctgagttttggaatttctagccactgcctctttgggctccttctctctaggcatcagtttcccaaattgcctcgagggagaggcctgagaaactgcaggactcctagaggtccccagacagcaggccaggaaggtgcgtgcagcctggctctggaaagccttcaggaaggggactgggggcccagcgtgggctgctgagaaggggcagggtcctccagctcattcctcctgcctcctccgtggcctcaggtgacagagctggcacctctgggatcgttgttggaccggctacgtaagcaccagggccacttcctcctggggactctgagccgctacgctgtgcaggtggctgagggcatgggctacctggagtccaagcgctttattcaccgtgacctggctgcccgcaatctgctgttggctacccgcgacctggtcaagatcggggactttgggctgatgcgagcactacctcagaatgacgaccattacgtcatgcaggaacatcgcaaggtgcccttcgcctggtgaggggcaggtgctgccagctcacagagtccctgcagacccaggcctcaaagcttctggggctttctggacccaccacagcccctggttttgcttgggcctgcccttgtctgttctaagcctggggtgccctcctttgcacccattcgctcaccatccatctaggaattcttgagggcccacgtgccagggtctgggtgctggaaatcacagggatacatgctgtgggactctccaaggggctttgctgggtggggtgatacggggatagatgctgtgtcctctccaaggggcattgttgggggtcgtgtttcagggatagatcctgtgtcctctccaaggggcattgctggcgggggggtgttatagggataaatgctgtgtcctctccaaagggcgttgctggggggggggtgttacaaggatagatgctgtgtcctcttcaaggggcatcgctgggggggtgttacagggatagatgctgtgtcctcttcaaggggcattgctggggggggtgttacagggatagatgccgtgtcctctccaaggggcgttgctggggggggtgttagagggacagatcctgtgtcctctccaaggggcatcgctgggggcgggtgttacagggatagatgctgtgtcctctccaaggggcactgctgggggggtgttacagggatagatgctgtgtcctctccaaggggcactgctgggggggtgttagagggacagatcctgtgtcctcttcaaggggcattgctggcgggtggtgttagagggatagacactgtgtcctctccaaggggcatcgctgggggcgggtgttacagggatagacgctgtgtcctctccaaggggcattgctgggggggtgttacagggatagatgctgtgtcctctccaaggggcactgctgggggggtgttacagggatagatgctgtgtcctctccaaggggcactgctgggggggtgttagagggacagatcctgtgtcctcttcaaggggcattgctggcgggtggtgttagagggatagacactgtgtcctctccaaggggcatcgctgggggcgggtgttacagggatagacgctgtgtcctctccaaggggcattgctgggggggtgttacagggatagatgctgtgtcctctccaaggggcattgctggggggcgggtgttacagggttagatgctgtgtcctctccaaggggcattgctggggggggtgttacagggatagatgctgtgtcctctccaaggggcattgctggggggggtgttacagggatagatgctgtgtcctctccaaggggcattgctgggggggtgttacagggatagatgctgtgtcctctccgagggtcattgctgagttaggtgatacagggatatatgctgtgtcctcttcaaggggcattgctgggggggtgttacagggatagatgctgtgtcctctccgaggggcattgctggggggcgggtgttacagggttagatgctgtgtcctctccaaggggcattgctgggggggggggtgttacagggatagatgctgtgtcctctccgagggtcactgctgagttaggtgatacagggatatatgctgtgtcctcttcaaggggcattgctgggggggtgttacagggatagatgctgtgtcctctccaaggggcatttctgtggggaggtattcaaaggtttcctaaaacatcagggaagttcgccagggaaagactcgttggtaagcatgttctagggagagctagtggtagacaggcccaggccacagcaggccttgtagatgggccagggctgcttacctgtgcactaggggtggtacttggccctgccctggcccctgtgtgggcttatcctctgctgagaccattgtggttctctggtgccagaggcacccagaggtctgtgatctgcctgctttgaggcgggaagggttgttccagttctgctttcccaagcggtggctgtgggcaacccttatgatccaggacgcatggtcatcttaacgagcagctggctttacacccagggcgagcagaggtcttaaattatgcccgttgtcctggagtaatttagagcagcctcttttgtattcaggcatcctggtttgcatggtaaggtatgaatatagttgcctttaaacagcacgatgaagtgggcgggttattgttctcatttcaccaaggaggataatgaaccttagcgatctcgagtgactttcccggccccatcccctttgaggggcagggctcgctctgcttccctgtctgggcaccaccctcctctctgcacctcagtccacgccgggatgtcctttctgacctcactgcagtggcacttccccctcaaccgggggtgcccagaacgaatgggtgtatttgggtgaagccagtatgactgtttctacccattttggttcttccccaggccctacccgaatttcccacccactgcttcctgccaaaggacccaaatccgaggatcccgccccaaatctgggaattgtcattctcccaccacagtcagaaaacagcctgtgatcttctctccctgccccatcccagagcctctgacctccttcctttccatgcttctctggctgggaaacttcctttcctcttcccccaccaggctgcaagtgaataagaggcctgggcttagacgatttccccaagtccctgcatcgtgtcgtcaaggggtcctgcccgcttcacacggcgcccctgagacccactgttgaacctggcacagggggtcacaacaagtgtttgctgcatgagtgttttaagtccctggggcggacgcaggtagggtgtttgagagggcttctctttgacccctgcctctgccaggtgtgcccccgagagcctgaagacacgcaccttctcccatgccagcgacacctggatgttcggggtgacactgtgggaaatgttcacctacggccaggagccctggatcggcctcaacggcagtcaggtgagggctgggagacgggcccccatagggctggtggggtgaattccattccctgcttgcagcctggccctgctggaactgcctctcaccaatggactccctcctcccacgccccgtgcctccccccacttcccgtgcctcccaccacgccccgtgtctcctctcacgccccgtatctgtatggcctcagggagagcccagcaaagagacggggagggaaaagctggggcctgccctccttctctagcccttgccacatccacttgttccgaggctccagacctgggaagaagggactggggctctggagagggcccctcccaggcaggcagatcccttctttggaggccaggcatggcagcagccgctgcagctgtggatgggctggagggaaggcgggaagtgaagggctgggcgctctgtttgtcgtcaaactctgcacctcctcaccttcagatcctgcataagatcgacaaggagggggagcggctgccccggcccgaggactgtccccaggacatctacaacgtcatggtccagtgctgggctcacaagccagaggacagacccacgtttgtggccctgcgggacttcctgctggaggtgagggacaggtcagcccaggagagctggggtgttcaagctgaggggctacccaggcgtcagtcccagagttggccacgaccttcctcttcctccaggcccagcccacagacatgcgggcccttcaggactttgaggaaccggacaagctgcacatccagatgaatgatgtcatcaccgtcatcgagggaaggtagggagtgcagggctgggccccgccctgggatcgcttgaagggcacaggtcggagggacctgtggacagatctgtttggcctccaagattcccttggccacatacaggctggcggttgggcctgaaccctgcagtgtgaggggaggacaggcctgcctccgtcttcctagtgcctttccctgcccagcttccctccaccaccctttcccactgggctgcagccctggctgtgtggttgggccaggctgcctttatggaggggtagggagtggcctggcctcggtggcagcagagttctggactcccgtgcttcctcctctgctcctccccgcttctctccctgcttcttcctggcacagggactcagccatccacctgggtgcgtttcagtagctgaagcagcccagcctgccctcttgcagctttccatccttcctgctgagcccaccaccccctcccaggcctgcctccagcctctggtcctctcttcccatctccccttgggaggaccctctctatacctaaccctcctcccacagcctctcgggagtccctgtcttccacctgagcccccgcagttctagcgcctgccctgaggccccaccactgctggccctgccttgtgctggctgatccccagggtgtctgagcaactggctggggcagggcaggtttcaggtacctttgaggcaggggcagtattgaggaccaggaagaagagtgaagtggaggaaatcccctgtgctcgcagctcctgactcaggccaggcaaggatggggctagggctgcttcccagggagcctcttccacctgcactgcagcttttggagtctgcggccttcggtgcaatcctgtgcctcttgggggtgggtggaggagacctggggggctgtgtggagtgtgacctgcaccgctgtggccccgacaccccgagccttcccaggcccggctccctcacccttgggcccagggtctgggaataggaatgacatactgagactgcagggcctgtggttaggggtgttatgctggggaagaatgcagaaggttctagaaagagaggcctggggacaggaggcaaacagtctgcaggtttggagctgaggggccagggatgggattgcaagcgtggcgctccggggagcattctggaaataggaagattaagggtgggggggtcccctggaagtacctggcagggcctccagcccgaagtccagcctcatgaccgtgtccacctccacgagctggaaagccgtgggcctggcccctcttgtgctgctgccggagccccagatctttaccacctgcttcccttgctctcagcaggagcctgtgtgcctgccagtgtccccaggggtgactcagagtggcctgtgtttggggcgtgtgtctctggagctggtgttttaggtcaccgcccgggcaaggcgggcagtgggaggggccgggagcggctgctcctgggagggttgtgggtgtgccccgccccgcccttccgtcgaaggcccccgttggccccagccgctggttccctgtggctgctgctggtggggctctgggggctccttccccctgggccaccagccctggcttggaaccacagcacctgccctccgtgcctggagctgctcaggaggtgggaggtgaggggcaggaggccacaacagccggtgaggcttgggagcgggcctgggtgtcggtggtggcagagcttgactctgcccccttgtttcttcagtccctgaatatctccatgtttgtttggctgcctccgtctccatgtctccaggcggatggctctgtgtgagtctttgggcctgggtgtgcatctgtgggtctgtgtttggagttccctcctagcctggccttctcttcgccgtggcttcccacttgcgaagctgtgtccagtatttgtttcctggtgcggagtctgggaggccacctgccgcagctctgactgagtctaggctcagtccttctcagggtaccaggctgtgggcagaggggagacacctagatgtttcgtgctgtgtctagatttggagacacaaatgatgactggtctttcccaggggctcgtttggaggaaggggtggctggcagcacttttgttccgcatacagagcgggtgttggaatccattgcgggtccttggcctggtctggccctggagcctcggcttcctgtggtgggtgggagccaggcatccgggttatccctccaggcctgggcgcctgggacccctagggagaagagcgggcgggcgttttgaacagaatgtccggcattagttgagccatttctggactaccttcggcccggacgggaacgtggtgctgagatttccagagctggggcagccttaggcagttctcagcaccggcctctgttttccatcttgtctaccccagagatgttgaccagaggcccgggggcagcaggaggtagaaggttcatgcggaggtgttgggcccttttcctgctcccccaggaagtcctcatccgcccctgcttcagtcacggccgggtagcagccctggccctcccatggccacggggactccggcctgttcatggcgggagagagagggcgcggacagggcgggcctggaaggaagggctggcctcagtcccctctggactgctggtgcctcggccacactgagcctcacacgggtgcgtgtgggctgcgagaagtgacacggtcctcttggaagtcccactggagccttgggatgaagctgccttggagtgtgcgtgggcgccatcccgagggggagcttcctgtgcctccgagcgtgcgtgggcgccatcccgagggggagcttcttgtgcctcggagcgtgcgtgggcgccatcccgagggggagtttcttgtgcctcggagcgtgcgtgggcgccatcccgagggggagtttcttgtgcctcggagcgtgcgtgggcgccatcccgaggggagcttcgtgtgcctcggagcgtgcgtgggcgccatcccgaggggagcttcctgtgcctcggagcgtgcgtgggcgccatcccgagggggagtttcttgtgcctcggagcgtgcgtgggcgccatcccgaggggagcttcttgtgcctcggagtgtgcgtgggcgccatcccgaggggagcttcttgtgcctcggagtgtgcgtgggcgccatcccgagggggagcttcctgtgcctccgagcgtgcgtgggcgccatcccgagggggagtttcttgtgcctcggagcgtgcgtgggcgccatcccgaggggagcttcttgtgcctcggagtgtgcgtgggcgccatcccgaggggagcttcttgtgcctcggagcgtgcgtgggcgccatcccgagggggagtttcttgtgcctcggagcgtgcgtgggcgccatcccgaggggagcttcttgtgcctcggagtgtgcgtgggcgccatcccgaggggagcttcctgtgcctcggagcgtgcgtgggcgccatcccgaggggagcttcctgtgcctcggagcgtgcgtgggcgccatcccgagggagagtttcttgtgcctcggagcgtgcgtgggcgccatcccgaggggagcttcttgtgcctcggagtgtgcgtgggcgccatcccgaggggagcttcttgtgcctcggagtgtgcgtgggcgccatcccgagggggagcttcttgtgcctcggagcgtgcgtgggcgccatcccgagggggagtttcttgtgcctcggagtgtgcgtgggcgccatcccgaggggagcttcttgcacacgtcctccgcactcttactctccttcccccaggagcaagcatgttttctcgagtggtgtcaggactcccagcagccatgggggctcttgcctcggccatacctgcactaagggaggtgggcttgatgtctcctttccctctcagaagtgggtcccaaaggaggcttctgtgcctggagctgggcagtgttggcggaagggagaggccagacggagtgacctgccttgggcacgagtcacgctgctctgagcaaggtctcggcctcagcggcattctcacccagttactgagcgcctctgaagaggtgtggagagcagagtccggcgtctggcccgcggcagccaccggggagcccgtgggtgtagcgggagagccgcagcccagccggtgccggggttcctcctctacgggccgccgtgggaggctgtgtgcgtgctggggagccggggctctgctccttcgagtggccctgctatttttcagatgggactcgtctcgtctcggggtactgtcctctctccttccttccctccctgcaggcagggtgggaatcacagggtggctgtgtgtggtggggccaggccagtggccctgtgtatgaggaggctgggcagggggagcacagccccgtctccccgcgccccgcgccccccgcctccccgccgaccgtggtgctctcgggtttgactttggtctctgggatgggctgttccggagtcaccccgctccagccaggcctcgtcaccttacaaggctgtgggtctgggtgcccaggcgtcgccacctcctccgtcctctctccccggcctggctgggtttcagaggagcccttcttcacgctttggccctgggacaggagaagtgggggttggtggggagggcgtgcagtgtggtgccacacgtgtccaccctagcagctctgggctgtcaccgcccccgcgtgcccagactctgcccacggggctgtcaccgcccccgcctgcccagacactgcccacggggctctcaccgcccccgcctgcccagacactgcccacggggctctcaccgcccccgcctgcccagactctgctcacggcatcacgtatgacaagtccagcagcagacgcgggagcctcacaacctgtgagagccttcgggagtcaggagtgtcttgcgggagccctgtgcttcctggcctgcctgcccctgcccctgcccctgcccctgcccaggccccggcttaggccacatcagcagaggtttcgtgtctgaggtcagagggggactggcagccctactgtctggtcactgtgggagagctgagttcccttttggacacaggtagagcccctcctgaggagacggggaggctcccgcaggccttccgggaggtggtggaaagctccggaagcaggtgaagcggtggagggagggactgagttgcccgagtgctcctagactctcccgcgtctgcattcgggaggcaggttgtagctggaggcctggcccccagcctagtgcaaggccctaggtgtcccccggcacccccgcacctctcagaactcctggaacccagccgaggagtgaaatcaagtggccagaagaggactggggccccggccttgccagggaactgaggggtgaggaggaggtgtgggcggggcgctggccccacagacctgaaagctggcgttgggtcccaggtctgctgggatctttctggtaaccgtggacaggtcatgttgcctgctgcagcagcttccagcgtgcctccttatttgcaaaccatagggaaagctgcctgacccacctagagagttgtgggtaaggccgtgtgcaaacaggcctgtacggggcatggtgggtcacgggggctgttggggaggagggccggtggcacacagcctggtcctgaggcctgagctccatcccccttctgccacagtggccagggtgtgaggagggtcccagtgccggggctgccccgccacgcctggcgttcaccgtgccatctctgtcgcgcagggccgagaactactggtggcgtggccagaacacacggacgctgtgtgtggggcccttccctcgcaacgtggtgacctccgtggccggcctgtcggcccaggacatcagccagcccctgcagaacagcttcatccacacagggcatggcgacagtgacccccgccactgctggggcttcccggacaggattgacgagtgagtactgggcggggatggatgctgacctggccccgctcgggactccagggccctcagcacggcacgcgtgggcggaatctgctcttcaccctttcgcccgggcttcagcccccgacccgccactctcccctcctcaccctggccttactctcgggaagctgtggaaccctaggaagcccagcctggtgggggttctccaggggaatgttctccaggggagtgttctccaggggagggttctccaggggagggttctccaggggaatgttctccaggggagggttctccaggggagggttctccaggggagggttctccaggggaatgttctccaggggagggttctccaggggagggttctccggggagcgttctccaggggaatgctgtccctgccattttcaagctttggggggccgatctcctaactctgagacacttcatctgtgaaacaggttcacccccccaataaggggaaggctgtaaatgcactctgaattagcacttgctgctcagatgcaggggtcctgagagaagctttcccactcactgtagatgaaagtagggtcaggagcttctgaggatggactcctgtttggtggaaaggtccccggagccacagctgtaacccctcttggtactcgggccttaggaaaatgaacttgggaggaacccggtgggagctgctgaggaggagagcttctcccatgacccccctgtggccccctgtgaccctgtgaccctgtgacccctgcacacgagcagtggttttccttctcctgctggtggtgccagagtcctggagacgtgaacctgctggctcaggccctggggatgtatgcaggtccacatgggagtgagcctgctttccagaaccagagtgggactggggaccttggggactgcagagggaacgttaggtggcagctccgcctccccaccacacagtactctacggagctcactccatacctgggagaggccctgtctcctatgtaagaggataaggccaccgaggggcatctgggaaggacacgcagaatcagtcacttccgggatgccaccccccaccccccgaagcttcttgcgccaggcctccaagcctctctgctggccgcagggggattccaggcccctggcctctgcagcccttctcctgctgacttctgatactctggtctgccctgagaggcgtggaaagcaggggccttcacccaccgggccccacacaccagaaccccacacagcgggcccccacacaccagaacccacacagcgggcccccacacaccagaaccccacacagcgagtccccccacaccagaacccacacagcgggcccccacacaccagaacccacacagcgggcccacacacactggaaccccaagctcacagggctcagcccatgtgttttgcctaaaaagaacccagcaagggcctgagagttggggtgaaagactgcagacacctccaggagaggctggtgccctctgccccactcctggcatgctgtggccagcccagccccattcctccaggctttaatcagccccagtgactaagtctcagatactgacagttggtgcagggacggagggtggatccggagcaggacaggtggcccagcctctcccgcacctcctggccatgtggcagaagggtgcctcctgcccaccctggctgggcaccatagctgggatgccccgttcttaggccctccatcgtggcctgcgggacaggagtgtctgccctctggccgctgcctggtgtgggctgggggcctggggggttgtggaggaccacctctgcccttgtagggtgtagttggagtccctgaggtcctaggctttccatcctggggtcaggtgtcctttctctgccttctctccaggacaccccccagctgagacgtgcggtcaggttctgtggactgggaggcgggaggcctgtgcttcagacccaagactacacccggtttcctccaggacgaaggggctctgatgagattctgccacccctccacacgcttcccctgctctcttgacccagctctctcccccacagactgtatctgggaaaccccatggacccccccgacctcctgagcgtggaactgagcacctcccggcccccccagcatctaggaggggtgaaaagtaagagcccctctgctccctggtgtccctaactcatcggctactcaggaaggggcactgtcttcacaggccaccctaaggctgctgttctgtttttggggacagtggggtcagggcagcaggcgggacagctgtgtccctggctccggctgggcgtggggtggaagacaggcagctgtatccgccgaggtgggcctcctcgggctgggtctgcagcaggcccgtccgccccggcgtccctcctccctccttccacggccgagctcagatcctggctttcctcacttccccctaatcctgctctcctgtcccaagccaaaaccaccccacggctccggctctgcctggggcctcctccatctcccggtcctctgcctatcatactggaccgccgtgttcctcatcctgccgcctgcggcctcccgtttgctgggggcttgtacattcactcgcccccattcacttctctcccttcgtctctctacactctgccctctcgtccggccgtctccctcctttgtcctctgtcctgctccgtctctctccccctgtccgcatggcctttcttgcaggggagcctccacctcgcccacctcagcctgccttcttcactcagagtaagtggggctgcttccgatgccttggcccccgcccccgccccctctctctcactcctctcctggaaggtacagagcctgggcggctgggccggaggggaggtgggtgggtgtgtgctgtgagcttccgcggctgccctggcctagcatgcctgccccccctcgagcccgccccccggagcctgggcttctgctcacgagtgtggccctggcttccgcctcggcctcactccctcccagacctgtctgagcttctggagcacgagtgtggccctggcttctgccttggcctcgctgcctcccagacctgcaggcgctgtctgggctttgtggccgttggtcaggagtactgtcctctccaaggatagtccttatagcccctgatggcaggaggcggctccgtgcctgcactaatggtgtgccgtgacaggggcggggatgagggctcactaactcgccagggcgcaggagcagggccgccggggtcttgtgctggtggaggcagcgtcaggcaggagccagtgttgcttgctgcagcttagacggagcgaggcggggctcaccggcccacatggggctgccgggcagagcaggttccgccctcctgatggagtggtcggaggtgcgctgagaacctggccgccggtggctgacctcagacctcggggggagttgggagtggagggttgctgggggacacttggctttctctcccacgtgccacctcccctcgtgtcccagaccctgcctgactgccttcctgttgggctctccctttccatcacagaaccaacctatgaccctgtgagcgaggaccaagaccccttgtccagcgacttcaagaggctgggcctgcggaagccaggcctgccccgagggctgtggctggcgaagccctcggcgcgggtgccgggcaccaaggccagccgaggcagcggggctgaggtcacgctcatcgacttcggtgaggagcccgtggtcccggccctacggccctgcgcgccctccctggcgcagctggccatggacgcctgctccctgctggacgagaccccgcctcagagccccacgcgggcactgccccggcccctgcaccccacgcctgtggtggactgggacgcacgcccgctgccccccccgcccgcctatgacgacgtggcccaggatgaggatgactttgagatctgctccatcaacagcaccctcgtgggcgcgggggtccctgccgggcccagccagggccagaccaactacgcctttgtgcctgagcag

SEQ ID NO: 14553 - DNA, 5940 bp, Homo sapiens
gggatcctttggcttttcctggaaacactgtcctggtcctttgcccgggttttagggaaggatgagtagtgtcgggatggtggaggcaggagaagagagcagcgtggtttgctgagatttaggggtcttggatctgccactggctcctgataggtccctgggcggtcagtggcctccagatttttgttgtgtcttcagtgaaatgataccggtccccactgcccagctcacctcccggggctgcaggaggcaccggagataatggctgtagagggtcttgtaacctgaacattgcttgcaaacataaggaattctagttactgggaggaagcacagggcagaggccagaagaggccctcagatttgaggcaccctagcccagacggataaggatccaccagctctgggggcgtgagacccaagctggcaagaatctgcaatctggagccaaggctgtgggtgcctcagtggaggccgagtcagaccgacgtggccagctttgaccctcatggcctcctttcttctgtcccttgaccttcggctcctccctgtccaccctggcctccgagtctcctccacttttccttccgtctcagccctcagctctaggcgcccctccagagacccagctgtcttcccaggccccttcccagcaaggactagcttcatctgaaccacacacacactcacggttcaacctcagactaaaattatcctctcccctgggcaggatgaagggcagccgactccctggtgagggtggagacagacagcaccaaatggtcaggccagagaaggggccagggctaaaaatggacaaggaggtgtctgtggagggcccctgcggctccatcgatgcgggttagggctggagtctgcggggtggcgggtgcaggaagggagggtggggcaggactgggaggagactccgaccttggctgggcggtgccctccctctccacacagctgggtgtggggccgctcagccacaggctgcatgcctgtcggtctctttctggcaccctccttgaggccagcatcaggctttgggttcatgtttgggggtgtgccctggacggagtgtgggcctccagccaggctgccccactgacagtttggcaaaaccaggacctatctggaagccgaagccggggatcaccaggtggacccagcggggtgggactgagtgactgaccctggggtgttggattccatctggcccccggctgccttcaaacaggtgttcagtggaaagcgactggaggctgagttcccacctcatcactctcagagcaccttccggaagacctcgcccgcccctgggggcccagcaggggaggggcccctgcagagcctcacctgcctcattggggagaaggacctgcgcctcctggagaagctgggtgatggttcctttggcgtggtgcgcaggggcgagtgggacgcgccctcagggaagacggtgagctctctgtgtcctgccagcgcagcagaggcatgggacccggggctggtagtggctcttctgcccccaaccagggtgtggatgggactggggatgcgtcacagtgtggctcatcccagagtccgtgctcaggatttttggggttttatttatttatttatttttgagatggagtctcgctctgtcgcccaggctggagtgcagtaggcacgatctcggcttcctgcaacctccactttccgggttcaagcaatcctcctgcctcagcctcctgagtagctgggattacaggcatgcaccaccacactcagttaatttttgtatttttagtagagacggggtttcaccatgttggccaggctggtctcgaactcctgacctcagatgatctgcccactttagcctcccaaagtgcttggattacaggtgtgagccaccacgtccagcccatgctcaggtttaactaagcacatttattatttcaactataaaaataatttattataaaagtttggaaagtatttgaaaaacaagaaaaaaaaaatcgcctgtaatcccaccactcagaggaagccgagcctcttcctcccactttaggtattttgttggatttagttaagatacaaattctggatacagcttttaaaatcttgttctttcttctcggcgttgcatttaacattttcccctcagggataacgtgtcaccacagcatacagttctggtgtgactgtttcctgtgcagcagccgtgtccttactgctcagatcacgtgcggtgcattcccagcacctcagagggctcctcattctccgtccactcagtgcgtccttctcccggggaagccgctgtcactcagtgcatccttctcccggggaagccgctgtgcagacttccagctccacagctttgtttttggcattacatttacagcattttccttctacagcaaaacaccttttaatattccattttatgaccagcctgagcaatatggagaaaccccatctctactaaaaatacaaaattagccaggcgtggtggcacctgcctgtaatcccagctactcaggaggctgaggcaggagaatcacttgaacccgggaggcagaggttgcagtgagctgagatcacgtcactgcattccagcctgggcgacaagagcgagactgtctcaaaaaaaaaaattccattttataacatttgaatattctctcatcatactggttatctcttactttttggttggtatttaagcccggcattcccccaggaaggggaggtgtggccgacgatggctcctgagggccagccgtctgcccttctccagccaggcctcacgcagagcacgtaagcccaggcactggtgacatgcttacccacccagatgaggagctcacaggcagggatcgttgagccgagttggagggtggagcaggttggctccgcgtgtctgggacctggcaagtcctgagtccttgcaaatcccgctctgggcaggtgagtgtggctgtgaagtgcctgaagcccgatgtcctgagccagccagaagccatggacgacttcatccgggaggtcaatgccatgcactcgctcgaccaccgaaacctcatccgcctctacggggtggtgctcacgccgcccatgaagatggtgacagagctggcacctctgggatcgttgttggaccggctacgtaagcaccagggccacttcctcctggggactctgagccgctacgctgtgcaggtggctgagggcatgggctacctggagtccaagcgctttattcaccgtgacctggctgcccgcaatctgctgttggctacccgcgacctggtcaagatcggggactttgggctgatgcgagcactacctcagaatgacgaccattacgtcatgcaggaacatcgcaaggtgcccttcgcctggtgtgcccccgagagcctgaagacacgcaccttctcccatgccagcgacacctggatgttcggggtgacactgtgggaaatgttcacctacggccaggagccctggatcggcctcaacggcagtcagatcctgcataagatcgacaaggagggggagcggctgccccggcccgaggactgtccccaggacatctacaacgtcatggtccagtgctgggctcacaagccagaggacagacccacgtttgtggccctgcgggacttcctgctggaggcccagcccacagacatgcgggcccttcaggactttgaggaaccggacaagctgcacatccagatgaatgatgtcatcaccgtcatcgagggaagggccgagaactactggtggcgtggccagaacacacggacgctgtgtgtggggcccttccctcgcaacgtggtgacctccgtggccggcctgtcggcccaggacatcagccagcccctgcagaacagcttcatccacacagggcatggcgacagtgacccccgccactgctggggcttcccggacaggattgacgaactgtatctgggaaaccccatggacccccccgacctcctgagcgtggaactgagcacctcccggcccccccagcatctaggaggggtgaaaagtaagagcccctctgctccctggtgtccctaactcatcggctactcaggaaggggcactgtcttcacaggccaccctaaggctgctgttctgtttttggggacagtggggtcagggcagcaggcgggacagctgtgtccctggctccggctgggcgtggggtggaagacaggcagctgtatccgccgaggtgggcctcctcgggctgggtctgcagcaggcccgtccgccccggcgtccctcctccctccttccacggccgagctcagatcctggctttcctcacttccccctaatcctgctctcctgtcccaagccaaaaccaccccacggctccggctctgcctggggcctcctccatctcccggtcctctgcctatcatactggaccgccgtgttcctcatcctgccgcctgcggcctcccgtttgctgggggcttgtacattcactcgcccccattcacttctctcccttcgtctctctacactctgccctctcgtccggccgtctccctcctttgtcctctgtcctgctccgtctctctccccctgtccgcatggcctttcttgcaggggagcctccacctcgcccacctcagcctgccttcttcactcagagtaagtggggctgcttccgatgccttggcccccgcccccgccccctctctctcactcctctcctggaaggtacagagcctgggcggctgggccggaggggaggtgggtgggtgtgtgctgtgagcttccgcggctgccctggcctagcatgcctgccccccctcgagcccgccccccggagcctgggcttctgctcacgagtgtggccctggcttccgcctcggcctcactccctcccagacctgtctgagcttctggagcacgagtgtggccctggcttctgccttggcctcgctgcctcccagacctgcaggcgctgtctgggctttgtggccgttggtcaggagtactgtcctctccaaggatagtccttatagcccctgatggcaggaggcggctccgtgcctgcactaatggtgtgccgtgacaggggcggggatgagggctcactaactcgccagggcgcaggagcagggccgccggggtcttgtgctggtggaggcagcgtcaggcaggagccagtgttgcttgctgcagcttagacggagcgaggcggggctcaccggcccacatggggctgccgggcagagcaggttccgccctcctgatggagtggtcggaggtgcgctgagaacctggccgccggtggctgacctcagacctcggggggagttgggagtggagggttgctgggggacacttggctttctctcccacgtgccacctcccctcgtgtcccagaccctgcctgactgccttcctgttgggctctccctttccatcacagaaccaacctatgaccctgtgagcgaggaccaagaccccttgtccagcgacttcaagaggctgggcctgcggaagccaggcctgccccgagggctgtggctggcgaagccctcggcgcgggtgccgggcaccaaggccagccgaggcagcggggctgaggtcacgctcatcgacttcggtgaggagcccgtggtcccggccctacggccctgcgcgccctccctggcgcagctggccatggacgcctgctccctgctggacgagaccccgcctcagagccccacgcgggcactgccccggcccctgcaccccacgcctgtggtggactgggacgcacgcccgctgccccccccgcccgcctatgacgacgtggcccaggatgaggatgactttgagatctgctccatcaacagcaccctcgtgggcgcgggggtccctgccgggcccagccagggccagaccaactacgcctttgtgcctgagcag

SEQ ID NO: 14554 - DNA, 5951 bp, Homo sapiens
gtgttcagtggaaagcgactggaggctgagttcccacctcatcactctcagagcaccttccggaagacctcgcccgcccctgggggcccagcaggggaggggcccctgcagagcctcacctgcctcattggggagaaggacctgcgcctcctggagaagctgggtgatggttcctttggcgtggtgcgcaggggcgagtgggacgcgccctcagggaagacggtgagctctctgtgtcctgccagcgcagcagaggcatgggacccggggctggtagtggctcttctgcccccaaccagggtgtggatgggactggggatgcgtcacagtgtggctcatcccagagtccgtgctcaggatttttggggttttatttatttatttatttttgagatggagtctcgctctgtcgcccaggctggagtgcagtaggcacgatctcggcttcctgcaacctccactttccgggttcaagcaatcctcctgcctcagcctcctgagtagctgggattacaggcatgcaccaccacactcagttaatttttgtatttttagtagagacggggtttcaccatgttggccaggctggtctcgaactcctgacctcagatgatctgcccactttagcctcccaaagtgcttggattacaggtgtgagccaccacgtccagcccatgctcaggtttaactaagcacatttattatttcaactataaaaataatttattataaaagtttggaaagtatttgaaaaacaagaaaaaaaaaatcgcctgtaatcccaccactcagaggaagccgagcctcttcctcccactttaggtattttgttggatttagttaagatacaaattctggatacagcttttaaaatcttgttctttcttctcggcgttgcatttaacattttcccctcagggataacgtgtcaccacagcatacagttctggtgtgactgtttcctgtgcagcagccgtgtccttactgctcagatcacgtgcggtgcattcccagcacctcagagggctcctcattctccgtccactcagtgcgtccttctcccggggaagccgctgtcactcagtgcatccttctcccggggaagccgctgtgcagacttccagctccacagctttgtttttggcattacatttacagcattttccttctacagcaaaacaccttttaatattccattttatgaccagcctgagcaatatggagaaaccccatctctactaaaaatacaaaattagccaggcgtggtggcacctgcctgtaatcccagctactcaggaggctgaggcaggagaatcacttgaacccgggaggcagaggttgcagtgagctgagatcacgtcactgcattccagcctgggcgacaagagcgagactgtctcaaaaaaaaaaattccattttataacatttgaatattctctcatcatactggttatctcttactttttggttggtatttaagcccggcattcccccaggaaggggaggtgtggccgacgatggctcctgagggccagccgtctgcccttctccagccaggcctcacgcagagcacgtaagcccaggcactggtgacatgcttacccacccagatgaggagctcacaggcagggatcgttgagccgagttggagggtggagcaggttggctccgcgtgtctgggacctggcaagtcctgagtccttgcaaatcccgctctgggcaggtgagtgtggctgtgaagtgcctgaagcccgatgtcctgagccagccagaagccatggacgacttcatccgggaggtcaatgccatgcactcgctcgaccaccgaaacctcatccgcctctacggggtggtgctcacgccgcccatgaagatggtgagtactgcgggcgggagggggcgggcagggagagggctccggtcccatatgtgtggttcggttcctctctccatcctaaggtcagaggcgccctagatcctactttggtcccccaacctgatggagtaaaggggtccacaggggcccagcctggtacgggctgtgtctgctgcggtccagtccgggtctgtctctggattttgctggtgctcagtgtcaagagagttactcccatgggaggggctggccactgagtttaatttggggaatttatgttttatttatctatttattttgagatggagtctcactttgtcgcccaggctggagtgcaatggcatgatctaggctcactgcaacctcggcctcctgggttcacgcgatattcctgcctcaggcttccaagtagctgggattacagccgtgcgctaccatgcctggctaatttttgtatttttagtagagacggggtttcaccatgttggccaggctggtctcaaactcctgacctcaaatgatccacccacctcggcctcccaaagtgctgggattacaggcgtgagccaccacgtccagctgagttttggaatttctagccactgcctctttgggctccttctctctaggcatcagtttcccaaattgcctcgagggagaggcctgagaaactgcaggactcctagaggtccccagacagcaggccaggaaggtgcgtgcagcctggctctggaaagccttcaggaaggggactgggggcccagcgtgggctgctgagaaggggcagggtcctccagctcattcctcctgcctcctccgtggcctcaggtgacagagctggcacctctgggatcgttgttggaccggctacgtaagcaccagggccacttcctcctggggactctgagccgctacgctgtgcaggtggctgagggcatgggctacctggagtccaagcgctttattcaccgtgacctggctgcccgcaatctgctgttggctacccgcgacctggtcaagatcggggactttgggctgatgcgagcactacctcagaatgacgaccattacgtcatgcaggaacatcgcaaggtgcccttcgcctggtgaggggcaggtgctgccagctcacagagtccctgcagacccaggcctcaaagcttctggggctttctggacccaccacagcccctggttttgcttgggcctgcccttgtctgttctaagcctggggtgccctcctttgcacccattcgctcaccatccatctaggaattcttgagggcccacgtgccagggtctgggtgctggaaatcacagggatacatgctgtgggactctccaaggggctttgctgggtggggtgatacggggatagatgctgtgtcctctccaaggggcattgttgggggtcgtgtttcagggatagatcctgtgtcctctccaaggggcattgctggcgggggggtgttatagggataaatgctgtgtcctctccaaagggcgttgctggggggggggtgttacaaggatagatgctgtgtcctcttcaaggggcatcgctgggggggtgttacagggatagatgctgtgtcctcttcaaggggcattgctggggggggtgttacagggatagatgccgtgtcctctccaaggggcgttgctggggggggtgttagagggacagatcctgtgtcctctccaaggggcatcgctgggggcgggtgttacagggatagatgctgtgtcctctccaaggggcactgctgggggggtgttacagggatagatgctgtgtcctctccaaggggcactgctgggggggtgttagagggacagatcctgtgtcctcttcaaggggcattgctggcgggtggtgttagagggatagacactgtgtcctctccaaggggcatcgctgggggcgggtgttacagggatagacgctgtgtcctctccaaggggcattgctgggggggtgttacagggatagatgctgtgtcctctccaaggggcactgctgggggggtgttacagggatagatgctgtgtcctctccaaggggcactgctgggggggtgttagagggacagatcctgtgtcctcttcaaggggcattgctggcgggtggtgttagagggatagacactgtgtcctctccaaggggcatcgctgggggcgggtgttacagggatagacgctgtgtcctctccaaggggcattgctgggggggtgttacagggatagatgctgtgtcctctccaaggggcattgctggggggcgggtgttacagggttagatgctgtgtcctctccaaggggcattgctggggggggtgttacagggatagatgctgtgtcctctccaaggggcattgctggggggggtgttacagggatagatgctgtgtcctctccaaggggcattgctgggggggtgttacagggatagatgctgtgtcctctccgagggtcattgctgagttaggtgatacagggatatatgctgtgtcctcttcaaggggcattgctgggggggtgttacagggatagatgctgtgtcctctccgaggggcattgctggggggcgggtgttacagggttagatgctgtgtcctctccaaggggcattgctgggggggggggtgttacagggatagatgctgtgtcctctccgagggtcactgctgagttaggtgatacagggatatatgctgtgtcctcttcaaggggcattgctgggggggtgttacagggatagatgctgtgtcctctccaaggggcatttctgtggggaggtattcaaaggtttcctaaaacatcagggaagttcgccagggaaagactcgttggtaagcatgttctagggagagctagtggtagacaggcccaggccacagcaggccttgtagatgggccagggctgcttacctgtgcactaggggtggtacttggccctgccctggcccctgtgtgggcttatcctctgctgagaccattgtggttctctggtgccagaggcacccagaggtctgtgatctgcctgctttgaggcgggaagggttgttccagttctgctttcccaagcggtggctgtgggcaacccttatgatccaggacgcatggtcatcttaacgagcagctggctttacacccagggcgagcagaggtcttaaattatgcccgttgtcctggagtaatttagagcagcctcttttgtattcaggcatcctggtttgcatggtaaggtatgaatatagttgcctttaaacagcacgatgaagtgggcgggttattgttctcatttcaccaaggaggataatgaaccttagcgatctcgagtgactttcccggccccatcccctttgaggggcagggctcgctctgcttccctgtctgggcaccaccctcctctctgcacctcagtccacgccgggatgtcctttctgacctcactgcagtggcacttccccctcaaccgggggtgcccagaacgaatgggtgtatttgggtgaagccagtatgactgtttctacccattttggttcttccccaggccctacccgaatttcccacccactgcttcctgccaaaggacccaaatccgaggatcccgccccaaatctgggaattgtcattctcccaccacagtcagaaaacagcctgtgatcttctctccctgccccatcccagagcctctgacctccttcctttccatgcttctctggctgggaaacttcctttcctcttcccccaccaggctgcaagtgaataagaggcctgggcttagacgatttccccaagtccctgcatcgtgtcgtcaaggggtcctgcccgcttcacacggcgcccctgagacccactgttgaacctggcacagggggtcacaacaagtgtttgctgcatgagtgttttaagtccctggggcggacgcaggtagggtgtttgagagggcttctctttgacccctgcctctgccaggtgtgcccccgagagcctgaagacacgcaccttctcccatgccagcgacacctggatgttcggggtgacactgtgggaaatgttcacctacgg

SEQ ID NO: 14555 - DNA, 829 bp, Homo sapiens
gtgttcagtggaaagcgactggaggctgagttcccacctcatcactctcagagcaccttccggaagacctcgcccgcccctgggggcccagcaggggaggggcccctgcagagcctcacctgcctcattggggagaaggacctgcgcctcctggagaagctgggtgatggttcctttggcgtggtgcgcaggggcgagtgggacgcgccctcagggaagacggtgagtgtggctgtgaagtgcctgaagcccgatgtcctgagccagccagaagccatggacgacttcatccgggaggtcaatgccatgcactcgctcgaccaccgaaacctcatccgcctctacggggtggtgctcacgccgcccatgaagatggcatcagtttcccaaattgcctcgagggagaggcctgagaaactgcaggactcctagaggtccccagacagcaggccaggaaggtgacagagctggcacctctgggatcgttgttggaccggctacgtaagcaccagggccacttcctcctggggactctgagccgctacgctgtgcaggtggctgagggcatgggctacctggagtccaagcgctttattcaccgtgacctggctgcccgcaatctgctgttggctacccgcgacctggtcaagatcggggactttgggctgatgcgagcactacctcagaatgacgaccattacgtcatgcaggaacatcgcaaggtgcccttcgcctggtgtgcccccgagagcctgaagacacgcaccttctcccatgccagcgacacctggatgttcggggtgacactgtgggaaatgttcacctacgg

SEQ ID NO: 14556 - DNA, 8147 bp, Homo sapiens
ctccgtgcctggagctgctcaggaggtgggaggtgaggggcaggaggccacaacagccggtgaggcttgggagcgggcctgggtgtcggtggtggcagagcttgactctgcccccttgtttcttcagtccctgaatatctccatgtttgtttggctgcctccgtctccatgtctccaggcggatggctctgtgtgagtctttgggcctgggtgtgcatctgtgggtctgtgtttggagttccctcctagcctggccttctcttcgccgtggcttcccacttgcgaagctgtgtccagtatttgtttcctggtgcggagtctgggaggccacctgccgcagctctgactgagtctaggctcagtccttctcagggtaccaggctgtgggcagaggggagacacctagatgtttcgtgctgtgtctagatttggagacacaaatgatgactggtctttcccaggggctcgtttggaggaaggggtggctggcagcacttttgttccgcatacagagcgggtgttggaatccattgcgggtccttggcctggtctggccctggagcctcggcttcctgtggtgggtgggagccaggcatccgggttatccctccaggcctgggcgcctgggacccctagggagaagagcgggcgggcgttttgaacagaatgtccggcattagttgagccatttctggactaccttcggcccggacgggaacgtggtgctgagatttccagagctggggcagccttaggcagttctcagcaccggcctctgttttccatcttgtctaccccagagatgttgaccagaggcccgggggcagcaggaggtagaaggttcatgcggaggtgttgggcccttttcctgctcccccaggaagtcctcatccgcccctgcttcagtcacggccgggtagcagccctggccctcccatggccacggggactccggcctgttcatggcgggagagagagggcgcggacagggcgggcctggaaggaagggctggcctcagtcccctctggactgctggtgcctcggccacactgagcctcacacgggtgcgtgtgggctgcgagaagtgacacggtcctcttggaagtcccactggagccttgggatgaagctgccttggagtgtgcgtgggcgccatcccgagggggagcttcctgtgcctccgagcgtgcgtgggcgccatcccgagggggagcttcttgtgcctcggagcgtgcgtgggcgccatcccgagggggagtttcttgtgcctcggagcgtgcgtgggcgccatcccgagggggagtttcttgtgcctcggagcgtgcgtgggcgccatcccgaggggagcttcgtgtgcctcggagcgtgcgtgggcgccatcccgaggggagcttcctgtgcctcggagcgtgcgtgggcgccatcccgagggggagtttcttgtgcctcggagcgtgcgtgggcgccatcccgaggggagcttcttgtgcctcggagtgtgcgtgggcgccatcccgaggggagcttcttgtgcctcggagtgtgcgtgggcgccatcccgagggggagcttcctgtgcctccgagcgtgcgtgggcgccatcccgagggggagtttcttgtgcctcggagcgtgcgtgggcgccatcccgaggggagcttcttgtgcctcggagtgtgcgtgggcgccatcccgaggggagcttcttgtgcctcggagcgtgcgtgggcgccatcccgagggggagtttcttgtgcctcggagcgtgcgtgggcgccatcccgaggggagcttcttgtgcctcggagtgtgcgtgggcgccatcccgaggggagcttcctgtgcctcggagcgtgcgtgggcgccatcccgaggggagcttcctgtgcctcggagcgtgcgtgggcgccatcccgagggagagtttcttgtgcctcggagcgtgcgtgggcgccatcccgaggggagcttcttgtgcctcggagtgtgcgtgggcgccatcccgaggggagcttcttgtgcctcggagtgtgcgtgggcgccatcccgagggggagcttcttgtgcctcggagcgtgcgtgggcgccatcccgagggggagtttcttgtgcctcggagtgtgcgtgggcgccatcccgaggggagcttcttgcacacgtcctccgcactcttactctccttcccccaggagcaagcatgttttctcgagtggtgtcaggactcccagcagccatgggggctcttgcctcggccatacctgcactaagggaggtgggcttgatgtctcctttccctctcagaagtgggtcccaaaggaggcttctgtgcctggagctgggcagtgttggcggaagggagaggccagacggagtgacctgccttgggcacgagtcacgctgctctgagcaaggtctcggcctcagcggcattctcacccagttactgagcgcctctgaagaggtgtggagagcagagtccggcgtctggcccgcggcagccaccggggagcccgtgggtgtagcgggagagccgcagcccagccggtgccggggttcctcctctacgggccgccgtgggaggctgtgtgcgtgctggggagccggggctctgctccttcgagtggccctgctatttttcagatgggactcgtctcgtctcggggtactgtcctctctccttccttccctccctgcaggcagggtgggaatcacagggtggctgtgtgtggtggggccaggccagtggccctgtgtatgaggaggctgggcagggggagcacagccccgtctccccgcgccccgcgccccccgcctccccgccgaccgtggtgctctcgggtttgactttggtctctgggatgggctgttccggagtcaccccgctccagccaggcctcgtcaccttacaaggctgtgggtctgggtgcccaggcgtcgccacctcctccgtcctctctccccggcctggctgggtttcagaggagcccttcttcacgctttggccctgggacaggagaagtgggggttggtggggagggcgtgcagtgtggtgccacacgtgtccaccctagcagctctgggctgtcaccgcccccgcgtgcccagactctgcccacggggctgtcaccgcccccgcctgcccagacactgcccacggggctctcaccgcccccgcctgcccagacactgcccacggggctctcaccgcccccgcctgcccagactctgctcacggcatcacgtatgacaagtccagcagcagacgcgggagcctcacaacctgtgagagccttcgggagtcaggagtgtcttgcgggagccctgtgcttcctggcctgcctgcccctgcccctgcccctgcccctgcccaggccccggcttaggccacatcagcagaggtttcgtgtctgaggtcagagggggactggcagccctactgtctggtcactgtgggagagctgagttcccttttggacacaggtagagcccctcctgaggagacggggaggctcccgcaggccttccgggaggtggtggaaagctccggaagcaggtgaagcggtggagggagggactgagttgcccgagtgctcctagactctcccgcgtctgcattcgggaggcaggttgtagctggaggcctggcccccagcctagtgcaaggccctaggtgtcccccggcacccccgcacctctcagaactcctggaacccagccgaggagtgaaatcaagtggccagaagaggactggggccccggccttgccagggaactgaggggtgaggaggaggtgtgggcggggcgctggccccacagacctgaaagctggcgttgggtcccaggtctgctgggatctttctggtaaccgtggacaggtcatgttgcctgctgcagcagcttccagcgtgcctccttatttgcaaaccatagggaaagctgcctgacccacctagagagttgtgggtaaggccgtgtgcaaacaggcctgtacggggcatggtgggtcacgggggctgttggggaggagggccggtggcacacagcctggtcctgaggcctgagctccatcccccttctgccacagtggccagggtgtgaggagggtcccagtgccggggctgccccgccacgcctggcgttcaccgtgccatctctgtcgcgcagggccgagaactactggtggcgtggccagaacacacggacgctgtgtgtggggcccttccctcgcaacgtggtgacctccgtggccggcctgtcggcccaggacatcagccagcccctgcagaacagcttcatccacacagggcatggcgacagtgacccccgccactgctggggcttcccggacaggattgacgagtgagtactgggcggggatggatgctgacctggccccgctcgggactccagggccctcagcacggcacgcgtgggcggaatctgctcttcaccctttcgcccgggcttcagcccccgacccgccactctcccctcctcaccctggccttactctcgggaagctgtggaaccctaggaagcccagcctggtgggggttctccaggggaatgttctccaggggagtgttctccaggggagggttctccaggggagggttctccaggggaatgttctccaggggagggttctccaggggagggttctccaggggagggttctccaggggaatgttctccaggggagggttctccaggggagggttctccggggagcgttctccaggggaatgctgtccctgccattttcaagctttggggggccgatctcctaactctgagacacttcatctgtgaaacaggttcacccccccaataaggggaaggctgtaaatgcactctgaattagcacttgctgctcagatgcaggggtcctgagagaagctttcccactcactgtagatgaaagtagggtcaggagcttctgaggatggactcctgtttggtggaaaggtccccggagccacagctgtaacccctcttggtactcgggccttaggaaaatgaacttgggaggaacccggtgggagctgctgaggaggagagcttctcccatgacccccctgtggccccctgtgaccctgtgaccctgtgacccctgcacacgagcagtggttttccttctcctgctggtggtgccagagtcctggagacgtgaacctgctggctcaggccctggggatgtatgcaggtccacatgggagtgagcctgctttccagaaccagagtgggactggggaccttggggactgcagagggaacgttaggtggcagctccgcctccccaccacacagtactctacggagctcactccatacctgggagaggccctgtctcctatgtaagaggataaggccaccgaggggcatctgggaaggacacgcagaatcagtcacttccgggatgccaccccccaccccccgaagcttcttgcgccaggcctccaagcctctctgctggccgcagggggattccaggcccctggcctctgcagcccttctcctgctgacttctgatactctggtctgccctgagaggcgtggaaagcaggggccttcacccaccgggccccacacaccagaaccccacacagcgggcccccacacaccagaacccacacagcgggcccccacacaccagaaccccacacagcgagtccccccacaccagaacccacacagcgggcccccacacaccagaacccacacagcgggcccacacacactggaaccccaagctcacagggctcagcccatgtgttttgcctaaaaagaacccagcaagggcctgagagttggggtgaaagactgcagacacctccaggagaggctggtgccctctgccccactcctggcatgctgtggccagcccagccccattcctccaggctttaatcagccccagtgactaagtctcagatactgacagttggtgcagggacggagggtggatccggagcaggacaggtggcccagcctctcccgcacctcctggccatgtggcagaagggtgcctcctgcccaccctggctgggcaccatagctgggatgccccgttcttaggccctccatcgtggcctgcgggacaggagtgtctgccctctggccgctgcctggtgtgggctgggggcctggggggttgtggaggaccacctctgcccttgtagggtgtagttggagtccctgaggtcctaggctttccatcctggggtcaggtgtcctttctctgccttctctccaggacaccccccagctgagacgtgcggtcaggttctgtggactgggaggcgggaggcctgtgcttcagacccaagactacacccggtttcctccaggacgaaggggctctgatgagattctgccacccctccacacgcttcccctgctctcttgacccagctctctcccccacagactgtatctgggaaaccccatggacccccccgacctcctgagcgtggaactgagcacctcccggcccccccagcatctaggaggggtgaaaagtaagagcccctctgctccctggtgtccctaactcatcggctactcaggaaggggcactgtcttcacaggccaccctaaggctgctgttctgtttttggggacagtggggtcagggcagcaggcgggacagctgtgtccctggctccggctgggcgtggggtggaagacaggcagctgtatccgccgaggtgggcctcctcgggctgggtctgcagcaggcccgtccgccccggcgtccctcctccctccttccacggccgagctcagatcctggctttcctcacttccccctaatcctgctctcctgtcccaagccaaaaccaccccacggctccggctctgcctggggcctcctccatctcccggtcctctgcctatcatactggaccgccgtgttcctcatcctgccgcctgcggcctcccgtttgctgggggcttgtacattcactcgcccccattcacttctctcccttcgtctctctacactctgccctctcgtccggccgtctccctcctttgtcctctgtcctgctccgtctctctccccctgtccgcatggcctttcttgcaggggagcctccacctcgcccacctcagcctgccttcttcactcagagtaagtggggctgcttccgatgccttggcccccgcccccgccccctctctctcactcctctcctggaaggtacagagcctgggcggctgggccggaggggaggtgggtgggtgtgtgctgtgagcttccgcggctgccctggcctagcatgcctgccccccctcgagcccgccccccggagcctgggcttctgctcacgagtgtggccctggcttccgcctcggcctcactccctcccagacctgtctgagcttctggagcacgagtgtggccctggcttctgccttggcctcgctgcctcccagacctgcaggcgctgtctgggctttgtggccgttggtcaggagtactgtcctctccaaggatagtccttatagcccctgatggcaggaggcggctccgtgcctgcactaatggtgtgccgtgacaggggcggggatgagggctcactaactcgccagggcgcaggagcagggccgccggggtcttgtgctggtggaggcagcgtcaggcaggagccagtgttgcttgctgcagcttagacggagcgaggcggggctcaccggcccacatggggctgccgggcagagcaggttccgccctcctgatggagtggtcggaggtgcgctgagaacctggccgccggtggctgacctcagacctcggggggagttgggagtggagggttgctgggggacacttggctttctctcccacgtgccacctcccctcgtgtcccagaccctgcctgactgccttcctgttgggctctccctttccatcacagaaccaacctatgaccctgtgagcgaggaccaagaccccttgtccagcgacttcaagaggctgggcctgcggaagccaggcctgccccgagggctgtggctggcgaagccctcggcgcgggtgccgggcaccaaggccagccgaggcagcggggctgaggtcacgctcatcgacttcggtgaggagcccgtggtcccggccctacggccctgcgcgccctcc

SEQ ID NO: 14557 - DNA, 686 bp, Homo sapiens
ctccgtgcctggagctgctcaggaggtgggaggtgaggggcaggaggccacaacagccggtgaggcttgggagcgggcctgggtgtcggtggtggcagagcttgactctgcccccttgtttcttcagtccctgaatatctccatgtttgtttggctgcctccgtctccatgtctccagggccgagaactactggtggcgtggccagaacacacggacgctgtgtgtggggcccttccctcgcaacgtggtgacctccgtggccggcctgtcggcccaggacatcagccagcccctgcagaacagcttcatccacacagggcatggcgacagtgacccccgccactgctggggcttcccggacaggattgacgaactgtatctgggaaaccccatggacccccccgacctcctgagcgtggaactgagcacctcccggcccccccagcatctaggaggggtgaaaaaaccaacctatgaccctgtgagcgaggaccaagaccccttgtccagcgacttcaagaggctgggcctgcggaagccaggcctgccccgagggctgtggctggcgaagccctcggcgcgggtgccgggcaccaaggccagccgaggcagcggggctgaggtcacgctcatcgacttcggtgaggagcccgtggtcccggccctacggccctgcgcgccctcc

SEQ ID NO: 14558 - DNA, 8145 bp, Homo sapiens
accacagcacctgccctccgtgcctggagctgctcaggaggtgggaggtgaggggcaggaggccacaacagccggtgaggcttgggagcgggcctgggtgtcggtggtggcagagcttgactctgcccccttgtttcttcagtccctgaatatctccatgtttgtttggctgcctccgtctccatgtctccaggcggatggctctgtgtgagtctttgggcctgggtgtgcatctgtgggtctgtgtttggagttccctcctagcctggccttctcttcgccgtggcttcccacttgcgaagctgtgtccagtatttgtttcctggtgcggagtctgggaggccacctgccgcagctctgactgagtctaggctcagtccttctcagggtaccaggctgtgggcagaggggagacacctagatgtttcgtgctgtgtctagatttggagacacaaatgatgactggtctttcccaggggctcgtttggaggaaggggtggctggcagcacttttgttccgcatacagagcgggtgttggaatccattgcgggtccttggcctggtctggccctggagcctcggcttcctgtggtgggtgggagccaggcatccgggttatccctccaggcctgggcgcctgggacccctagggagaagagcgggcgggcgttttgaacagaatgtccggcattagttgagccatttctggactaccttcggcccggacgggaacgtggtgctgagatttccagagctggggcagccttaggcagttctcagcaccggcctctgttttccatcttgtctaccccagagatgttgaccagaggcccgggggcagcaggaggtagaaggttcatgcggaggtgttgggcccttttcctgctcccccaggaagtcctcatccgcccctgcttcagtcacggccgggtagcagccctggccctcccatggccacggggactccggcctgttcatggcgggagagagagggcgcggacagggcgggcctggaaggaagggctggcctcagtcccctctggactgctggtgcctcggccacactgagcctcacacgggtgcgtgtgggctgcgagaagtgacacggtcctcttggaagtcccactggagccttgggatgaagctgccttggagtgtgcgtgggcgccatcccgagggggagcttcctgtgcctccgagcgtgcgtgggcgccatcccgagggggagcttcttgtgcctcggagcgtgcgtgggcgccatcccgagggggagtttcttgtgcctcggagcgtgcgtgggcgccatcccgagggggagtttcttgtgcctcggagcgtgcgtgggcgccatcccgaggggagcttcgtgtgcctcggagcgtgcgtgggcgccatcccgaggggagcttcctgtgcctcggagcgtgcgtgggcgccatcccgagggggagtttcttgtgcctcggagcgtgcgtgggcgccatcccgaggggagcttcttgtgcctcggagtgtgcgtgggcgccatcccgaggggagcttcttgtgcctcggagtgtgcgtgggcgccatcccgagggggagcttcctgtgcctccgagcgtgcgtgggcgccatcccgagggggagtttcttgtgcctcggagcgtgcgtgggcgccatcccgaggggagcttcttgtgcctcggagtgtgcgtgggcgccatcccgaggggagcttcttgtgcctcggagcgtgcgtgggcgccatcccgagggggagtttcttgtgcctcggagcgtgcgtgggcgccatcccgaggggagcttcttgtgcctcggagtgtgcgtgggcgccatcccgaggggagcttcctgtgcctcggagcgtgcgtgggcgccatcccgaggggagcttcctgtgcctcggagcgtgcgtgggcgccatcccgagggagagtttcttgtgcctcggagcgtgcgtgggcgccatcccgaggggagcttcttgtgcctcggagtgtgcgtgggcgccatcccgaggggagcttcttgtgcctcggagtgtgcgtgggcgccatcccgagggggagcttcttgtgcctcggagcgtgcgtgggcgccatcccgagggggagtttcttgtgcctcggagtgtgcgtgggcgccatcccgaggggagcttcttgcacacgtcctccgcactcttactctccttcccccaggagcaagcatgttttctcgagtggtgtcaggactcccagcagccatgggggctcttgcctcggccatacctgcactaagggaggtgggcttgatgtctcctttccctctcagaagtgggtcccaaaggaggcttctgtgcctggagctgggcagtgttggcggaagggagaggccagacggagtgacctgccttgggcacgagtcacgctgctctgagcaaggtctcggcctcagcggcattctcacccagttactgagcgcctctgaagaggtgtggagagcagagtccggcgtctggcccgcggcagccaccggggagcccgtgggtgtagcgggagagccgcagcccagccggtgccggggttcctcctctacgggccgccgtgggaggctgtgtgcgtgctggggagccggggctctgctccttcgagtggccctgctatttttcagatgggactcgtctcgtctcggggtactgtcctctctccttccttccctccctgcaggcagggtgggaatcacagggtggctgtgtgtggtggggccaggccagtggccctgtgtatgaggaggctgggcagggggagcacagccccgtctccccgcgccccgcgccccccgcctccccgccgaccgtggtgctctcgggtttgactttggtctctgggatgggctgttccggagtcaccccgctccagccaggcctcgtcaccttacaaggctgtgggtctgggtgcccaggcgtcgccacctcctccgtcctctctccccggcctggctgggtttcagaggagcccttcttcacgctttggccctgggacaggagaagtgggggttggtggggagggcgtgcagtgtggtgccacacgtgtccaccctagcagctctgggctgtcaccgcccccgcgtgcccagactctgcccacggggctgtcaccgcccccgcctgcccagacactgcccacggggctctcaccgcccccgcctgcccagacactgcccacggggctctcaccgcccccgcctgcccagactctgctcacggcatcacgtatgacaagtccagcagcagacgcgggagcctcacaacctgtgagagccttcgggagtcaggagtgtcttgcgggagccctgtgcttcctggcctgcctgcccctgcccctgcccctgcccctgcccaggccccggcttaggccacatcagcagaggtttcgtgtctgaggtcagagggggactggcagccctactgtctggtcactgtgggagagctgagttcccttttggacacaggtagagcccctcctgaggagacggggaggctcccgcaggccttccgggaggtggtggaaagctccggaagcaggtgaagcggtggagggagggactgagttgcccgagtgctcctagactctcccgcgtctgcattcgggaggcaggttgtagctggaggcctggcccccagcctagtgcaaggccctaggtgtcccccggcacccccgcacctctcagaactcctggaacccagccgaggagtgaaatcaagtggccagaagaggactggggccccggccttgccagggaactgaggggtgaggaggaggtgtgggcggggcgctggccccacagacctgaaagctggcgttgggtcccaggtctgctgggatctttctggtaaccgtggacaggtcatgttgcctgctgcagcagcttccagcgtgcctccttatttgcaaaccatagggaaagctgcctgacccacctagagagttgtgggtaaggccgtgtgcaaacaggcctgtacggggcatggtgggtcacgggggctgttggggaggagggccggtggcacacagcctggtcctgaggcctgagctccatcccccttctgccacagtggccagggtgtgaggagggtcccagtgccggggctgccccgccacgcctggcgttcaccgtgccatctctgtcgcgcagggccgagaactactggtggcgtggccagaacacacggacgctgtgtgtggggcccttccctcgcaacgtggtgacctccgtggccggcctgtcggcccaggacatcagccagcccctgcagaacagcttcatccacacagggcatggcgacagtgacccccgccactgctggggcttcccggacaggattgacgagtgagtactgggcggggatggatgctgacctggccccgctcgggactccagggccctcagcacggcacgcgtgggcggaatctgctcttcaccctttcgcccgggcttcagcccccgacccgccactctcccctcctcaccctggccttactctcgggaagctgtggaaccctaggaagcccagcctggtgggggttctccaggggaatgttctccaggggagtgttctccaggggagggttctccaggggagggttctccaggggaatgttctccaggggagggttctccaggggagggttctccaggggagggttctccaggggaatgttctccaggggagggttctccaggggagggttctccggggagcgttctccaggggaatgctgtccctgccattttcaagctttggggggccgatctcctaactctgagacacttcatctgtgaaacaggttcacccccccaataaggggaaggctgtaaatgcactctgaattagcacttgctgctcagatgcaggggtcctgagagaagctttcccactcactgtagatgaaagtagggtcaggagcttctgaggatggactcctgtttggtggaaaggtccccggagccacagctgtaacccctcttggtactcgggccttaggaaaatgaacttgggaggaacccggtgggagctgctgaggaggagagcttctcccatgacccccctgtggccccctgtgaccctgtgaccctgtgacccctgcacacgagcagtggttttccttctcctgctggtggtgccagagtcctggagacgtgaacctgctggctcaggccctggggatgtatgcaggtccacatgggagtgagcctgctttccagaaccagagtgggactggggaccttggggactgcagagggaacgttaggtggcagctccgcctccccaccacacagtactctacggagctcactccatacctgggagaggccctgtctcctatgtaagaggataaggccaccgaggggcatctgggaaggacacgcagaatcagtcacttccgggatgccaccccccaccccccgaagcttcttgcgccaggcctccaagcctctctgctggccgcagggggattccaggcccctggcctctgcagcccttctcctgctgacttctgatactctggtctgccctgagaggcgtggaaagcaggggccttcacccaccgggccccacacaccagaaccccacacagcgggcccccacacaccagaacccacacagcgggcccccacacaccagaaccccacacagcgagtccccccacaccagaacccacacagcgggcccccacacaccagaacccacacagcgggcccacacacactggaaccccaagctcacagggctcagcccatgtgttttgcctaaaaagaacccagcaagggcctgagagttggggtgaaagactgcagacacctccaggagaggctggtgccctctgccccactcctggcatgctgtggccagcccagccccattcctccaggctttaatcagccccagtgactaagtctcagatactgacagttggtgcagggacggagggtggatccggagcaggacaggtggcccagcctctcccgcacctcctggccatgtggcagaagggtgcctcctgcccaccctggctgggcaccatagctgggatgccccgttcttaggccctccatcgtggcctgcgggacaggagtgtctgccctctggccgctgcctggtgtgggctgggggcctggggggttgtggaggaccacctctgcccttgtagggtgtagttggagtccctgaggtcctaggctttccatcctggggtcaggtgtcctttctctgccttctctccaggacaccccccagctgagacgtgcggtcaggttctgtggactgggaggcgggaggcctgtgcttcagacccaagactacacccggtttcctccaggacgaaggggctctgatgagattctgccacccctccacacgcttcccctgctctcttgacccagctctctcccccacagactgtatctgggaaaccccatggacccccccgacctcctgagcgtggaactgagcacctcccggcccccccagcatctaggaggggtgaaaagtaagagcccctctgctccctggtgtccctaactcatcggctactcaggaaggggcactgtcttcacaggccaccctaaggctgctgttctgtttttggggacagtggggtcagggcagcaggcgggacagctgtgtccctggctccggctgggcgtggggtggaagacaggcagctgtatccgccgaggtgggcctcctcgggctgggtctgcagcaggcccgtccgccccggcgtccctcctccctccttccacggccgagctcagatcctggctttcctcacttccccctaatcctgctctcctgtcccaagccaaaaccaccccacggctccggctctgcctggggcctcctccatctcccggtcctctgcctatcatactggaccgccgtgttcctcatcctgccgcctgcggcctcccgtttgctgggggcttgtacattcactcgcccccattcacttctctcccttcgtctctctacactctgccctctcgtccggccgtctccctcctttgtcctctgtcctgctccgtctctctccccctgtccgcatggcctttcttgcaggggagcctccacctcgcccacctcagcctgccttcttcactcagagtaagtggggctgcttccgatgccttggcccccgcccccgccccctctctctcactcctctcctggaaggtacagagcctgggcggctgggccggaggggaggtgggtgggtgtgtgctgtgagcttccgcggctgccctggcctagcatgcctgccccccctcgagcccgccccccggagcctgggcttctgctcacgagtgtggccctggcttccgcctcggcctcactccctcccagacctgtctgagcttctggagcacgagtgtggccctggcttctgccttggcctcgctgcctcccagacctgcaggcgctgtctgggctttgtggccgttggtcaggagtactgtcctctccaaggatagtccttatagcccctgatggcaggaggcggctccgtgcctgcactaatggtgtgccgtgacaggggcggggatgagggctcactaactcgccagggcgcaggagcagggccgccggggtcttgtgctggtggaggcagcgtcaggcaggagccagtgttgcttgctgcagcttagacggagcgaggcggggctcaccggcccacatggggctgccgggcagagcaggttccgccctcctgatggagtggtcggaggtgcgctgagaacctggccgccggtggctgacctcagacctcggggggagttgggagtggagggttgctgggggacacttggctttctctcccacgtgccacctcccctcgtgtcccagaccctgcctgactgccttcctgttgggctctccctttccatcacagaaccaacctatgaccctgtgagcgaggaccaagaccccttgtccagcgacttcaagaggctgggcctgcggaagccaggcctgccccgagggctgtggctggcgaagccctcggcgcgggtgccgggcaccaaggccagccgaggcagcggggctgaggtcacgctcatcgacttcggtgaggagcccgtggtcccggccctac

SEQ ID NO: 14559 - DNA, 565 bp, Homo sapiens
accacagcacctgccctccgtgcctggagctgctcaggaggtgggaggtgaggggcaggaggccacaacagccgggccgagaactactggtggcgtggccagaacacacggacgctgtgtgtggggcccttccctcgcaacgtggtgacctccgtggccggcctgtcggcccaggacatcagccagcccctgcagaacagcttcatccacacagggcatggcgacagtgacccccgccactgctggggcttcccggacaggattgacgaactgtatctgggaaaccccatggacccccccgacctcctgagcgtggaactgagcacctcccggcccccccagcatctaggaggggtgaaaaaaccaacctatgaccctgtgagcgaggaccaagaccccttgtccagcgacttcaagaggctgggcctgcggaagccaggcctgccccgagggctgtggctggcgaagccctcggcgcgggtgccgggcaccaaggccagccgaggcagcggggctgaggtcacgctcatcgacttcggtgaggagcccgtggtcccggccctac

SEQ ID NO: 14560 - DNA, 4276 bp, Homo sapiens
gagggagagggacccggcgaggggctcaggacccggaggcgccggcggaggaggaggtggtgactggcaggcccgggccccacggtacctccggggctgaaggggacgcaggatgtaggggcatggggagtcgggcgcagaagagtgcggggaaccgctgagctctgggagccactgcctgagggcaggccgcggccggcgggaacctcttctgccgtctcagcctgggcgtcgctgaagctgtgtctgcggggaggcagcggaaggcggcagaggctgggaggcggcagaatgcagccagaggagggcacaggctggctgctggagctgctgtccgaggtgcagctgcaacagtacttcctgcggctccgagatgacctcaacgtcacccgcctgtcccactttgagtacgtcaagaatgaggacctggagaagatcggcatgggtcggcctggccagcggcggctgtgggaggctgtgaagaggaggaaggccttgtgcaaacgcaagtcgtggatgagtaaggtgttcagtggaaagcgactggaggctgagttcccacctcatcactctcagagcaccttccggaagacctcgcccgcccctgggggcccagcaggggaggggcccctgcagagcctcacctgcctcattggggagaaggacctgcgcctcctggagaagctgggtgatggttcctttggcgtggtgcgcaggggcgagtgggacgcgccctcagggaagacggtgagtgtggctgtgaagtgcctgaagcccgatgtcctgagccagccagaagccatggacgacttcatccgggaggtcaatgccatgcactcgctcgaccaccgaaacctcatccgcctctacggggtggtgctcacgccgcccatgaagatggtgacagagctggcacctctgggatcgttgttggaccggctacgtaagcaccagggccacttcctcctggggactctgagccgctacgctgtgcaggtggctgagggcatgggctacctggagtccaagcgctttattcaccgtgacctggctgcccgcaatctgctgttggctacccgcgacctggtcaagatcggggactttgggctgatgcgagcactacctcagaatgacgaccattacgtcatgcaggaacatcgcaaggtgcccttcgcctggtgtgcccccgagagcctgaagacacgcaccttctcccatgccagcgacacctggatgttcggggtgacactgtgggaaatgttcacctacggccaggagccctggatcggcctcaacggcagtcagatcctgcataagatcgacaaggagggggagcggctgccccggcccgaggactgtccccaggacatctacaacgtcatggtccagtgctgggctcacaagccagaggacagacccacgtttgtggccctgcgggacttcctgctggaggcccagcccacagacatgcgggcccttcaggactttgaggaaccggacaagctgcacatccagatgaatgatgtcatcaccgtcatcgagggaagggccgagaactactggtggcgtggccagaacacacggacgctgtgtgtggggcccttccctcgcaacgtggtgacctccgtggccggcctgtcggcccaggacatcagccagcccctgcagaacagcttcatccacacagggcatggcgacagtgacccccgccactgctggggcttcccggacaggattgacgaactgtatctgggaaaccccatggacccccccgacctcctgagcgtggaactgagcacctcccggcccccccagcatctaggaggggtgaaaagggagcctccacctcgcccacctcagcctgccttcttcactcagaaaccaacctatgaccctgtgagcgaggaccaagaccccttgtccagcgacttcaagaggctgggcctgcggaagccaggcctgccccgagggctgtggctggcgaagccctcggcgcgggtgccgggcaccaaggccagccgaggcagcggggctgaggtcacgctcatcgacttcggtgaggagcccgtggtcccggccctacggccctgcgcgccctccctggcgcagctggccatggacgcctgctccctgctggacgagaccccgcctcagagccccacgcgggcactgccccggcccctgcaccccacgcctgtggtggactgggacgcacgcccgctgccccccccgcccgcctatgacgacgtggcccaggatgaggatgactttgagatctgctccatcaacagcaccctcgtgggcgcgggggtccctgccgggcccagccagggccagaccaactacgcctttgtgcctgagcaggcgcggccgccccctcccctggaggacaacctgttcctcccgccccagggtgggggcaagccgcccagctccgcacagaccgcagagatcttccaggcgctacagcaggagtgcatgaggcaactgcaggctccggccggctccccggccccctctcccagcccggggggtgacgacaagccccaggtgcctcctcgggtacccatcccccctcggcccacgcgcccacacgtccagctgtctccagcccccccgggcgaggaggagaccagccagtggcctggacctgcttcccctccccgggtgcctccgcgggagcccctgtcccctcaaggctcgaggacacccagccccctggtaccacctggcagctccccgctgccaccccggctctcaagctcacctgggaagaccatgcccaccacccagagctttgcctcagaccccaagtacgccaccccccaggtgatccaggcccctggcccgcgggctggtccctgcatcctgcccatcgtccgggatggcaagaaggtcagcagcacccactattacttgctgcccgagcgaccatcctacctggagcgctaccagcgcttcctgcgtgaggcccagagccccgaggagcctacccccctgcctgtgcctctgctgctgcccccacccagcaccccagcccccgccgcccccacggccaccgtgcggccgatgccccaggctgccttggaccccaaggccaacttctccaccaacaacagcaacccaggggcccggccaccacccccgagggccactgctcggctgccacagaggggctgccctggcgatgggccagaggcgggccggccagcagacaagatccagatgctgcaggccatggtgcatggggtgaccacagaggagtgccaggcggccctgcagtgccacggctggagcgtgcagagggctgcccagtatctgaaggtggagcagctcttcgggctgggtctgcggcccagaggggagtgccacaaagtgctggagatgttcgactggaacctggagcaggccggctgccaccttctgggctcctggggccctgcccaccacaagcgctgagatgcgtctggagagccagagggcctgcctgaaggaatcacctgagcctgtccgtccaccaggagtggggagatgcccccatccagtcctggaggacccgctgctcctgctgctcccggggatggagcaaggccaaggctgcgggaggctgggagccctgccctgcccatccctcctgcaccagcgctgtccctgcacactttggttcagtcccggtgcccctgccaagatgtggaaggggccgggtgaagacaggcttgagggctgccccagcaggctctgggtatgacctgcctctggccctggtcctgggcggggcctgtgggtggagtagtacccccaggccctgccctgggtgacagactgggaggaaaccaggctggacctgggcaggcgggatgtgttggccacagggagaggcggaccggcacccggtgggacctcctaggactgggccttcttccagggggcccctggcagcagctggggtgtcgggcagaatgtgacttgtggccttaccatggacttgaatgggacttggctggcctcaggatcttgtgcctggaaatagcctgaggtggctcaggaagcggagaaagggtgccagaccattctctggcggggaccagggcccaaggccccagggctggaaggagaccaaggggcagccgccctggagggacatcagtgcttcctcttccacccaattcccccacgcggttccatgttttcccaccagcctgttggcgaagttgctgctccggcattcagtacctgcttcttccagagaaataaagttagtttctattttatgtta

SEQ ID NO: 14561 - DNA, 29365 bp, Homo sapiens
gacagaaacaggacagaggatcccggctgcagccagcgtgaggaaagctctgctccctgccagaccggccagctgtggaaacccagcggggcttgcagcagagcggaggggcccaccccgttcttcctcatttcccacccctggtgtgggatttggggggctcctgggcagagtgcgaagctccggagccgaggccactggatccccagtgactgctcgggggggtcccgctgcgtggagatgccggcagcacgtcggttccctggcctggagctctccttccctctcctggccagactgcggcgacgcctgtacacagtgagtggggggcaggggctggactgctggggactggttgggctcctcagcaccagcacttgactgagaggcagaaagcaagactgggagcggctgagggaccccgccagtgagggcttgacggggagtccgggccaagtggcctctcctgcggctgctgcattccttcttcttggcctgtgtgtttgcacgccggccacagagtagtgacggacacaggtgtgcagactccatgaggtgcgggggccaggaccatgcagaattggagagtgtttgaactctggaggagctgcagccatgccctgtgctgcacaaagaaccttgggctggagggggacttagaggggaggcggacccctgcggagtcaccctggactgagaccctgaccgcttgcctcaccagcatcccggagttccttcccgtcctcccacatgcatcccctgtgcagagctgcgctgttgctgggtcagggagcatggagtgcacagctgaacagaggtgcattagctggtgtttcagggagagggaacaggccgggctgtgctttctgaagagcttcaggggaggggcctctgggtctcccccagccctgaccaccccgggcatggctttgagctgttttcaggagcctagaggagggggcctggatccttgggagttggtggtgggaaaaagaagaggagccctggagactgctctccctgcgggagactaggagcctccatcctgaggctgagccctggagggggggggtcactttgctccagggacagggcagcggtggccgtggccgggtggagaggagacgctgcctaggcccgtgactcctagtgtgcctctgggcttgcttccggaaagccacgacgcctggtcctcttaaaccccacgcctcttgttttgtaaacagatgattttgttgaggataaatgaatacagcttaatacttagaactgttcctcgcatatagtaagtgcagttgaagtgttagattttattttattttgagatggagttttgctcttgttgcccaggctggagtgcaatggcacgatcttggctcaccacagcctccgcctcccgggttcaagtgattctcctgcctcagcctcctgagtagctgagattacaggcatgtgccaccaggcccggctaattttctattttcagtagagatggggtttctccatgttggtcaggctggtctcgaactcaggtgatccgcccacctcagcctaagtgctgggattacagctgtgagccactgtgcttggcctagatgttatttttattgttacttgtcttaaataaagttaatagaaatatataacctgttatattaacatgttaacctgtgtacagtgaaacaagcaacacagtgggaactctaatataaagagacataagaggaaggtaataatattttatgtatcctaatacgttagtaacctagacaatgtagtgaggagtcagatcttgagacctcaggtggaaacaccgtgaaggcagcatctgcaagtgctgaccgagaggggagttttgaaataatgagagggggttgccttcactgacatttttgcaaatagtggacttctgctatgttctgaataaagcaaagtccattttcccttaagtttacacagtagtttcattccaggaaaatttattttatattaaaactgtaaggccaggagcagtggctccccagcactttgggaggccagggcaggtggatcacttgagctcaggagttcgagaccagcctggccaacatggaggaaccctgtctccactaaaaatacaaaaattagccgggcgcctgtgatcccagcttcttgggaggctgaggcgggagaattgcctgaacccgggaggctgagtttgcaatgagccaagatcataccattgtactccagcctgggagtctcactctgtctcaaaaaaaaaaaaaaaaaaaaccaaaaaactataaaagtactttcttatttatatataaagtgggatcatattctaggtttgcatgatcataaacaccttcatgaattgagttgtgtgggatttgggacagtgcgagaatgtcctacgcattgcaggctagctcacgctcttgtcccccaaccacccactgaatgtcactaaggcccccccaaatgttgtggcaaccagaactgtcccatagggggctgtgcagcctcatgagaaccattccagtaaagggttacagctttaagtttggaaaccacccggctggcccagctgcctggcccggtcgccgaggtggaagagccaggatttgaactgagagtttctcattcccctttgttactctttgtacttccctgagctgcctgaaaaagtcggaactggcactgtgttggcagggccactgggaactgtgggggcaggaggctcacgctgggcccaggctgtgtgtgcctgcttctcagtgctgctcactgtgatgggagctggggaggaggccaccgctgagtgggggagggggatggcttggtccccagccgggcagctggccttttttctctcgcctgttcctctttggggattgagcatgggtccggggctagcctggccacgccctcagctctgacacaccttacgcagacagggatgggtttgctgtgcggtgggtccgcttgcttagctttgaaggtgccaccagcttctttatctgggcccaggatagtgtaggtcagaggtcactctccggtaccactggctgattgcggcctgcagtgtgctttggccagcacgctgtgtgtgcgtgtgcatgcttttcagatctgaactattcagcattgttaaaaagtcaggagaaagacgaatattaagtgaaatcagggaacagaatggtatggttaatgcgtgaatattcgtgtagggacaacagagtctgaagcgtccgcagaagacatcactggcaactcctggggagccgggtggctgtgcagctggggagggaatgagattcgtggctcagtgtgccttctgaatattttaccacgtgcatatattaccttttccaaactttaatggtgagatttcacatgtaaattgggatttatttcttgaaaaaatggaaagctttgacaacactgggccacagtttcttctgacaaccattgatgggatctgagctccctgttgacaggggtgtctgcgagcccaccgcaggccccacccctccctcctgtcttccgcttgctgtggccctgtaggcacttgagtggtggcccgtggagtggtctttggattgttaggagaggctggggtggtcaggcgctgggaggaacttagcttagagctcatctgaccctgagagttttctccgtcacatctaaggagcccatagatgggtctcggggcacattgcaccctagagatttttatcaaatattaggagtaagaacacgtcggtgttcccggagagaccactgttagtttttaaaagattttcaaggactttcgacccctagaaacttagagcaggaatgtgagcacaggttgatcttgggtcactcagtcacagatcacatttcgggagcaagaccctgactcctgactccagggccagggctgtatctccgccgccctaattgtgccctgtggctggcaggaataggggacgtgggtccaggcggttctcggtagcttccctcgggagtcagaaggtggtgtgagcccttccgggtggccgtgtagtgggatgaaggtgagcccaggtcactcgggcaggcccctgttgtccccccacaacccttgtccctgagccactcctccccccacagaggctgggaggcggcagaatgcagccagaggagggcacaggctggctgctggagctgctgtccgaggtgcagctgcaacagtacttcctgcggctccgagatgacctcaacgtcacccgcctgtcccactttgagtacgtcaagaatgaggacctggagaagatcggcatgggtcggcctggtaggtgggatgttggcctggcttgtcttgcccctgaccctttccgtcctctgtcctcaggaccactcggtgcacgggtggcagctgagaactctgtcccagagccctgagggagcaggagggacatcagtaggtgctgatgtgtgatgagaacagttggcagttataaaggtgaattggagtttgaggagagtgaggccttccctaaagctggctacacaggagtcactccatgccccgttgtgattgttctcacgtagagtgtatgtcctccattgcccctccttcataagcatcgaattgagtctgttctcatcattctgactaccggggggtccatgtgcagagatctgtagggagaacgctaactctcagatggtttgctgattcgtgctcacgctctctttcttgctctctcacacgcacacacgcatgcacacgcacaggcatacacacacacacacacacacgcaggcacacacgcacatgcgcacacacgtgcacgcacgcatgcacgtgcacacacgcatgcacgtgcgtacgcacgcgctcacacgcctgcgcacacagacacgcacacacacacacacgtgtgtgcgcacacccgcatgcacacgcacggcatacacacatgtacacacacgcgcgcagacgcacacacgtgcgcacacgcgtgtgcacacacacgcacatacacacaggtttgctctgatttgagttcaacccttatcttcatatttttcctaaaagtgggggttgtagcatctaaaagtcatgatgttcttcatagaacattagaaacgtattagggctttcaagttaaaatagctaaataggtaataatgtgtcaagttagacactgacttagttaaaatagctaaataggtaataatgtgtcaagttagacactgacttagttaaaatagctaaataggtaataacgtgtcaagttagacactgacttagttaaaatagctaaataggtagtaatgtgctaagttagacattgatttatgctactttaggcctggatagttggtgtctgatgccagtagcataaaaaaattttacggagggaaaaaaacctcaacattgagaaaattctgttcattaccttgatttttcctgagaactgggagaagcccatcgcttcaagtttttggttaaacaccttcacccagtttgagagccagtgccaggaagtggagtgcagagaccgtcggtcagttgaggctccgggttagttggggttgatttcattgctatcatcgggtgggcggtgtctagtgacaggctcacccccaaggggaccacaggcagcagcctctctcgggctacggcggccttcacagcacgcggttccccgctctccctgcaggccagcggcggctgtgggaggctgtgaagaggaggaaggccttgtgcaaacgcaagtcgtggatgagtaaggtgggtgaggaggtgggtgaggaggtgggaggggggcagcctcgaacgcccccctccgcttctggtcctgggaaccttccccagctccccggcaggtcgaatctcgccgttctgccggcactttgtacaggaccccctcgtccagggtcttatcgggcagggcacttgtagagctgctgggctaagtgtctgtctccgccagatacggacacgtgagcagcctgtgtgcggtgaggccttcacagcccctctcggcacgcctggaacaggacctcattgacaagtgtgccttaacttagccctgctgtgtctgagcgttggggccagtgtccagcgtggggtggtggacctgtctggacccagaacgtctttgcttggcttccctcctccctgaccctctctaatctctgggtttctctggtcatctgtccctgctgacagcttccttccccacagcctgtccccacctctccccacaccttgtcctaatttgggtctgtggtgtagtgagtccctggtctgactcagtggaactttgcccattgtctggaagacaatgagagaggaagtgagccagccgtggtctttcctccccacttctggcttcagggctgggttggggggtgggcagggccgaacagctgcagtgggattgggcagcagagattttcctggctgcaatccggcaaaggggctgtctcttgggatcctttggcttttcctggaaacactgtcctggtcctttgcccgggttttagggaaggatgagtagtgtcgggatggtggaggcaggagaagagagcagcgtggtttgctgagatttaggggtcttggatctgccactggctcctgataggtccctgggcggtcagtggcctccagatttttgttgtgtcttcagtgaaatgataccggtccccactgcccagctcacctcccggggctgcaggaggcaccggagataatggctgtagagggtcttgtaacctgaacattgcttgcaaacataaggaattctagttactgggaggaagcacagggcagaggccagaagaggccctcagatttgaggcaccctagcccagacggataaggatccaccagctctgggggcgtgagacccaagctggcaagaatctgcaatctggagccaaggctgtgggtgcctcagtggaggccgagtcagaccgacgtggccagctttgaccctcatggcctcctttcttctgtcccttgaccttcggctcctccctgtccaccctggcctccgagtctcctccacttttccttccgtctcagccctcagctctaggcgcccctccagagacccagctgtcttcccaggccccttcccagcaaggactagcttcatctgaaccacacacacactcacggttcaacctcagactaaaattatcctctcccctgggcaggatgaagggcagccgactccctggtgagggtggagacagacagcaccaaatggtcaggccagagaaggggccagggctaaaaatggacaaggaggtgtctgtggagggcccctgcggctccatcgatgcgggttagggctggagtctgcggggtggcgggtgcaggaagggagggtggggcaggactgggaggagactccgaccttggctgggcggtgccctccctctccacacagctgggtgtggggccgctcagccacaggctgcatgcctgtcggtctctttctggcaccctccttgaggccagcatcaggctttgggttcatgtttgggggtgtgccctggacggagtgtgggcctccagccaggctgccccactgacagtttggcaaaaccaggacctatctggaagccgaagccggggatcaccaggtggacccagcggggtgggactgagtgactgaccctggggtgttggattccatctggcccccggctgccttcaaacaggtgttcagtggaaagcgactggaggctgagttcccacctcatcactctcagagcaccttccggaagacctcgcccgcccctgggggcccagcaggggaggggcccctgcagagcctcacctgcctcattggggagaaggacctgcgcctcctggagaagctgggtgatggttcctttggcgtggtgcgcaggggcgagtgggacgcgccctcagggaagacggtgagctctctgtgtcctgccagcgcagcagaggcatgggacccggggctggtagtggctcttctgcccccaaccagggtgtggatgggactggggatgcgtcacagtgtggctcatcccagagtccgtgctcaggatttttggggttttatttatttatttatttttgagatggagtctcgctctgtcgcccaggctggagtgcagtaggcacgatctcggcttcctgcaacctccactttccgggttcaagcaatcctcctgcctcagcctcctgagtagctgggattacaggcatgcaccaccacactcagttaatttttgtatttttagtagagacggggtttcaccatgttggccaggctggtctcgaactcctgacctcagatgatctgcccactttagcctcccaaagtgcttggattacaggtgtgagccaccacgtccagcccatgctcaggtttaactaagcacatttattatttcaactataaaaataatttattataaaagtttggaaagtatttgaaaaacaagaaaaaaaaaatcgcctgtaatcccaccactcagaggaagccgagcctcttcctcccactttaggtattttgttggatttagttaagatacaaattctggatacagcttttaaaatcttgttctttcttctcggcgttgcatttaacattttcccctcagggataacgtgtcaccacagcatacagttctggtgtgactgtttcctgtgcagcagccgtgtccttactgctcagatcacgtgcggtgcattcccagcacctcagagggctcctcattctccgtccactcagtgcgtccttctcccggggaagccgctgtcactcagtgcatccttctcccggggaagccgctgtgcagacttccagctccacagctttgtttttggcattacatttacagcattttccttctacagcaaaacaccttttaatattccattttatgaccagcctgagcaatatggagaaaccccatctctactaaaaatacaaaattagccaggcgtggtggcacctgcctgtaatcccagctactcaggaggctgaggcaggagaatcacttgaacccgggaggcagaggttgcagtgagctgagatcacgtcactgcattccagcctgggcgacaagagcgagactgtctcaaaaaaaaaaattccattttataacatttgaatattctctcatcatactggttatctcttactttttggttggtatttaagcccggcattcccccaggaaggggaggtgtggccgacgatggctcctgagggccagccgtctgcccttctccagccaggcctcacgcagagcacgtaagcccaggcactggtgacatgcttacccacccagatgaggagctcacaggcagggatcgttgagccgagttggagggtggagcaggttggctccgcgtgtctgggacctggcaagtcctgagtccttgcaaatcccgctctgggcaggtgagtgtggctgtgaagtgcctgaagcccgatgtcctgagccagccagaagccatggacgacttcatccgggaggtcaatgccatgcactcgctcgaccaccgaaacctcatccgcctctacggggtggtgctcacgccgcccatgaagatggtgagtactgcgggcgggagggggcgggcagggagagggctccggtcccatatgtgtggttcggttcctctctccatcctaaggtcagaggcgccctagatcctactttggtcccccaacctgatggagtaaaggggtccacaggggcccagcctggtacgggctgtgtctgctgcggtccagtccgggtctgtctctggattttgctggtgctcagtgtcaagagagttactcccatgggaggggctggccactgagtttaatttggggaatttatgttttatttatctatttattttgagatggagtctcactttgtcgcccaggctggagtgcaatggcatgatctaggctcactgcaacctcggcctcctgggttcacgcgatattcctgcctcaggcttccaagtagctgggattacagccgtgcgctaccatgcctggctaatttttgtatttttagtagagacggggtttcaccatgttggccaggctggtctcaaactcctgacctcaaatgatccacccacctcggcctcccaaagtgctgggattacaggcgtgagccaccacgtccagctgagttttggaatttctagccactgcctctttgggctccttctctctaggcatcagtttcccaaattgcctcgagggagaggcctgagaaactgcaggactcctagaggtccccagacagcaggccaggaaggtgcgtgcagcctggctctggaaagccttcaggaaggggactgggggcccagcgtgggctgctgagaaggggcagggtcctccagctcattcctcctgcctcctccgtggcctcaggtgacagagctggcacctctgggatcgttgttggaccggctacgtaagcaccagggccacttcctcctggggactctgagccgctacgctgtgcaggtggctgagggcatgggctacctggagtccaagcgctttattcaccgtgacctggctgcccgcaatctgctgttggctacccgcgacctggtcaagatcggggactttgggctgatgcgagcactacctcagaatgacgaccattacgtcatgcaggaacatcgcaaggtgcccttcgcctggtgaggggcaggtgctgccagctcacagagtccctgcagacccaggcctcaaagcttctggggctttctggacccaccacagcccctggttttgcttgggcctgcccttgtctgttctaagcctggggtgccctcctttgcacccattcgctcaccatccatctaggaattcttgagggcccacgtgccagggtctgggtgctggaaatcacagggatacatgctgtgggactctccaaggggctttgctgggtggggtgatacggggatagatgctgtgtcctctccaaggggcattgttgggggtcgtgtttcagggatagatcctgtgtcctctccaaggggcattgctggcgggggggtgttatagggataaatgctgtgtcctctccaaagggcgttgctggggggggggtgttacaaggatagatgctgtgtcctcttcaaggggcatcgctgggggggtgttacagggatagatgctgtgtcctcttcaaggggcattgctggggggggtgttacagggatagatgccgtgtcctctccaaggggcgttgctggggggggtgttagagggacagatcctgtgtcctctccaaggggcatcgctgggggcgggtgttacagggatagatgctgtgtcctctccaaggggcactgctgggggggtgttacagggatagatgctgtgtcctctccaaggggcactgctgggggggtgttagagggacagatcctgtgtcctcttcaaggggcattgctggcgggtggtgttagagggatagacactgtgtcctctccaaggggcatcgctgggggcgggtgttacagggatagacgctgtgtcctctccaaggggcattgctgggggggtgttacagggatagatgctgtgtcctctccaaggggcactgctgggggggtgttacagggatagatgctgtgtcctctccaaggggcactgctgggggggtgttagagggacagatcctgtgtcctcttcaaggggcattgctggcgggtggtgttagagggatagacactgtgtcctctccaaggggcatcgctgggggcgggtgttacagggatagacgctgtgtcctctccaaggggcattgctgggggggtgttacagggatagatgctgtgtcctctccaaggggcattgctggggggcgggtgttacagggttagatgctgtgtcctctccaaggggcattgctggggggggtgttacagggatagatgctgtgtcctctccaaggggcattgctggggggggtgttacagggatagatgctgtgtcctctccaaggggcattgctgggggggtgttacagggatagatgctgtgtcctctccgagggtcattgctgagttaggtgatacagggatatatgctgtgtcctcttcaaggggcattgctgggggggtgttacagggatagatgctgtgtcctctccgaggggcattgctggggggcgggtgttacagggttagatgctgtgtcctctccaaggggcattgctgggggggggggtgttacagggatagatgctgtgtcctctccgagggtcactgctgagttaggtgatacagggatatatgctgtgtcctcttcaaggggcattgctgggggggtgttacagggatagatgctgtgtcctctccaaggggcatttctgtggggaggtattcaaaggtttcctaaaacatcagggaagttcgccagggaaagactcgttggtaagcatgttctagggagagctagtggtagacaggcccaggccacagcaggccttgtagatgggccagggctgcttacctgtgcactaggggtggtacttggccctgccctggcccctgtgtgggcttatcctctgctgagaccattgtggttctctggtgccagaggcacccagaggtctgtgatctgcctgctttgaggcgggaagggttgttccagttctgctttcccaagcggtggctgtgggcaacccttatgatccaggacgcatggtcatcttaacgagcagctggctttacacccagggcgagcagaggtcttaaattatgcccgttgtcctggagtaatttagagcagcctcttttgtattcaggcatcctggtttgcatggtaaggtatgaatatagttgcctttaaacagcacgatgaagtgggcgggttattgttctcatttcaccaaggaggataatgaaccttagcgatctcgagtgactttcccggccccatcccctttgaggggcagggctcgctctgcttccctgtctgggcaccaccctcctctctgcacctcagtccacgccgggatgtcctttctgacctcactgcagtggcacttccccctcaaccgggggtgcccagaacgaatgggtgtatttgggtgaagccagtatgactgtttctacccattttggttcttccccaggccctacccgaatttcccacccactgcttcctgccaaaggacccaaatccgaggatcccgccccaaatctgggaattgtcattctcccaccacagtcagaaaacagcctgtgatcttctctccctgccccatcccagagcctctgacctccttcctttccatgcttctctggctgggaaacttcctttcctcttcccccaccaggctgcaagtgaataagaggcctgggcttagacgatttccccaagtccctgcatcgtgtcgtcaaggggtcctgcccgcttcacacggcgcccctgagacccactgttgaacctggcacagggggtcacaacaagtgtttgctgcatgagtgttttaagtccctggggcggacgcaggtagggtgtttgagagggcttctctttgacccctgcctctgccaggtgtgcccccgagagcctgaagacacgcaccttctcccatgccagcgacacctggatgttcggggtgacactgtgggaaatgttcacctacggccaggagccctggatcggcctcaacggcagtcaggtgagggctgggagacgggcccccatagggctggtggggtgaattccattccctgcttgcagcctggccctgctggaactgcctctcaccaatggactccctcctcccacgccccgtgcctccccccacttcccgtgcctcccaccacgccccgtgtctcctctcacgccccgtatctgtatggcctcagggagagcccagcaaagagacggggagggaaaagctggggcctgccctccttctctagcccttgccacatccacttgttccgaggctccagacctgggaagaagggactggggctctggagagggcccctcccaggcaggcagatcccttctttggaggccaggcatggcagcagccgctgcagctgtggatgggctggagggaaggcgggaagtgaagggctgggcgctctgtttgtcgtcaaactctgcacctcctcaccttcagatcctgcataagatcgacaaggagggggagcggctgccccggcccgaggactgtccccaggacatctacaacgtcatggtccagtgctgggctcacaagccagaggacagacccacgtttgtggccctgcgggacttcctgctggaggtgagggacaggtcagcccaggagagctggggtgttcaagctgaggggctacccaggcgtcagtcccagagttggccacgaccttcctcttcctccaggcccagcccacagacatgcgggcccttcaggactttgaggaaccggacaagctgcacatccagatgaatgatgtcatcaccgtcatcgagggaaggtagggagtgcagggctgggccccgccctgggatcgcttgaagggcacaggtcggagggacctgtggacagatctgtttggcctccaagattcccttggccacatacaggctggcggttgggcctgaaccctgcagtgtgaggggaggacaggcctgcctccgtcttcctagtgcctttccctgcccagcttccctccaccaccctttcccactgggctgcagccctggctgtgtggttgggccaggctgcctttatggaggggtagggagtggcctggcctcggtggcagcagagttctggactcccgtgcttcctcctctgctcctccccgcttctctccctgcttcttcctggcacagggactcagccatccacctgggtgcgtttcagtagctgaagcagcccagcctgccctcttgcagctttccatccttcctgctgagcccaccaccccctcccaggcctgcctccagcctctggtcctctcttcccatctccccttgggaggaccctctctatacctaaccctcctcccacagcctctcgggagtccctgtcttccacctgagcccccgcagttctagcgcctgccctgaggccccaccactgctggccctgccttgtgctggctgatccccagggtgtctgagcaactggctggggcagggcaggtttcaggtacctttgaggcaggggcagtattgaggaccaggaagaagagtgaagtggaggaaatcccctgtgctcgcagctcctgactcaggccaggcaaggatggggctagggctgcttcccagggagcctcttccacctgcactgcagcttttggagtctgcggccttcggtgcaatcctgtgcctcttgggggtgggtggaggagacctggggggctgtgtggagtgtgacctgcaccgctgtggccccgacaccccgagccttcccaggcccggctccctcacccttgggcccagggtctgggaataggaatgacatactgagactgcagggcctgtggttaggggtgttatgctggggaagaatgcagaaggttctagaaagagaggcctggggacaggaggcaaacagtctgcaggtttggagctgaggggccagggatgggattgcaagcgtggcgctccggggagcattctggaaataggaagattaagggtgggggggtcccctggaagtacctggcagggcctccagcccgaagtccagcctcatgaccgtgtccacctccacgagctggaaagccgtgggcctggcccctcttgtgctgctgccggagccccagatctttaccacctgcttcccttgctctcagcaggagcctgtgtgcctgccagtgtccccaggggtgactcagagtggcctgtgtttggggcgtgtgtctctggagctggtgttttaggtcaccgcccgggcaaggcgggcagtgggaggggccgggagcggctgctcctgggagggttgtgggtgtgccccgccccgcccttccgtcgaaggcccccgttggccccagccgctggttccctgtggctgctgctggtggggctctgggggctccttccccctgggccaccagccctggcttggaaccacagcacctgccctccgtgcctggagctgctcaggaggtgggaggtgaggggcaggaggccacaacagccggtgaggcttgggagcgggcctgggtgtcggtggtggcagagcttgactctgcccccttgtttcttcagtccctgaatatctccatgtttgtttggctgcctccgtctccatgtctccaggcggatggctctgtgtgagtctttgggcctgggtgtgcatctgtgggtctgtgtttggagttccctcctagcctggccttctcttcgccgtggcttcccacttgcgaagctgtgtccagtatttgtttcctggtgcggagtctgggaggccacctgccgcagctctgactgagtctaggctcagtccttctcagggtaccaggctgtgggcagaggggagacacctagatgtttcgtgctgtgtctagatttggagacacaaatgatgactggtctttcccaggggctcgtttggaggaaggggtggctggcagcacttttgttccgcatacagagcgggtgttggaatccattgcgggtccttggcctggtctggccctggagcctcggcttcctgtggtgggtgggagccaggcatccgggttatccctccaggcctgggcgcctgggacccctagggagaagagcgggcgggcgttttgaacagaatgtccggcattagttgagccatttctggactaccttcggcccggacgggaacgtggtgctgagatttccagagctggggcagccttaggcagttctcagcaccggcctctgttttccatcttgtctaccccagagatgttgaccagaggcccgggggcagcaggaggtagaaggttcatgcggaggtgttgggcccttttcctgctcccccaggaagtcctcatccgcccctgcttcagtcacggccgggtagcagccctggccctcccatggccacggggactccggcctgttcatggcgggagagagagggcgcggacagggcgggcctggaaggaagggctggcctcagtcccctctggactgctggtgcctcggccacactgagcctcacacgggtgcgtgtgggctgcgagaagtgacacggtcctcttggaagtcccactggagccttgggatgaagctgccttggagtgtgcgtgggcgccatcccgagggggagcttcctgtgcctccgagcgtgcgtgggcgccatcccgagggggagcttcttgtgcctcggagcgtgcgtgggcgccatcccgagggggagtttcttgtgcctcggagcgtgcgtgggcgccatcccgagggggagtttcttgtgcctcggagcgtgcgtgggcgccatcccgaggggagcttcgtgtgcctcggagcgtgcgtgggcgccatcccgaggggagcttcctgtgcctcggagcgtgcgtgggcgccatcccgagggggagtttcttgtgcctcggagcgtgcgtgggcgccatcccgaggggagcttcttgtgcctcggagtgtgcgtgggcgccatcccgaggggagcttcttgtgcctcggagtgtgcgtgggcgccatcccgagggggagcttcctgtgcctccgagcgtgcgtgggcgccatcccgagggggagtttcttgtgcctcggagcgtgcgtgggcgccatcccgaggggagcttcttgtgcctcggagtgtgcgtgggcgccatcccgaggggagcttcttgtgcctcggagcgtgcgtgggcgccatcccgagggggagtttcttgtgcctcggagcgtgcgtgggcgccatcccgaggggagcttcttgtgcctcggagtgtgcgtgggcgccatcccgaggggagcttcctgtgcctcggagcgtgcgtgggcgccatcccgaggggagcttcctgtgcctcggagcgtgcgtgggcgccatcccgagggagagtttcttgtgcctcggagcgtgcgtgggcgccatcccgaggggagcttcttgtgcctcggagtgtgcgtgggcgccatcccgaggggagcttcttgtgcctcggagtgtgcgtgggcgccatcccgagggggagcttcttgtgcctcggagcgtgcgtgggcgccatcccgagggggagtttcttgtgcctcggagtgtgcgtgggcgccatcccgaggggagcttcttgcacacgtcctccgcactcttactctccttcccccaggagcaagcatgttttctcgagtggtgtcaggactcccagcagccatgggggctcttgcctcggccatacctgcactaagggaggtgggcttgatgtctcctttccctctcagaagtgggtcccaaaggaggcttctgtgcctggagctgggcagtgttggcggaagggagaggccagacggagtgacctgccttgggcacgagtcacgctgctctgagcaaggtctcggcctcagcggcattctcacccagttactgagcgcctctgaagaggtgtggagagcagagtccggcgtctggcccgcggcagccaccggggagcccgtgggtgtagcgggagagccgcagcccagccggtgccggggttcctcctctacgggccgccgtgggaggctgtgtgcgtgctggggagccggggctctgctccttcgagtggccctgctatttttcagatgggactcgtctcgtctcggggtactgtcctctctccttccttccctccctgcaggcagggtgggaatcacagggtggctgtgtgtggtggggccaggccagtggccctgtgtatgaggaggctgggcagggggagcacagccccgtctccccgcgccccgcgccccccgcctccccgccgaccgtggtgctctcgggtttgactttggtctctgggatgggctgttccggagtcaccccgctccagccaggcctcgtcaccttacaaggctgtgggtctgggtgcccaggcgtcgccacctcctccgtcctctctccccggcctggctgggtttcagaggagcccttcttcacgctttggccctgggacaggagaagtgggggttggtggggagggcgtgcagtgtggtgccacacgtgtccaccctagcagctctgggctgtcaccgcccccgcgtgcccagactctgcccacggggctgtcaccgcccccgcctgcccagacactgcccacggggctctcaccgcccccgcctgcccagacactgcccacggggctctcaccgcccccgcctgcccagactctgctcacggcatcacgtatgacaagtccagcagcagacgcgggagcctcacaacctgtgagagccttcgggagtcaggagtgtcttgcgggagccctgtgcttcctggcctgcctgcccctgcccctgcccctgcccctgcccaggccccggcttaggccacatcagcagaggtttcgtgtctgaggtcagagggggactggcagccctactgtctggtcactgtgggagagctgagttcccttttggacacaggtagagcccctcctgaggagacggggaggctcccgcaggccttccgggaggtggtggaaagctccggaagcaggtgaagcggtggagggagggactgagttgcccgagtgctcctagactctcccgcgtctgcattcgggaggcaggttgtagctggaggcctggcccccagcctagtgcaaggccctaggtgtcccccggcacccccgcacctctcagaactcctggaacccagccgaggagtgaaatcaagtggccagaagaggactggggccccggccttgccagggaactgaggggtgaggaggaggtgtgggcggggcgctggccccacagacctgaaagctggcgttgggtcccaggtctgctgggatctttctggtaaccgtggacaggtcatgttgcctgctgcagcagcttccagcgtgcctccttatttgcaaaccatagggaaagctgcctgacccacctagagagttgtgggtaaggccgtgtgcaaacaggcctgtacggggcatggtgggtcacgggggctgttggggaggagggccggtggcacacagcctggtcctgaggcctgagctccatcccccttctgccacagtggccagggtgtgaggagggtcccagtgccggggctgccccgccacgcctggcgttcaccgtgccatctctgtcgcgcagggccgagaactactggtggcgtggccagaacacacggacgctgtgtgtggggcccttccctcgcaacgtggtgacctccgtggccggcctgtcggcccaggacatcagccagcccctgcagaacagcttcatccacacagggcatggcgacagtgacccccgccactgctggggcttcccggacaggattgacgagtgagtactgggcggggatggatgctgacctggccccgctcgggactccagggccctcagcacggcacgcgtgggcggaatctgctcttcaccctttcgcccgggcttcagcccccgacccgccactctcccctcctcaccctggccttactctcgggaagctgtggaaccctaggaagcccagcctggtgggggttctccaggggaatgttctccaggggagtgttctccaggggagggttctccaggggagggttctccaggggaatgttctccaggggagggttctccaggggagggttctccaggggagggttctccaggggaatgttctccaggggagggttctccaggggagggttctccggggagcgttctccaggggaatgctgtccctgccattttcaagctttggggggccgatctcctaactctgagacacttcatctgtgaaacaggttcacccccccaataaggggaaggctgtaaatgcactctgaattagcacttgctgctcagatgcaggggtcctgagagaagctttcccactcactgtagatgaaagtagggtcaggagcttctgaggatggactcctgtttggtggaaaggtccccggagccacagctgtaacccctcttggtactcgggccttaggaaaatgaacttgggaggaacccggtgggagctgctgaggaggagagcttctcccatgacccccctgtggccccctgtgaccctgtgaccctgtgacccctgcacacgagcagtggttttccttctcctgctggtggtgccagagtcctggagacgtgaacctgctggctcaggccctggggatgtatgcaggtccacatgggagtgagcctgctttccagaaccagagtgggactggggaccttggggactgcagagggaacgttaggtggcagctccgcctccccaccacacagtactctacggagctcactccatacctgggagaggccctgtctcctatgtaagaggataaggccaccgaggggcatctgggaaggacacgcagaatcagtcacttccgggatgccaccccccaccccccgaagcttcttgcgccaggcctccaagcctctctgctggccgcagggggattccaggcccctggcctctgcagcccttctcctgctgacttctgatactctggtctgccctgagaggcgtggaaagcaggggccttcacccaccgggccccacacaccagaaccccacacagcgggcccccacacaccagaacccacacagcgggcccccacacaccagaaccccacacagcgagtccccccacaccagaacccacacagcgggcccccacacaccagaacccacacagcgggcccacacacactggaaccccaagctcacagggctcagcccatgtgttttgcctaaaaagaacccagcaagggcctgagagttggggtgaaagactgcagacacctccaggagaggctggtgccctctgccccactcctggcatgctgtggccagcccagccccattcctccaggctttaatcagccccagtgactaagtctcagatactgacagttggtgcagggacggagggtggatccggagcaggacaggtggcccagcctctcccgcacctcctggccatgtggcagaagggtgcctcctgcccaccctggctgggcaccatagctgggatgccccgttcttaggccctccatcgtggcctgcgggacaggagtgtctgccctctggccgctgcctggtgtgggctgggggcctggggggttgtggaggaccacctctgcccttgtagggtgtagttggagtccctgaggtcctaggctttccatcctggggtcaggtgtcctttctctgccttctctccaggacaccccccagctgagacgtgcggtcaggttctgtggactgggaggcgggaggcctgtgcttcagacccaagactacacccggtttcctccaggacgaaggggctctgatgagattctgccacccctccacacgcttcccctgctctcttgacccagctctctcccccacagactgtatctgggaaaccccatggacccccccgacctcctgagcgtggaactgagcacctcccggcccccccagcatctaggaggggtgaaaagtaagagcccctctgctccctggtgtccctaactcatcggctactcaggaaggggcactgtcttcacaggccaccctaaggctgctgttctgtttttggggacagtggggtcagggcagcaggcgggacagctgtgtccctggctccggctgggcgtggggtggaagacaggcagctgtatccgccgaggtgggcctcctcgggctgggtctgcagcaggcccgtccgccccggcgtccctcctccctccttccacggccgagctcagatcctggctttcctcacttccccctaatcctgctctcctgtcccaagccaaaaccaccccacggctccggctctgcctggggcctcctccatctcccggtcctctgcctatcatactggaccgccgtgttcctcatcctgccgcctgcggcctcccgtttgctgggggcttgtacattcactcgcccccattcacttctctcccttcgtctctctacactctgccctctcgtccggccgtctccctcctttgtcctctgtcctgctccgtctctctccccctgtccgcatggcctttcttgcaggggagcctccacctcgcccacctcagcctgccttcttcactcagagtaagtggggctgcttccgatgccttggcccccgcccccgccccctctctctcactcctctcctggaaggtacagagcctgggcggctgggccggaggggaggtgggtgggtgtgtgctgtgagcttccgcggctgccctggcctagcatgcctgccccccctcgagcccgccccccggagcctgggcttctgctcacgagtgtggccctggcttccgcctcggcctcactccctcccagacctgtctgagcttctggagcacgagtgtggccctggcttctgccttggcctcgctgcctcccagacctgcaggcgctgtctgggctttgtggccgttggtcaggagtactgtcctctccaaggatagtccttatagcccctgatggcaggaggcggctccgtgcctgcactaatggtgtgccgtgacaggggcggggatgagggctcactaactcgccagggcgcaggagcagggccgccggggtcttgtgctggtggaggcagcgtcaggcaggagccagtgttgcttgctgcagcttagacggagcgaggcggggctcaccggcccacatggggctgccgggcagagcaggttccgccctcctgatggagtggtcggaggtgcgctgagaacctggccgccggtggctgacctcagacctcggggggagttgggagtggagggttgctgggggacacttggctttctctcccacgtgccacctcccctcgtgtcccagaccctgcctgactgccttcctgttgggctctccctttccatcacagaaccaacctatgaccctgtgagcgaggaccaagaccccttgtccagcgacttcaagaggctgggcctgcggaagccaggcctgccccgagggctgtggctggcgaagccctcggcgcgggtgccgggcaccaaggccagccgaggcagcggggctgaggtcacgctcatcgacttcggtgaggagcccgtggtcccggccctacggccctgcgcgccctccctggcgcagctggccatggacgcctgctccctgctggacgagaccccgcctcagagccccacgcgggcactgccccggcccctgcaccccacgcctgtggtggactgggacgcacgcccgctgccccccccgcccgcctatgacgacgtggcccaggatgaggatgactttgagatctgctccatcaacagcaccctcgtgggcgcgggggtccctgccgggcccagccagggccagaccaactacgcctttgtgcctgagcaggcgcggccgccccctcccctggaggacaacctgttcctcccgccccagggtgggggcaagccgcccagctccgcacagaccgcagagatcttccaggcgctacagcaggagtgcatgaggcaactgcaggctccggccggctccccggccccctctcccagcccggggggtgacgacaagccccaggtgcctcctcgggtacccatcccccctcggcccacgcgcccacacgtccagctgtctccagcccccccgggcgaggaggagaccagccagtggcctggacctgcttcccctccccgggtgcctccgcgggagcccctgtcccctcaaggctcgaggacacccagccccctggtaccacctggcagctccccgctgccaccccggctctcaagctcacctgggaagaccatgcccaccacccagagctttgcctcagaccccaagtacgccaccccccaggtgatccaggcccctggcccgcgggctggtccctgcatcctgcccatcgtccgggatggcaagaaggtcagcagcacccactattacttgctgcccgagcgaccatcctacctggagcgctaccagcgcttcctgcgtgaggcccagagccccgaggagcctacccccctgcctgtgcctctgctgctgcccccacccagcaccccagcccccgccgcccccacggccaccgtgcggccgatgccccaggctgccttggaccccaaggccaacttctccaccaacaacagcaacccaggggcccggccaccacccccgagggccactgctcggctgccacagaggggctgccctggcgatgggccagaggcgggccggccagcagacaagatccagatggtgagcacccagcctggctgtgggcgaagcggggcagggcccaaggggcctggagcagtgggccctagtggtgctgacaggggtgggtgtgcccagctgcaggccatggtgcatggggtgaccacagaggagtgccaggcggccctgcagtgccacggctggagcgtgcagagggctgcccagtatctgaaggtaccgccacctcctgctcactctggctctcagggaccctgaagcctggttctgctgcccccagccccacgccccctggctccgactcccctcttccccaccctagtcggtgccctgggcccgcgtgtccatggcgccacccttacccccaggtggagcagctcttcgggctgggtctgcggcccagaggggagtgccacaaagtgctggagatgttcgactggaacctggagcaggccggctgccaccttctgggctcctggggccctgcccaccacaagtgagtgagccccacagtctgccccgctccgtgccccaggagggctgtcccagagcctgccacactgggaggaagcccaacacctcgcaggccgctcccggccagggagacacagctctccagctgcgggagggaggcgctcacagggcccagcaaatcgtttttcctaaatgtgtttatttggacattttagccacttggttttcaaatgagtacaagagggaattggagcctctctggttgaaggaggcttgcttccctagcacctgcagtgaccctgagcggctccaggaatggcactttttaggaccccatgatttgcacacctctttctcacctctgtgtttccatatttctgtttaaagtaacatttaaaatttcagtgttggctgggcaccgtggctcatggctgtaatccccagcactgtgggaggccaaggagggaggatcacctgaggtcaggagttcgagaccagcctggccaacatggcgagaccaggtctctactaaaaatacaaaaattaaccgggtatggtggtgggcacctgtaatcccacctgctggggaggctgaggcaggagaatcgcttcaacctgggaggcggaggttgctgtgagctgagattgcaccactgcactccatcctgggcgacagagggagactgtctccaaaaaaaaaaattttctctaaaaagaaaatatattgtctttcctgtaaaaggtttatattatagtttaacaaaatatatagacatttaaaatatatacatatataaacacactttatatattatgtaaatatatatatgagagcgctgtcaagtcaaaaagaagtgaactgaggtcacatggctggagccagcaccatggcaggaggcactggcgggaggaggggctgacacgggccaggccctggagatacctgctgcccttgtcccagcagcgtggccctgtgcacggtgcggagtttctccacatataaagcgtgtagataatagtgctcaccccgtggaagggactggcgcgatggatgggggacatgtctgtcttattgcgcccagcacgcctggcgccaggatgcaggcactccgtgtcacctgtctgtcccatactgtctcgggtggttcttactgatttgcagctgggatgcaggcactccctgtcacctgtctgtcccatactgtctcgggtcgttcttaactgatttgcacctgggacgcaggcactctgtgtcacctgtctgtcattgtctcgggtggttcttactgatttgcacctgggacgcaggcattcgctgtcacctgtctgtcactgtctcgggtggttcttactgatttgcacctgggatgcaggcactccgtgtcacttgtctgtcccagtctcgggtggttcttactgatttgcacctgggatgcaggcactcggtgtcacctgtctgtcccatcctgtctcgggtcattcttaactgatttgcacccgggacgcaggcactctgtgtcacctgtctgtcactgtctcgggtggttcttactgatttgcacccgggacgcaggcactcgctgtcacctgtctgtcactgtctcgggtggttcttactgatttgcacctgggacgcaggcactcgctgtcacctgtctgtcactgtctcgggtggttcttactgatttgcatctgggacgcaggcactcgctgtcacctgtctgtcactgtctcgggtggttcttactgatttgcatctgggacgcaggcactcgctgtcacctgtctgtcactgtctcgggtggttcttactgatttgcacctgggacgcaggcactccgtgtcacctgtctgtcactgtctcgggtggttcttactgatttgcacccgggacgcaggcactcgctgtcacctgtctgtcgctgtctcgggtggttcttactgatttgcatctgggatgcaggcactccgtgtcacctgtctgtcgctgtctcgggtggttcttactgatttgcacccgggacgcaggcacttgctgtcacctgtctgtcactgtctcgggtgtttcttactgatttgcacctgggacgcaggcactccgtgtcacctgtctgtcactgtctcgggtggttcttactgatttgcacctgggacgcaggcactcgctgtcacctgtctgtcactgtctcgggtggttcttactgatttgcatctgggacgcaggcactcgctgtcacctgtctgtcactgtctcaggtggttcttactgatttgcatctgggatgcaggcactccgtgtcacctgtctgtcactgtctcgggtggttcttactgatttgcatctaggatgcaggcactccgtgtcacctgtctgtcgctgtctggggtggttcttactgatttgcagctgggatgcaggcactccgtgtcacctgtctgtcgctgtctcgggtggttcttactgatttgcatccacataggctttgggctctatcccacctgtcgtcttcggattctctaatacgcaggagtgctcttctgttagtttactcatagtttattaaagtacagagaaaagacatccaggatgataaattttacagtccttgccggggactgccagcttccagtggtgttgcctggcaccagtgtgacccccggtgcctgccccgctgaaccttctgtaaactgtttaactgtgctggtggtttcccattctctaggcgctgagatgcgtctggagagccagagggcctgcctgaaggaatcacctgagcctgtccgtccaccaggagtggggagatgcccccatccagtcctggaggacccgctgctcctgctgctcccggggatggagcaaggccaaggctgcgggaggctgggagccctgccctgcccatccctcctgcaccagcgctgtccctgcacactttggttcagtcccggtgcccctgccaagatgtggaaggggccgggtgaagacaggcttgagggctgccccagcaggctctgggtatgacctgcctctggccctggtcctgggcggggcctgtgggtggagtagtacccccaggccctgccctgggtgacagactgggaggaaaccaggctggacctgggcaggcgggatgtgttggccacagggagaggcggaccggcacccggtgggacctcctaggactgggccttcttccagggggcccctggcagcagctggggtgtcgggcagaatgtgacttgtggccttaccatggacttgaatgggacttggctggcctcaggatcttgtgcctggaaatagcctgaggtggctcaggaagcggagaaagggtgccagaccattctctggcggggaccagggcccaaggccccagggctggaaggagaccaaggggcagccgccctggagggacatcagtgcttcctcttccacccaattcccccacgcggttccatgttttcccaccagcctgttggcgaagttgctgctccggcattcagtacctgcttcttccagagaaataaagttagtttctattttatgtta

SEQ ID NO: 14562 - DNA, 4276 bp, Homo sapiens
gacagaaacaggacagaggatcccggctgcagccagcgtgaggaaagctctgctccctgccagaccggccagctgtggaaacccagcggggcttgcagcagagcggaggggcccaccccgttcttcctcatttcccacccctggtgtgggatttggggggctcctgggcagagtgcgaagctccggagccgaggccactggatccccagtgactgctcgggggggtcccgctgcgtggagatgccggcagcacgtcggttccctggcctggagctctccttccctctcctggccagactgcggcgacgcctgtacacaaggctgggaggcggcagaatgcagccagaggagggcacaggctggctgctggagctgctgtccgaggtgcagctgcaacagtacttcctgcggctccgagatgacctcaacgtcacccgcctgtcccactttgagtacgtcaagaatgaggacctggagaagatcggcatgggtcggcctggccagcggcggctgtgggaggctgtgaagaggaggaaggccttgtgcaaacgcaagtcgtggatgagtaaggtgttcagtggaaagcgactggaggctgagttcccacctcatcactctcagagcaccttccggaagacctcgcccgcccctgggggcccagcaggggaggggcccctgcagagcctcacctgcctcattggggagaaggacctgcgcctcctggagaagctgggtgatggttcctttggcgtggtgcgcaggggcgagtgggacgcgccctcagggaagacggtgagtgtggctgtgaagtgcctgaagcccgatgtcctgagccagccagaagccatggacgacttcatccgggaggtcaatgccatgcactcgctcgaccaccgaaacctcatccgcctctacggggtggtgctcacgccgcccatgaagatggtgacagagctggcacctctgggatcgttgttggaccggctacgtaagcaccagggccacttcctcctggggactctgagccgctacgctgtgcaggtggctgagggcatgggctacctggagtccaagcgctttattcaccgtgacctggctgcccgcaatctgctgttggctacccgcgacctggtcaagatcggggactttgggctgatgcgagcactacctcagaatgacgaccattacgtcatgcaggaacatcgcaaggtgcccttcgcctggtgtgcccccgagagcctgaagacacgcaccttctcccatgccagcgacacctggatgttcggggtgacactgtgggaaatgttcacctacggccaggagccctggatcggcctcaacggcagtcagatcctgcataagatcgacaaggagggggagcggctgccccggcccgaggactgtccccaggacatctacaacgtcatggtccagtgctgggctcacaagccagaggacagacccacgtttgtggccctgcgggacttcctgctggaggcccagcccacagacatgcgggcccttcaggactttgaggaaccggacaagctgcacatccagatgaatgatgtcatcaccgtcatcgagggaagggccgagaactactggtggcgtggccagaacacacggacgctgtgtgtggggcccttccctcgcaacgtggtgacctccgtggccggcctgtcggcccaggacatcagccagcccctgcagaacagcttcatccacacagggcatggcgacagtgacccccgccactgctggggcttcccggacaggattgacgaactgtatctgggaaaccccatggacccccccgacctcctgagcgtggaactgagcacctcccggcccccccagcatctaggaggggtgaaaaaaccaacctatgaccctgtgagcgaggaccaagaccccttgtccagcgacttcaagaggctgggcctgcggaagccaggcctgccccgagggctgtggctggcgaagccctcggcgcgggtgccgggcaccaaggccagccgaggcagcggggctgaggtcacgctcatcgacttcggtgaggagcccgtggtcccggccctacggccctgcgcgccctccctggcgcagctggccatggacgcctgctccctgctggacgagaccccgcctcagagccccacgcgggcactgccccggcccctgcaccccacgcctgtggtggactgggacgcacgcccgctgccccccccgcccgcctatgacgacgtggcccaggatgaggatgactttgagatctgctccatcaacagcaccctcgtgggcgcgggggtccctgccgggcccagccagggccagaccaactacgcctttgtgcctgagcaggcgcggccgccccctcccctggaggacaacctgttcctcccgccccagggtgggggcaagccgcccagctccgcacagaccgcagagatcttccaggcgctacagcaggagtgcatgaggcaactgcaggctccggccggctccccggccccctctcccagcccggggggtgacgacaagccccaggtgcctcctcgggtacccatcccccctcggcccacgcgcccacacgtccagctgtctccagcccccccgggcgaggaggagaccagccagtggcctggacctgcttcccctccccgggtgcctccgcgggagcccctgtcccctcaaggctcgaggacacccagccccctggtaccacctggcagctccccgctgccaccccggctctcaagctcacctgggaagaccatgcccaccacccagagctttgcctcagaccccaagtacgccaccccccaggtgatccaggcccctggcccgcgggctggtccctgcatcctgcccatcgtccgggatggcaagaaggtcagcagcacccactattacttgctgcccgagcgaccatcctacctggagcgctaccagcgcttcctgcgtgaggcccagagccccgaggagcctacccccctgcctgtgcctctgctgctgcccccacccagcaccccagcccccgccgcccccacggccaccgtgcggccgatgccccaggctgccttggaccccaaggccaacttctccaccaacaacagcaacccaggggcccggccaccacccccgagggccactgctcggctgccacagaggggctgccctggcgatgggccagaggcgggccggccagcagacaagatccagatgctgcaggccatggtgcatggggtgaccacagaggagtgccaggcggccctgcagtgccacggctggagcgtgcagagggctgcccagtatctgaaggtggagcagctcttcgggctgggtctgcggcccagaggggagtgccacaaagtgctggagatgttcgactggaacctggagcaggccggctgccaccttctgggctcctggggccctgcccaccacaagcgctgagatgcgtctggagagccagagggcctgcctgaaggaatcacctgagcctgtccgtccaccaggagtggggagatgcccccatccagtcctggaggacccgctgctcctgctgctcccggggatggagcaaggccaaggctgcgggaggctgggagccctgccctgcccatccctcctgcaccagcgctgtccctgcacactttggttcagtcccggtgcccctgccaagatgtggaaggggccgggtgaagacaggcttgagggctgccccagcaggctctgggtatgacctgcctctggccctggtcctgggcggggcctgtgggtggagtagtacccccaggccctgccctgggtgacagactgggaggaaaccaggctggacctgggcaggcgggatgtgttggccacagggagaggcggaccggcacccggtgggacctcctaggactgggccttcttccagggggcccctggcagcagctggggtgtcgggcagaatgtgacttgtggccttaccatggacttgaatgggacttggctggcctcaggatcttgtgcctggaaatagcctgaggtggctcaggaagcggagaaagggtgccagaccattctctggcggggaccagggcccaaggccccagggctggaaggagaccaaggggcagccgccctggagggacatcagtgcttcctcttccacccaattcccccacgcggttccatgttttcccaccagcctgttggcgaagttgctgctccggcattcagtacctgcttcttccagagaaataaagttagtttctattttatgtta

SEQ ID NO: 14563 - DNA, 876 bp, Homo sapiens
atgtttttagtctggggctccttcctcatgtcagctccctagtggcagagcagtctccctcggtgtctctctggccaccatgatcagtgtcacggacacatcccagcatagccccagttctcaaccgcatggcagggaccgtccaggagttgaggctgggaggcggcagaatgcagccagaggagggcacaggctggctgctggagctgctgtccgaggtgcagctgcaacagtacttcctgcggctccgagatgacctcaacgtcacccgcctgtcccactttgagtacgtcaagaatgaggacctggagaagatcggcatgggtcggcctggccagcggcggctgtgggaggctgtgaagaggaggaaggccttgtgcaaacgcaagtcgtggatgagtaaggtgttcagtggaaagcgactggaggctgagttcccacctcatcactctcagagcaccttccggaagacctcgcccgcccctgggggcccagcaggggaggggcccctgcagagcctcacctgcctcattggggagaaggacctgcgcctcctggagaagctgggtgatggttcctttggcgtggtgcgcaggggcgagtgggacgcgccctcagggaagacggtgagtgtggctgtgaagtgcctgaagcccgatgtcctgagccagccagaagccatggacgacttcatccgggaggtcaatgccatgcactcgctcgaccaccgaaacctcatccgcctctacggggtggtgctcacgccgcccatgaagatggtgacagagctggcacctctgggatcgttgttggaccggctacgtgtgcccccgagagcctgaagacacgcaccttctcccatgccagcgacacctg

SEQ ID NO: 14564 - DNA, 6326 bp, Homo sapiens
cgtttgctgggggcttgtacattcactcgcccccattcacttctctcccttcgtctctctacactctgccctctcgtccggccgtctccctcctttgtcctctgtcctgctccgtctctctccccctgtccgcatggcctttcttgcaggggagcctccacctcgcccacctcagcctgccttcttcactcagagtaagtggggctgcttccgatgccttggcccccgcccccgccccctctctctcactcctctcctggaaggtacagagcctgggcggctgggccggaggggaggtgggtgggtgtgtgctgtgagcttccgcggctgccctggcctagcatgcctgccccccctcgagcccgccccccggagcctgggcttctgctcacgagtgtggccctggcttccgcctcggcctcactccctcccagacctgtctgagcttctggagcacgagtgtggccctggcttctgccttggcctcgctgcctcccagacctgcaggcgctgtctgggctttgtggccgttggtcaggagtactgtcctctccaaggatagtccttatagcccctgatggcaggaggcggctccgtgcctgcactaatggtgtgccgtgacaggggcggggatgagggctcactaactcgccagggcgcaggagcagggccgccggggtcttgtgctggtggaggcagcgtcaggcaggagccagtgttgcttgctgcagcttagacggagcgaggcggggctcaccggcccacatggggctgccgggcagagcaggttccgccctcctgatggagtggtcggaggtgcgctgagaacctggccgccggtggctgacctcagacctcggggggagttgggagtggagggttgctgggggacacttggctttctctcccacgtgccacctcccctcgtgtcccagaccctgcctgactgccttcctgttgggctctccctttccatcacagaaccaacctatgaccctgtgagcgaggaccaagaccccttgtccagcgacttcaagaggctgggcctgcggaagccaggcctgccccgagggctgtggctggcgaagccctcggcgcgggtgccgggcaccaaggccagccgaggcagcggggctgaggtcacgctcatcgacttcggtgaggagcccgtggtcccggccctacggccctgcgcgccctccctggcgcagctggccatggacgcctgctccctgctggacgagaccccgcctcagagccccacgcgggcactgccccggcccctgcaccccacgcctgtggtggactgggacgcacgcccgctgccccccccgcccgcctatgacgacgtggcccaggatgaggatgactttgagatctgctccatcaacagcaccctcgtgggcgcgggggtccctgccgggcccagccagggccagaccaactacgcctttgtgcctgagcaggcgcggccgccccctcccctggaggacaacctgttcctcccgccccagggtgggggcaagccgcccagctccgcacagaccgcagagatcttccaggcgctacagcaggagtgcatgaggcaactgcaggctccggccggctccccggccccctctcccagcccggggggtgacgacaagccccaggtgcctcctcgggtacccatcccccctcggcccacgcgcccacacgtccagctgtctccagcccccccgggcgaggaggagaccagccagtggcctggacctgcttcccctccccgggtgcctccgcgggagcccctgtcccctcaaggctcgaggacacccagccccctggtaccacctggcagctccccgctgccaccccggctctcaagctcacctgggaagaccatgcccaccacccagagctttgcctcagaccccaagtacgccaccccccaggtgatccaggcccctggcccgcgggctggtccctgcatcctgcccatcgtccgggatggcaagaaggtcagcagcacccactattacttgctgcccgagcgaccatcctacctggagcgctaccagcgcttcctgcgtgaggcccagagccccgaggagcctacccccctgcctgtgcctctgctgctgcccccacccagcaccccagcccccgccgcccccacggccaccgtgcggccgatgccccaggctgccttggaccccaaggccaacttctccaccaacaacagcaacccaggggcccggccaccacccccgagggccactgctcggctgccacagaggggctgccctggcgatgggccagaggcgggccggccagcagacaagatccagatggtgagcacccagcctggctgtgggcgaagcggggcagggcccaaggggcctggagcagtgggccctagtggtgctgacaggggtgggtgtgcccagctgcaggccatggtgcatggggtgaccacagaggagtgccaggcggccctgcagtgccacggctggagcgtgcagagggctgcccagtatctgaaggtaccgccacctcctgctcactctggctctcagggaccctgaagcctggttctgctgcccccagccccacgccccctggctccgactcccctcttccccaccctagtcggtgccctgggcccgcgtgtccatggcgccacccttacccccaggtggagcagctcttcgggctgggtctgcggcccagaggggagtgccacaaagtgctggagatgttcgactggaacctggagcaggccggctgccaccttctgggctcctggggccctgcccaccacaagtgagtgagccccacagtctgccccgctccgtgccccaggagggctgtcccagagcctgccacactgggaggaagcccaacacctcgcaggccgctcccggccagggagacacagctctccagctgcgggagggaggcgctcacagggcccagcaaatcgtttttcctaaatgtgtttatttggacattttagccacttggttttcaaatgagtacaagagggaattggagcctctctggttgaaggaggcttgcttccctagcacctgcagtgaccctgagcggctccaggaatggcactttttaggaccccatgatttgcacacctctttctcacctctgtgtttccatatttctgtttaaagtaacatttaaaatttcagtgttggctgggcaccgtggctcatggctgtaatccccagcactgtgggaggccaaggagggaggatcacctgaggtcaggagttcgagaccagcctggccaacatggcgagaccaggtctctactaaaaatacaaaaattaaccgggtatggtggtgggcacctgtaatcccacctgctggggaggctgaggcaggagaatcgcttcaacctgggaggcggaggttgctgtgagctgagattgcaccactgcactccatcctgggcgacagagggagactgtctccaaaaaaaaaaattttctctaaaaagaaaatatattgtctttcctgtaaaaggtttatattatagtttaacaaaatatatagacatttaaaatatatacatatataaacacactttatatattatgtaaatatatatatgagagcgctgtcaagtcaaaaagaagtgaactgaggtcacatggctggagccagcaccatggcaggaggcactggcgggaggaggggctgacacgggccaggccctggagatacctgctgcccttgtcccagcagcgtggccctgtgcacggtgcggagtttctccacatataaagcgtgtagataatagtgctcaccccgtggaagggactggcgcgatggatgggggacatgtctgtcttattgcgcccagcacgcctggcgccaggatgcaggcactccgtgtcacctgtctgtcccatactgtctcgggtggttcttactgatttgcagctgggatgcaggcactccctgtcacctgtctgtcccatactgtctcgggtcgttcttaactgatttgcacctgggacgcaggcactctgtgtcacctgtctgtcattgtctcgggtggttcttactgatttgcacctgggacgcaggcattcgctgtcacctgtctgtcactgtctcgggtggttcttactgatttgcacctgggatgcaggcactccgtgtcacttgtctgtcccagtctcgggtggttcttactgatttgcacctgggatgcaggcactcggtgtcacctgtctgtcccatcctgtctcgggtcattcttaactgatttgcacccgggacgcaggcactctgtgtcacctgtctgtcactgtctcgggtggttcttactgatttgcacccgggacgcaggcactcgctgtcacctgtctgtcactgtctcgggtggttcttactgatttgcacctgggacgcaggcactcgctgtcacctgtctgtcactgtctcgggtggttcttactgatttgcatctgggacgcaggcactcgctgtcacctgtctgtcactgtctcgggtggttcttactgatttgcatctgggacgcaggcactcgctgtcacctgtctgtcactgtctcgggtggttcttactgatttgcacctgggacgcaggcactccgtgtcacctgtctgtcactgtctcgggtggttcttactgatttgcacccgggacgcaggcactcgctgtcacctgtctgtcgctgtctcgggtggttcttactgatttgcatctgggatgcaggcactccgtgtcacctgtctgtcgctgtctcgggtggttcttactgatttgcacccgggacgcaggcacttgctgtcacctgtctgtcactgtctcgggtgtttcttactgatttgcacctgggacgcaggcactccgtgtcacctgtctgtcactgtctcgggtggttcttactgatttgcacctgggacgcaggcactcgctgtcacctgtctgtcactgtctcgggtggttcttactgatttgcatctgggacgcaggcactcgctgtcacctgtctgtcactgtctcaggtggttcttactgatttgcatctgggatgcaggcactccgtgtcacctgtctgtcactgtctcgggtggttcttactgatttgcatctaggatgcaggcactccgtgtcacctgtctgtcgctgtctggggtggttcttactgatttgcagctgggatgcaggcactccgtgtcacctgtctgtcgctgtctcgggtggttcttactgatttgcatccacataggctttgggctctatcccacctgtcgtcttcggattctctaatacgcaggagtgctcttctgttagtttactcatagtttattaaagtacagagaaaagacatccaggatgataaattttacagtccttgccggggactgccagcttccagtggtgttgcctggcaccagtgtgacccccggtgcctgccccgctgaaccttctgtaaactgtttaactgtgctggtggtttcccattctctaggcgctgagatgcgtctggagagccagagggcctgcctgaaggaatcacctgagcctgtccgtccaccaggagtggggagatgcccccatccagtcctggaggacccgctgctcctgctgctcccggggatggagcaaggccaaggctgcgggaggctgggagccctgccctgcccatccctcctgcaccagcgctgtccctgcacactttggttcagtcccggtgcccctgccaagatgtggaaggggccgggtgaagacaggcttgagggctgccccagcaggctctgggtatgacctgcctctggccctggtcctgggcggggcctgtgggtggagtagtacccccaggccctgccctgggtgacagactgggaggaaaccaggctggacctgggcaggcgggatgtgttggccacagggagaggcggaccggcacccggtgggacctcctaggactgggccttcttccagggggcccctggcagcagctggggtgtcgggcagaatgtgacttgtggccttaccatggacttgaatgggacttggctggcctcaggatcttgtgcctggaaatagcctgaggtggctcaggaagcggagaaagggtgccagaccattctctggcggggaccagggcccaaggccccagggctggaaggagaccaaggggcagccgccctggagggacatcagtgcttcctcttccacccaattcccccacgcggttccatgttttcccaccagcctgttggcgaagttgctgctccggcattcagtacctgcttcttccagagaaataaagttagtttctattttatgtt

SEQ ID NO: 14565 - DNA, 3377 bp, Homo sapiens
cgtttgctgggggcttgtacattcactcgcccccattcacttctctcccttcgtctctctacactctgccctctcgtccggccgtctccctcctttgtcctctgtcctgctccgtctctctccccctgtccgcatggcctttcttgcaggggagcctccacctcgcccacctcagcctgccttcttcactcagagtaagtggggctgcttccgatgccttggcccccgcccccgccccctctctctcactcctctcctggaaggtacagagcctgggcggctgggccggaggggaggtgggtgggtgtgtgctgtgagcttccgcggctgccctggcctagcatgcctgccccccctcgagcccgccccccggagcctgggcttctgctcacgagtgtggccctggcttccgcctcggcctcactccctcccagacctgtctgagcttctggagcacgagtgtggccctggcttctgccttggcctcgctgcctcccagacctgcaggcgctgtctgggctttgtggccgttggtcaggagtactgtcctctccaaggatagtccttatagcccctgatggcaggaggcggctccgtgcctgcactaatggtgtgccgtgacaggggcggggatgagggctcactaactcgccagggcgcaggagcagggccgccggggtcttgtgctggtggaggcagcgtcaggcaggagccagtgttgcttgctgcagcttagacggagcgaggcggggctcaccggcccacatggggctgccgggcagagcaggttccgccctcctgatggagtggtcggaggtgcgctgagaacctggccgccggtggctgacctcagacctcggggggagttgggagtggagggttgctgggggacacttggctttctctcccacgtgccacctcccctcgtgtcccagaccctgcctgactgccttcctgttgggctctccctttccatcacagaaccaacctatgaccctgtgagcgaggaccaagaccccttgtccagcgacttcaagaggctgggcctgcggaagccaggcctgccccgagggctgtggctggcgaagccctcggcgcgggtgccgggcaccaaggccagccgaggcagcggggctgaggtcacgctcatcgacttcggtgaggagcccgtggtcccggccctacggccctgcgcgccctccctggcgcagctggccatggacgcctgctccctgctggacgagaccccgcctcagagccccacgcgggcactgccccggcccctgcaccccacgcctgtggtggactgggacgcacgcccgctgccccccccgcccgcctatgacgacgtggcccaggatgaggatgactttgagatctgctccatcaacagcaccctcgtgggcgcgggggtccctgccgggcccagccagggccagaccaactacgcctttgtgcctgagcaggcgcggccgccccctcccctggaggacaacctgttcctcccgccccagggtgggggcaagccgcccagctccgcacagaccgcagagatcttccaggcgctacagcaggagtgcatgaggcaactgcaggctccggccggctccccggccccctctcccagcccggggggtgacgacaagccccaggtgcctcctcgggtacccatcccccctcggcccacgcgcccacacgtccagctgtctccagcccccccgggcgaggaggagaccagccagtggcctggacctgcttcccctccccgggtgcctccgcgggagcccctgtcccctcaaggctcgaggacacccagccccctggtaccacctggcagctccccgctgccaccccggctctcaagctcacctgggaagaccatgcccaccacccagagctttgcctcagaccccaagtacgccaccccccaggtgatccaggcccctggcccgcgggctggtccctgcatcctgcccatcgtccgggatggcaagaaggtcagcagcacccactattacttgctgcccgagcgaccatcctacctggagcgctaccagcgcttcctgcgtgaggcccagagccccgaggagcctacccccctgcctgtgcctctgctgctgcccccacccagcaccccagcccccgccgcccccacggccaccgtgcggccgatgccccaggctgccttggaccccaaggccaacttctccaccaacaacagcaacccaggggcccggccaccacccccgagggccactgctcggctgccacagaggggctgccctggcgatgggccagaggcgggccggccagcagacaagatccagatgctgcaggccatggtgcatggggtgaccacagaggagtgccaggcggccctgcagtgccacggctggagcgtgcagagggctgcccagtatctgaaggtggagcagctcttcgggctgggtctgcggcccagaggggagtgccacaaagtgctggagatgttcgactggaacctggagcaggccggctgccaccttctgggctcctggggccctgcccaccacaagcgctgagatgcgtctggagagccagagggcctgcctgaaggaatcacctgagcctgtccgtccaccaggagtggggagatgcccccatccagtcctggaggacccgctgctcctgctgctcccggggatggagcaaggccaaggctgcgggaggctgggagccctgccctgcccatccctcctgcaccagcgctgtccctgcacactttggttcagtcccggtgcccctgccaagatgtggaaggggccgggtgaagacaggcttgagggctgccccagcaggctctgggtatgacctgcctctggccctggtcctgggcggggcctgtgggtggagtagtacccccaggccctgccctgggtgacagactgggaggaaaccaggctggacctgggcaggcgggatgtgttggccacagggagaggcggaccggcacccggtgggacctcctaggactgggccttcttccagggggcccctggcagcagctggggtgtcgggcagaatgtgacttgtggccttaccatggacttgaatgggacttggctggcctcaggatcttgtgcctggaaatagcctgaggtggctcaggaagcggagaaagggtgccagaccattctctggcggggaccagggcccaaggccccagggctggaaggagaccaaggggcagccgccctggagggacatcagtgcttcctcttccacccaattcccccacgcggttccatgttttcccaccagcctgttggcgaagttgctgctccggcattcagtacctgcttcttccagagaaataaagttagtttctattttatgtt

SEQ ID NO: 14566 - DNA, 11192 bp, Homo sapiens
cttctctccctgccccatcccagagcctctgacctccttcctttccatgcttctctggctgggaaacttcctttcctcttcccccaccaggctgcaagtgaataagaggcctgggcttagacgatttccccaagtccctgcatcgtgtcgtcaaggggtcctgcccgcttcacacggcgcccctgagacccactgttgaacctggcacagggggtcacaacaagtgtttgctgcatgagtgttttaagtccctggggcggacgcaggtagggtgtttgagagggcttctctttgacccctgcctctgccaggtgtgcccccgagagcctgaagacacgcaccttctcccatgccagcgacacctggatgttcggggtgacactgtgggaaatgttcacctacggccaggagccctggatcggcctcaacggcagtcaggtgagggctgggagacgggcccccatagggctggtggggtgaattccattccctgcttgcagcctggccctgctggaactgcctctcaccaatggactccctcctcccacgccccgtgcctccccccacttcccgtgcctcccaccacgccccgtgtctcctctcacgccccgtatctgtatggcctcagggagagcccagcaaagagacggggagggaaaagctggggcctgccctccttctctagcccttgccacatccacttgttccgaggctccagacctgggaagaagggactggggctctggagagggcccctcccaggcaggcagatcccttctttggaggccaggcatggcagcagccgctgcagctgtggatgggctggagggaaggcgggaagtgaagggctgggcgctctgtttgtcgtcaaactctgcacctcctcaccttcagatcctgcataagatcgacaaggagggggagcggctgccccggcccgaggactgtccccaggacatctacaacgtcatggtccagtgctgggctcacaagccagaggacagacccacgtttgtggccctgcgggacttcctgctggaggtgagggacaggtcagcccaggagagctggggtgttcaagctgaggggctacccaggcgtcagtcccagagttggccacgaccttcctcttcctccaggcccagcccacagacatgcgggcccttcaggactttgaggaaccggacaagctgcacatccagatgaatgatgtcatcaccgtcatcgagggaaggtagggagtgcagggctgggccccgccctgggatcgcttgaagggcacaggtcggagggacctgtggacagatctgtttggcctccaagattcccttggccacatacaggctggcggttgggcctgaaccctgcagtgtgaggggaggacaggcctgcctccgtcttcctagtgcctttccctgcccagcttccctccaccaccctttcccactgggctgcagccctggctgtgtggttgggccaggctgcctttatggaggggtagggagtggcctggcctcggtggcagcagagttctggactcccgtgcttcctcctctgctcctccccgcttctctccctgcttcttcctggcacagggactcagccatccacctgggtgcgtttcagtagctgaagcagcccagcctgccctcttgcagctttccatccttcctgctgagcccaccaccccctcccaggcctgcctccagcctctggtcctctcttcccatctccccttgggaggaccctctctatacctaaccctcctcccacagcctctcgggagtccctgtcttccacctgagcccccgcagttctagcgcctgccctgaggccccaccactgctggccctgccttgtgctggctgatccccagggtgtctgagcaactggctggggcagggcaggtttcaggtacctttgaggcaggggcagtattgaggaccaggaagaagagtgaagtggaggaaatcccctgtgctcgcagctcctgactcaggccaggcaaggatggggctagggctgcttcccagggagcctcttccacctgcactgcagcttttggagtctgcggccttcggtgcaatcctgtgcctcttgggggtgggtggaggagacctggggggctgtgtggagtgtgacctgcaccgctgtggccccgacaccccgagccttcccaggcccggctccctcacccttgggcccagggtctgggaataggaatgacatactgagactgcagggcctgtggttaggggtgttatgctggggaagaatgcagaaggttctagaaagagaggcctggggacaggaggcaaacagtctgcaggtttggagctgaggggccagggatgggattgcaagcgtggcgctccggggagcattctggaaataggaagattaagggtgggggggtcccctggaagtacctggcagggcctccagcccgaagtccagcctcatgaccgtgtccacctccacgagctggaaagccgtgggcctggcccctcttgtgctgctgccggagccccagatctttaccacctgcttcccttgctctcagcaggagcctgtgtgcctgccagtgtccccaggggtgactcagagtggcctgtgtttggggcgtgtgtctctggagctggtgttttaggtcaccgcccgggcaaggcgggcagtgggaggggccgggagcggctgctcctgggagggttgtgggtgtgccccgccccgcccttccgtcgaaggcccccgttggccccagccgctggttccctgtggctgctgctggtggggctctgggggctccttccccctgggccaccagccctggcttggaaccacagcacctgccctccgtgcctggagctgctcaggaggtgggaggtgaggggcaggaggccacaacagccggtgaggcttgggagcgggcctgggtgtcggtggtggcagagcttgactctgcccccttgtttcttcagtccctgaatatctccatgtttgtttggctgcctccgtctccatgtctccaggcggatggctctgtgtgagtctttgggcctgggtgtgcatctgtgggtctgtgtttggagttccctcctagcctggccttctcttcgccgtggcttcccacttgcgaagctgtgtccagtatttgtttcctggtgcggagtctgggaggccacctgccgcagctctgactgagtctaggctcagtccttctcagggtaccaggctgtgggcagaggggagacacctagatgtttcgtgctgtgtctagatttggagacacaaatgatgactggtctttcccaggggctcgtttggaggaaggggtggctggcagcacttttgttccgcatacagagcgggtgttggaatccattgcgggtccttggcctggtctggccctggagcctcggcttcctgtggtgggtgggagccaggcatccgggttatccctccaggcctgggcgcctgggacccctagggagaagagcgggcgggcgttttgaacagaatgtccggcattagttgagccatttctggactaccttcggcccggacgggaacgtggtgctgagatttccagagctggggcagccttaggcagttctcagcaccggcctctgttttccatcttgtctaccccagagatgttgaccagaggcccgggggcagcaggaggtagaaggttcatgcggaggtgttgggcccttttcctgctcccccaggaagtcctcatccgcccctgcttcagtcacggccgggtagcagccctggccctcccatggccacggggactccggcctgttcatggcgggagagagagggcgcggacagggcgggcctggaaggaagggctggcctcagtcccctctggactgctggtgcctcggccacactgagcctcacacgggtgcgtgtgggctgcgagaagtgacacggtcctcttggaagtcccactggagccttgggatgaagctgccttggagtgtgcgtgggcgccatcccgagggggagcttcctgtgcctccgagcgtgcgtgggcgccatcccgagggggagcttcttgtgcctcggagcgtgcgtgggcgccatcccgagggggagtttcttgtgcctcggagcgtgcgtgggcgccatcccgagggggagtttcttgtgcctcggagcgtgcgtgggcgccatcccgaggggagcttcgtgtgcctcggagcgtgcgtgggcgccatcccgaggggagcttcctgtgcctcggagcgtgcgtgggcgccatcccgagggggagtttcttgtgcctcggagcgtgcgtgggcgccatcccgaggggagcttcttgtgcctcggagtgtgcgtgggcgccatcccgaggggagcttcttgtgcctcggagtgtgcgtgggcgccatcccgagggggagcttcctgtgcctccgagcgtgcgtgggcgccatcccgagggggagtttcttgtgcctcggagcgtgcgtgggcgccatcccgaggggagcttcttgtgcctcggagtgtgcgtgggcgccatcccgaggggagcttcttgtgcctcggagcgtgcgtgggcgccatcccgagggggagtttcttgtgcctcggagcgtgcgtgggcgccatcccgaggggagcttcttgtgcctcggagtgtgcgtgggcgccatcccgaggggagcttcctgtgcctcggagcgtgcgtgggcgccatcccgaggggagcttcctgtgcctcggagcgtgcgtgggcgccatcccgagggagagtttcttgtgcctcggagcgtgcgtgggcgccatcccgaggggagcttcttgtgcctcggagtgtgcgtgggcgccatcccgaggggagcttcttgtgcctcggagtgtgcgtgggcgccatcccgagggggagcttcttgtgcctcggagcgtgcgtgggcgccatcccgagggggagtttcttgtgcctcggagtgtgcgtgggcgccatcccgaggggagcttcttgcacacgtcctccgcactcttactctccttcccccaggagcaagcatgttttctcgagtggtgtcaggactcccagcagccatgggggctcttgcctcggccatacctgcactaagggaggtgggcttgatgtctcctttccctctcagaagtgggtcccaaaggaggcttctgtgcctggagctgggcagtgttggcggaagggagaggccagacggagtgacctgccttgggcacgagtcacgctgctctgagcaaggtctcggcctcagcggcattctcacccagttactgagcgcctctgaagaggtgtggagagcagagtccggcgtctggcccgcggcagccaccggggagcccgtgggtgtagcgggagagccgcagcccagccggtgccggggttcctcctctacgggccgccgtgggaggctgtgtgcgtgctggggagccggggctctgctccttcgagtggccctgctatttttcagatgggactcgtctcgtctcggggtactgtcctctctccttccttccctccctgcaggcagggtgggaatcacagggtggctgtgtgtggtggggccaggccagtggccctgtgtatgaggaggctgggcagggggagcacagccccgtctccccgcgccccgcgccccccgcctccccgccgaccgtggtgctctcgggtttgactttggtctctgggatgggctgttccggagtcaccccgctccagccaggcctcgtcaccttacaaggctgtgggtctgggtgcccaggcgtcgccacctcctccgtcctctctccccggcctggctgggtttcagaggagcccttcttcacgctttggccctgggacaggagaagtgggggttggtggggagggcgtgcagtgtggtgccacacgtgtccaccctagcagctctgggctgtcaccgcccccgcgtgcccagactctgcccacggggctgtcaccgcccccgcctgcccagacactgcccacggggctctcaccgcccccgcctgcccagacactgcccacggggctctcaccgcccccgcctgcccagactctgctcacggcatcacgtatgacaagtccagcagcagacgcgggagcctcacaacctgtgagagccttcgggagtcaggagtgtcttgcgggagccctgtgcttcctggcctgcctgcccctgcccctgcccctgcccctgcccaggccccggcttaggccacatcagcagaggtttcgtgtctgaggtcagagggggactggcagccctactgtctggtcactgtgggagagctgagttcccttttggacacaggtagagcccctcctgaggagacggggaggctcccgcaggccttccgggaggtggtggaaagctccggaagcaggtgaagcggtggagggagggactgagttgcccgagtgctcctagactctcccgcgtctgcattcgggaggcaggttgtagctggaggcctggcccccagcctagtgcaaggccctaggtgtcccccggcacccccgcacctctcagaactcctggaacccagccgaggagtgaaatcaagtggccagaagaggactggggccccggccttgccagggaactgaggggtgaggaggaggtgtgggcggggcgctggccccacagacctgaaagctggcgttgggtcccaggtctgctgggatctttctggtaaccgtggacaggtcatgttgcctgctgcagcagcttccagcgtgcctccttatttgcaaaccatagggaaagctgcctgacccacctagagagttgtgggtaaggccgtgtgcaaacaggcctgtacggggcatggtgggtcacgggggctgttggggaggagggccggtggcacacagcctggtcctgaggcctgagctccatcccccttctgccacagtggccagggtgtgaggagggtcccagtgccggggctgccccgccacgcctggcgttcaccgtgccatctctgtcgcgcagggccgagaactactggtggcgtggccagaacacacggacgctgtgtgtggggcccttccctcgcaacgtggtgacctccgtggccggcctgtcggcccaggacatcagccagcccctgcagaacagcttcatccacacagggcatggcgacagtgacccccgccactgctggggcttcccggacaggattgacgagtgagtactgggcggggatggatgctgacctggccccgctcgggactccagggccctcagcacggcacgcgtgggcggaatctgctcttcaccctttcgcccgggcttcagcccccgacccgccactctcccctcctcaccctggccttactctcgggaagctgtggaaccctaggaagcccagcctggtgggggttctccaggggaatgttctccaggggagtgttctccaggggagggttctccaggggagggttctccaggggaatgttctccaggggagggttctccaggggagggttctccaggggagggttctccaggggaatgttctccaggggagggttctccaggggagggttctccggggagcgttctccaggggaatgctgtccctgccattttcaagctttggggggccgatctcctaactctgagacacttcatctgtgaaacaggttcacccccccaataaggggaaggctgtaaatgcactctgaattagcacttgctgctcagatgcaggggtcctgagagaagctttcccactcactgtagatgaaagtagggtcaggagcttctgaggatggactcctgtttggtggaaaggtccccggagccacagctgtaacccctcttggtactcgggccttaggaaaatgaacttgggaggaacccggtgggagctgctgaggaggagagcttctcccatgacccccctgtggccccctgtgaccctgtgaccctgtgacccctgcacacgagcagtggttttccttctcctgctggtggtgccagagtcctggagacgtgaacctgctggctcaggccctggggatgtatgcaggtccacatgggagtgagcctgctttccagaaccagagtgggactggggaccttggggactgcagagggaacgttaggtggcagctccgcctccccaccacacagtactctacggagctcactccatacctgggagaggccctgtctcctatgtaagaggataaggccaccgaggggcatctgggaaggacacgcagaatcagtcacttccgggatgccaccccccaccccccgaagcttcttgcgccaggcctccaagcctctctgctggccgcagggggattccaggcccctggcctctgcagcccttctcctgctgacttctgatactctggtctgccctgagaggcgtggaaagcaggggccttcacccaccgggccccacacaccagaaccccacacagcgggcccccacacaccagaacccacacagcgggcccccacacaccagaaccccacacagcgagtccccccacaccagaacccacacagcgggcccccacacaccagaacccacacagcgggcccacacacactggaaccccaagctcacagggctcagcccatgtgttttgcctaaaaagaacccagcaagggcctgagagttggggtgaaagactgcagacacctccaggagaggctggtgccctctgccccactcctggcatgctgtggccagcccagccccattcctccaggctttaatcagccccagtgactaagtctcagatactgacagttggtgcagggacggagggtggatccggagcaggacaggtggcccagcctctcccgcacctcctggccatgtggcagaagggtgcctcctgcccaccctggctgggcaccatagctgggatgccccgttcttaggccctccatcgtggcctgcgggacaggagtgtctgccctctggccgctgcctggtgtgggctgggggcctggggggttgtggaggaccacctctgcccttgtagggtgtagttggagtccctgaggtcctaggctttccatcctggggtcaggtgtcctttctctgccttctctccaggacaccccccagctgagacgtgcggtcaggttctgtggactgggaggcgggaggcctgtgcttcagacccaagactacacccggtttcctccaggacgaaggggctctgatgagattctgccacccctccacacgcttcccctgctctcttgacccagctctctcccccacagactgtatctgggaaaccccatggacccccccgacctcctgagcgtggaactgagcacctcccggcccccccagcatctaggaggggtgaaaagtaagagcccctctgctccctggtgtccctaactcatcggctactcaggaaggggcactgtcttcacaggccaccctaaggctgctgttctgtttttggggacagtggggtcagggcagcaggcgggacagctgtgtccctggctccggctgggcgtggggtggaagacaggcagctgtatccgccgaggtgggcctcctcgggctgggtctgcagcaggcccgtccgccccggcgtccctcctccctccttccacggccgagctcagatcctggctttcctcacttccccctaatcctgctctcctgtcccaagccaaaaccaccccacggctccggctctgcctggggcctcctccatctcccggtcctctgcctatcatactggaccgccgtgttcctcatcctgccgcctgcggcctcccgtttgctgggggcttgtacattcactcgcccccattcacttctctcccttcgtctctctacactctgccctctcgtccggccgtctccctcctttgtcctctgtcctgctccgtctctctccccctgtccgcatggcctttcttgcaggggagcctccacctcgcccacctcagcctgccttcttcactcagagtaagtggggctgcttccgatgccttggcccccgcccccgccccctctctctcactcctctcctggaaggtacagagcctgggcggctgggccggaggggaggtgggtgggtgtgtgctgtgagcttccgcggctgccctggcctagcatgcctgccccccctcgagcccgccccccggagcctgggcttctgctcacgagtgtggccctggcttccgcctcggcctcactccctcccagacctgtctgagcttctggagcacgagtgtggccctggcttctgccttggcctcgctgcctcccagacctgcaggcgctgtctgggctttgtggccgttggtcaggagtactgtcctctccaaggatagtccttatagcccctgatggcaggaggcggctccgtgcctgcactaatggtgtgccgtgacaggggcggggatgagggctcactaactcgccagggcgcaggagcagggccgccggggtcttgtgctggtggaggcagcgtcaggcaggagccagtgttgcttgctgcagcttagacggagcgaggcggggctcaccggcccacatggggctgccgggcagagcaggttccgccctcctgatggagtggtcggaggtgcgctgagaacctggccgccggtggctgacctcagacctcggggggagttgggagtggagggttgctgggggacacttggctttctctcccacgtgccacctcccctcgtgtcccagaccctgcctgactgccttcctgttgggctctccctttccatcacagaaccaacctatgaccctgtgagcgaggaccaagaccccttgtccagcgacttcaagaggctgggcctgcggaagccaggcctgccccgagggctgtggctggcgaagccctcggcgcgggtgccgggcaccaaggccagccgaggcagcggggctgaggtcacgctcatcgacttcggtgaggagcccgtggtcccggccctacggccctgcgcgccctccctggcgcagctggccatggacgcctgctccctgctggacgagaccccgcctcagagccccacgcgggcactgccccggcccctgcaccccacgcctgtggtggactgggacgcacgcccgctgccccccccgcccgcctatgacgacgtggcccaggatgaggatgactttgagatctgctccatcaacagcac

SEQ ID NO: 14567 - DNA, 1555 bp, Homo sapiens
cttctctccctgccccatcccagagcctctgacctccttcctttccatgcttctctggctgggaaacttcctttcctcttcccccaccaggctgcaagtgaataagaggcctgggcttagacgatttccccaagtccctgcatcgtgtcgtcaaggggtcctgcccgcttcacacggcgcccctgagacccactgttgaacctggcacagggggtcacaacaagtgtttgctgcatgagtgttttaagtccctggggcggacgcaggtagggtgtttgagagggcttctctttgacccctgcctctgccaggtgtgcccccgagagcctgaagacacgcaccttctcccatgccagcgacacctggatgttcggggtgacactgtgggaaatgttcacctacggccaggagccctggatcggcctcaacggcagtcagatcctgcataagatcgacaaggagggggagcggctgccccggcccgaggactgtccccaggacatctacaacgtcatggtccagtgctgggctcacaagccagaggacagacccacgtttgtggccctgcgggacttcctgctggaggcccagcccacagacatgcgggcccttcaggactttgaggaaccggacaagctgcacatccagatgaatgatgtcatcaccgtcatcgagggaagggccgagaactactggtggcgtggccagaacacacggacgctgtgtgtggggcccttccctcgcaacgtggtgacctccgtggccggcctgtcggcccaggacatcagccagcccctgcagaacagcttcatccacacagggcatggcgacagtgacccccgccactgctggggcttcccggacaggattgacgagacaccccccagctgagacgtgcggtcaggttctgtggactgggaggcgggaggcctgtgcttcagacccaagactacacccggtttcctccaggacgaaggggctctgatgagattctgccacccctccacacgcttcccctgctctcttgacccagctctctcccccacagactgtatctgggaaaccccatggacccccccgacctcctgagcgtggaactgagcacctcccggcccccccagcatctaggaggggtgaaaaaaccaacctatgaccctgtgagcgaggaccaagaccccttgtccagcgacttcaagaggctgggcctgcggaagccaggcctgccccgagggctgtggctggcgaagccctcggcgcgggtgccgggcaccaaggccagccgaggcagcggggctgaggtcacgctcatcgacttcggtgaggagcccgtggtcccggccctacggccctgcgcgccctccctggcgcagctggccatggacgcctgctccctgctggacgagaccccgcctcagagccccacgcgggcactgccccggcccctgcaccccacgcctgtggtggactgggacgcacgcccgctgccccccccgcccgcctatgacgacgtggcccaggatgaggatgactttgagatctgctccatcaacagcac

SEQ ID NO: 14568 - DNA, 24563 bp, Homo sapiens
ggaagccggggagtagggctggactgtgaccactgccctggagagaagacagaaacaggacagaggatcccggctgcagccagcgtgaggaaagctctgctccctgccagaccggccagctgtggaaacccagcggggcttgcagcagagcggaggggcccaccccgttcttcctcatttcccacccctggtgtgggatttggggggctcctgggcagagtgcgaagctccggagccgaggccactggatccccagtgactgctcgggggggtcccgctgcgtggagatgccggcagcacgtcggttccctggcctggagctctccttccctctcctggccagactgcggcgacgcctgtacacagtgagtggggggcaggggctggactgctggggactggttgggctcctcagcaccagcacttgactgagaggcagaaagcaagactgggagcggctgagggaccccgccagtgagggcttgacggggagtccgggccaagtggcctctcctgcggctgctgcattccttcttcttggcctgtgtgtttgcacgccggccacagagtagtgacggacacaggtgtgcagactccatgaggtgcgggggccaggaccatgcagaattggagagtgtttgaactctggaggagctgcagccatgccctgtgctgcacaaagaaccttgggctggagggggacttagaggggaggcggacccctgcggagtcaccctggactgagaccctgaccgcttgcctcaccagcatcccggagttccttcccgtcctcccacatgcatcccctgtgcagagctgcgctgttgctgggtcagggagcatggagtgcacagctgaacagaggtgcattagctggtgtttcagggagagggaacaggccgggctgtgctttctgaagagcttcaggggaggggcctctgggtctcccccagccctgaccaccccgggcatggctttgagctgttttcaggagcctagaggagggggcctggatccttgggagttggtggtgggaaaaagaagaggagccctggagactgctctccctgcgggagactaggagcctccatcctgaggctgagccctggagggggggggtcactttgctccagggacagggcagcggtggccgtggccgggtggagaggagacgctgcctaggcccgtgactcctagtgtgcctctgggcttgcttccggaaagccacgacgcctggtcctcttaaaccccacgcctcttgttttgtaaacagatgattttgttgaggataaatgaatacagcttaatacttagaactgttcctcgcatatagtaagtgcagttgaagtgttagattttattttattttgagatggagttttgctcttgttgcccaggctggagtgcaatggcacgatcttggctcaccacagcctccgcctcccgggttcaagtgattctcctgcctcagcctcctgagtagctgagattacaggcatgtgccaccaggcccggctaattttctattttcagtagagatggggtttctccatgttggtcaggctggtctcgaactcaggtgatccgcccacctcagcctaagtgctgggattacagctgtgagccactgtgcttggcctagatgttatttttattgttacttgtcttaaataaagttaatagaaatatataacctgttatattaacatgttaacctgtgtacagtgaaacaagcaacacagtgggaactctaatataaagagacataagaggaaggtaataatattttatgtatcctaatacgttagtaacctagacaatgtagtgaggagtcagatcttgagacctcaggtggaaacaccgtgaaggcagcatctgcaagtgctgaccgagaggggagttttgaaataatgagagggggttgccttcactgacatttttgcaaatagtggacttctgctatgttctgaataaagcaaagtccattttcccttaagtttacacagtagtttcattccaggaaaatttattttatattaaaactgtaaggccaggagcagtggctccccagcactttgggaggccagggcaggtggatcacttgagctcaggagttcgagaccagcctggccaacatggaggaaccctgtctccactaaaaatacaaaaattagccgggcgcctgtgatcccagcttcttgggaggctgaggcgggagaattgcctgaacccgggaggctgagtttgcaatgagccaagatcataccattgtactccagcctgggagtctcactctgtctcaaaaaaaaaaaaaaaaaaaaccaaaaaactataaaagtactttcttatttatatataaagtgggatcatattctaggtttgcatgatcataaacaccttcatgaattgagttgtgtgggatttgggacagtgcgagaatgtcctacgcattgcaggctagctcacgctcttgtcccccaaccacccactgaatgtcactaaggcccccccaaatgttgtggcaaccagaactgtcccatagggggctgtgcagcctcatgagaaccattccagtaaagggttacagctttaagtttggaaaccacccggctggcccagctgcctggcccggtcgccgaggtggaagagccaggatttgaactgagagtttctcattcccctttgttactctttgtacttccctgagctgcctgaaaaagtcggaactggcactgtgttggcagggccactgggaactgtgggggcaggaggctcacgctgggcccaggctgtgtgtgcctgcttctcagtgctgctcactgtgatgggagctggggaggaggccaccgctgagtgggggagggggatggcttggtccccagccgggcagctggccttttttctctcgcctgttcctctttggggattgagcatgggtccggggctagcctggccacgccctcagctctgacacaccttacgcagacagggatgggtttgctgtgcggtgggtccgcttgcttagctttgaaggtgccaccagcttctttatctgggcccaggatagtgtaggtcagaggtcactctccggtaccactggctgattgcggcctgcagtgtgctttggccagcacgctgtgtgtgcgtgtgcatgcttttcagatctgaactattcagcattgttaaaaagtcaggagaaagacgaatattaagtgaaatcagggaacagaatggtatggttaatgcgtgaatattcgtgtagggacaacagagtctgaagcgtccgcagaagacatcactggcaactcctggggagccgggtggctgtgcagctggggagggaatgagattcgtggctcagtgtgccttctgaatattttaccacgtgcatatattaccttttccaaactttaatggtgagatttcacatgtaaattgggatttatttcttgaaaaaatggaaagctttgacaacactgggccacagtttcttctgacaaccattgatgggatctgagctccctgttgacaggggtgtctgcgagcccaccgcaggccccacccctccctcctgtcttccgcttgctgtggccctgtaggcacttgagtggtggcccgtggagtggtctttggattgttaggagaggctggggtggtcaggcgctgggaggaacttagcttagagctcatctgaccctgagagttttctccgtcacatctaaggagcccatagatgggtctcggggcacattgcaccctagagatttttatcaaatattaggagtaagaacacgtcggtgttcccggagagaccactgttagtttttaaaagattttcaaggactttcgacccctagaaacttagagcaggaatgtgagcacaggttgatcttgggtcactcagtcacagatcacatttcgggagcaagaccctgactcctgactccagggccagggctgtatctccgccgccctaattgtgccctgtggctggcaggaataggggacgtgggtccaggcggttctcggtagcttccctcgggagtcagaaggtggtgtgagcccttccgggtggccgtgtagtgggatgaaggtgagcccaggtcactcgggcaggcccctgttgtccccccacaacccttgtccctgagccactcctccccccacagaggctgggaggcggcagaatgcagccagaggagggcacaggctggctgctggagctgctgtccgaggtgcagctgcaacagtacttcctgcggctccgagatgacctcaacgtcacccgcctgtcccactttgagtacgtcaagaatgaggacctggagaagatcggcatgggtcggcctggtaggtgggatgttggcctggcttgtcttgcccctgaccctttccgtcctctgtcctcaggaccactcggtgcacgggtggcagctgagaactctgtcccagagccctgagggagcaggagggacatcagtaggtgctgatgtgtgatgagaacagttggcagttataaaggtgaattggagtttgaggagagtgaggccttccctaaagctggctacacaggagtcactccatgccccgttgtgattgttctcacgtagagtgtatgtcctccattgcccctccttcataagcatcgaattgagtctgttctcatcattctgactaccggggggtccatgtgcagagatctgtagggagaacgctaactctcagatggtttgctgattcgtgctcacgctctctttcttgctctctcacacgcacacacgcatgcacacgcacaggcatacacacacacacacacacacgcaggcacacacgcacatgcgcacacacgtgcacgcacgcatgcacgtgcacacacgcatgcacgtgcgtacgcacgcgctcacacgcctgcgcacacagacacgcacacacacacacacgtgtgtgcgcacacccgcatgcacacgcacggcatacacacatgtacacacacgcgcgcagacgcacacacgtgcgcacacgcgtgtgcacacacacgcacatacacacaggtttgctctgatttgagttcaacccttatcttcatatttttcctaaaagtgggggttgtagcatctaaaagtcatgatgttcttcatagaacattagaaacgtattagggctttcaagttaaaatagctaaataggtaataatgtgtcaagttagacactgacttagttaaaatagctaaataggtaataatgtgtcaagttagacactgacttagttaaaatagctaaataggtaataacgtgtcaagttagacactgacttagttaaaatagctaaataggtagtaatgtgctaagttagacattgatttatgctactttaggcctggatagttggtgtctgatgccagtagcataaaaaaattttacggagggaaaaaaacctcaacattgagaaaattctgttcattaccttgatttttcctgagaactgggagaagcccatcgcttcaagtttttggttaaacaccttcacccagtttgagagccagtgccaggaagtggagtgcagagaccgtcggtcagttgaggctccgggttagttggggttgatttcattgctatcatcgggtgggcggtgtctagtgacaggctcacccccaaggggaccacaggcagcagcctctctcgggctacggcggccttcacagcacgcggttccccgctctccctgcaggccagcggcggctgtgggaggctgtgaagaggaggaaggccttgtgcaaacgcaagtcgtggatgagtaaggtgggtgaggaggtgggtgaggaggtgggaggggggcagcctcgaacgcccccctccgcttctggtcctgggaaccttccccagctccccggcaggtcgaatctcgccgttctgccggcactttgtacaggaccccctcgtccagggtcttatcgggcagggcacttgtagagctgctgggctaagtgtctgtctccgccagatacggacacgtgagcagcctgtgtgcggtgaggccttcacagcccctctcggcacgcctggaacaggacctcattgacaagtgtgccttaacttagccctgctgtgtctgagcgttggggccagtgtccagcgtggggtggtggacctgtctggacccagaacgtctttgcttggcttccctcctccctgaccctctctaatctctgggtttctctggtcatctgtccctgctgacagcttccttccccacagcctgtccccacctctccccacaccttgtcctaatttgggtctgtggtgtagtgagtccctggtctgactcagtggaactttgcccattgtctggaagacaatgagagaggaagtgagccagccgtggtctttcctccccacttctggcttcagggctgggttggggggtgggcagggccgaacagctgcagtgggattgggcagcagagattttcctggctgcaatccggcaaaggggctgtctcttgggatcctttggcttttcctggaaacactgtcctggtcctttgcccgggttttagggaaggatgagtagtgtcgggatggtggaggcaggagaagagagcagcgtggtttgctgagatttaggggtcttggatctgccactggctcctgataggtccctgggcggtcagtggcctccagatttttgttgtgtcttcagtgaaatgataccggtccccactgcccagctcacctcccggggctgcaggaggcaccggagataatggctgtagagggtcttgtaacctgaacattgcttgcaaacataaggaattctagttactgggaggaagcacagggcagaggccagaagaggccctcagatttgaggcaccctagcccagacggataaggatccaccagctctgggggcgtgagacccaagctggcaagaatctgcaatctggagccaaggctgtgggtgcctcagtggaggccgagtcagaccgacgtggccagctttgaccctcatggcctcctttcttctgtcccttgaccttcggctcctccctgtccaccctggcctccgagtctcctccacttttccttccgtctcagccctcagctctaggcgcccctccagagacccagctgtcttcccaggccccttcccagcaaggactagcttcatctgaaccacacacacactcacggttcaacctcagactaaaattatcctctcccctgggcaggatgaagggcagccgactccctggtgagggtggagacagacagcaccaaatggtcaggccagagaaggggccagggctaaaaatggacaaggaggtgtctgtggagggcccctgcggctccatcgatgcgggttagggctggagtctgcggggtggcgggtgcaggaagggagggtggggcaggactgggaggagactccgaccttggctgggcggtgccctccctctccacacagctgggtgtggggccgctcagccacaggctgcatgcctgtcggtctctttctggcaccctccttgaggccagcatcaggctttgggttcatgtttgggggtgtgccctggacggagtgtgggcctccagccaggctgccccactgacagtttggcaaaaccaggacctatctggaagccgaagccggggatcaccaggtggacccagcggggtgggactgagtgactgaccctggggtgttggattccatctggcccccggctgccttcaaacaggtgttcagtggaaagcgactggaggctgagttcccacctcatcactctcagagcaccttccggaagacctcgcccgcccctgggggcccagcaggggaggggcccctgcagagcctcacctgcctcattggggagaaggacctgcgcctcctggagaagctgggtgatggttcctttggcgtggtgcgcaggggcgagtgggacgcgccctcagggaagacggtgagctctctgtgtcctgccagcgcagcagaggcatgggacccggggctggtagtggctcttctgcccccaaccagggtgtggatgggactggggatgcgtcacagtgtggctcatcccagagtccgtgctcaggatttttggggttttatttatttatttatttttgagatggagtctcgctctgtcgcccaggctggagtgcagtaggcacgatctcggcttcctgcaacctccactttccgggttcaagcaatcctcctgcctcagcctcctgagtagctgggattacaggcatgcaccaccacactcagttaatttttgtatttttagtagagacggggtttcaccatgttggccaggctggtctcgaactcctgacctcagatgatctgcccactttagcctcccaaagtgcttggattacaggtgtgagccaccacgtccagcccatgctcaggtttaactaagcacatttattatttcaactataaaaataatttattataaaagtttggaaagtatttgaaaaacaagaaaaaaaaaatcgcctgtaatcccaccactcagaggaagccgagcctcttcctcccactttaggtattttgttggatttagttaagatacaaattctggatacagcttttaaaatcttgttctttcttctcggcgttgcatttaacattttcccctcagggataacgtgtcaccacagcatacagttctggtgtgactgtttcctgtgcagcagccgtgtccttactgctcagatcacgtgcggtgcattcccagcacctcagagggctcctcattctccgtccactcagtgcgtccttctcccggggaagccgctgtcactcagtgcatccttctcccggggaagccgctgtgcagacttccagctccacagctttgtttttggcattacatttacagcattttccttctacagcaaaacaccttttaatattccattttatgaccagcctgagcaatatggagaaaccccatctctactaaaaatacaaaattagccaggcgtggtggcacctgcctgtaatcccagctactcaggaggctgaggcaggagaatcacttgaacccgggaggcagaggttgcagtgagctgagatcacgtcactgcattccagcctgggcgacaagagcgagactgtctcaaaaaaaaaaattccattttataacatttgaatattctctcatcatactggttatctcttactttttggttggtatttaagcccggcattcccccaggaaggggaggtgtggccgacgatggctcctgagggccagccgtctgcccttctccagccaggcctcacgcagagcacgtaagcccaggcactggtgacatgcttacccacccagatgaggagctcacaggcagggatcgttgagccgagttggagggtggagcaggttggctccgcgtgtctgggacctggcaagtcctgagtccttgcaaatcccgctctgggcaggtgagtgtggctgtgaagtgcctgaagcccgatgtcctgagccagccagaagccatggacgacttcatccgggaggtcaatgccatgcactcgctcgaccaccgaaacctcatccgcctctacggggtggtgctcacgccgcccatgaagatggtgagtactgcgggcgggagggggcgggcagggagagggctccggtcccatatgtgtggttcggttcctctctccatcctaaggtcagaggcgccctagatcctactttggtcccccaacctgatggagtaaaggggtccacaggggcccagcctggtacgggctgtgtctgctgcggtccagtccgggtctgtctctggattttgctggtgctcagtgtcaagagagttactcccatgggaggggctggccactgagtttaatttggggaatttatgttttatttatctatttattttgagatggagtctcactttgtcgcccaggctggagtgcaatggcatgatctaggctcactgcaacctcggcctcctgggttcacgcgatattcctgcctcaggcttccaagtagctgggattacagccgtgcgctaccatgcctggctaatttttgtatttttagtagagacggggtttcaccatgttggccaggctggtctcaaactcctgacctcaaatgatccacccacctcggcctcccaaagtgctgggattacaggcgtgagccaccacgtccagctgagttttggaatttctagccactgcctctttgggctccttctctctaggcatcagtttcccaaattgcctcgagggagaggcctgagaaactgcaggactcctagaggtccccagacagcaggccaggaaggtgcgtgcagcctggctctggaaagccttcaggaaggggactgggggcccagcgtgggctgctgagaaggggcagggtcctccagctcattcctcctgcctcctccgtggcctcaggtgacagagctggcacctctgggatcgttgttggaccggctacgtaagcaccagggccacttcctcctggggactctgagccgctacgctgtgcaggtggctgagggcatgggctacctggagtccaagcgctttattcaccgtgacctggctgcccgcaatctgctgttggctacccgcgacctggtcaagatcggggactttgggctgatgcgagcactacctcagaatgacgaccattacgtcatgcaggaacatcgcaaggtgcccttcgcctggtgaggggcaggtgctgccagctcacagagtccctgcagacccaggcctcaaagcttctggggctttctggacccaccacagcccctggttttgcttgggcctgcccttgtctgttctaagcctggggtgccctcctttgcacccattcgctcaccatccatctaggaattcttgagggcccacgtgccagggtctgggtgctggaaatcacagggatacatgctgtgggactctccaaggggctttgctgggtggggtgatacggggatagatgctgtgtcctctccaaggggcattgttgggggtcgtgtttcagggatagatcctgtgtcctctccaaggggcattgctggcgggggggtgttatagggataaatgctgtgtcctctccaaagggcgttgctggggggggggtgttacaaggatagatgctgtgtcctcttcaaggggcatcgctgggggggtgttacagggatagatgctgtgtcctcttcaaggggcattgctggggggggtgttacagggatagatgccgtgtcctctccaaggggcgttgctggggggggtgttagagggacagatcctgtgtcctctccaaggggcatcgctgggggcgggtgttacagggatagatgctgtgtcctctccaaggggcactgctgggggggtgttacagggatagatgctgtgtcctctccaaggggcactgctgggggggtgttagagggacagatcctgtgtcctcttcaaggggcattgctggcgggtggtgttagagggatagacactgtgtcctctccaaggggcatcgctgggggcgggtgttacagggatagacgctgtgtcctctccaaggggcattgctgggggggtgttacagggatagatgctgtgtcctctccaaggggcactgctgggggggtgttacagggatagatgctgtgtcctctccaaggggcactgctgggggggtgttagagggacagatcctgtgtcctcttcaaggggcattgctggcgggtggtgttagagggatagacactgtgtcctctccaaggggcatcgctgggggcgggtgttacagggatagacgctgtgtcctctccaaggggcattgctgggggggtgttacagggatagatgctgtgtcctctccaaggggcattgctggggggcgggtgttacagggttagatgctgtgtcctctccaaggggcattgctggggggggtgttacagggatagatgctgtgtcctctccaaggggcattgctggggggggtgttacagggatagatgctgtgtcctctccaaggggcattgctgggggggtgttacagggatagatgctgtgtcctctccgagggtcattgctgagttaggtgatacagggatatatgctgtgtcctcttcaaggggcattgctgggggggtgttacagggatagatgctgtgtcctctccgaggggcattgctggggggcgggtgttacagggttagatgctgtgtcctctccaaggggcattgctgggggggggggtgttacagggatagatgctgtgtcctctccgagggtcactgctgagttaggtgatacagggatatatgctgtgtcctcttcaaggggcattgctgggggggtgttacagggatagatgctgtgtcctctccaaggggcatttctgtggggaggtattcaaaggtttcctaaaacatcagggaagttcgccagggaaagactcgttggtaagcatgttctagggagagctagtggtagacaggcccaggccacagcaggccttgtagatgggccagggctgcttacctgtgcactaggggtggtacttggccctgccctggcccctgtgtgggcttatcctctgctgagaccattgtggttctctggtgccagaggcacccagaggtctgtgatctgcctgctttgaggcgggaagggttgttccagttctgctttcccaagcggtggctgtgggcaacccttatgatccaggacgcatggtcatcttaacgagcagctggctttacacccagggcgagcagaggtcttaaattatgcccgttgtcctggagtaatttagagcagcctcttttgtattcaggcatcctggtttgcatggtaaggtatgaatatagttgcctttaaacagcacgatgaagtgggcgggttattgttctcatttcaccaaggaggataatgaaccttagcgatctcgagtgactttcccggccccatcccctttgaggggcagggctcgctctgcttccctgtctgggcaccaccctcctctctgcacctcagtccacgccgggatgtcctttctgacctcactgcagtggcacttccccctcaaccgggggtgcccagaacgaatgggtgtatttgggtgaagccagtatgactgtttctacccattttggttcttccccaggccctacccgaatttcccacccactgcttcctgccaaaggacccaaatccgaggatcccgccccaaatctgggaattgtcattctcccaccacagtcagaaaacagcctgtgatcttctctccctgccccatcccagagcctctgacctccttcctttccatgcttctctggctgggaaacttcctttcctcttcccccaccaggctgcaagtgaataagaggcctgggcttagacgatttccccaagtccctgcatcgtgtcgtcaaggggtcctgcccgcttcacacggcgcccctgagacccactgttgaacctggcacagggggtcacaacaagtgtttgctgcatgagtgttttaagtccctggggcggacgcaggtagggtgtttgagagggcttctctttgacccctgcctctgccaggtgtgcccccgagagcctgaagacacgcaccttctcccatgccagcgacacctggatgttcggggtgacactgtgggaaatgttcacctacggccaggagccctggatcggcctcaacggcagtcaggtgagggctgggagacgggcccccatagggctggtggggtgaattccattccctgcttgcagcctggccctgctggaactgcctctcaccaatggactccctcctcccacgccccgtgcctccccccacttcccgtgcctcccaccacgccccgtgtctcctctcacgccccgtatctgtatggcctcagggagagcccagcaaagagacggggagggaaaagctggggcctgccctccttctctagcccttgccacatccacttgttccgaggctccagacctgggaagaagggactggggctctggagagggcccctcccaggcaggcagatcccttctttggaggccaggcatggcagcagccgctgcagctgtggatgggctggagggaaggcgggaagtgaagggctgggcgctctgtttgtcgtcaaactctgcacctcctcaccttcagatcctgcataagatcgacaaggagggggagcggctgccccggcccgaggactgtccccaggacatctacaacgtcatggtccagtgctgggctcacaagccagaggacagacccacgtttgtggccctgcgggacttcctgctggaggtgagggacaggtcagcccaggagagctggggtgttcaagctgaggggctacccaggcgtcagtcccagagttggccacgaccttcctcttcctccaggcccagcccacagacatgcgggcccttcaggactttgaggaaccggacaagctgcacatccagatgaatgatgtcatcaccgtcatcgagggaaggtagggagtgcagggctgggccccgccctgggatcgcttgaagggcacaggtcggagggacctgtggacagatctgtttggcctccaagattcccttggccacatacaggctggcggttgggcctgaaccctgcagtgtgaggggaggacaggcctgcctccgtcttcctagtgcctttccctgcccagcttccctccaccaccctttcccactgggctgcagccctggctgtgtggttgggccaggctgcctttatggaggggtagggagtggcctggcctcggtggcagcagagttctggactcccgtgcttcctcctctgctcctccccgcttctctccctgcttcttcctggcacagggactcagccatccacctgggtgcgtttcagtagctgaagcagcccagcctgccctcttgcagctttccatccttcctgctgagcccaccaccccctcccaggcctgcctccagcctctggtcctctcttcccatctccccttgggaggaccctctctatacctaaccctcctcccacagcctctcgggagtccctgtcttccacctgagcccccgcagttctagcgcctgccctgaggccccaccactgctggccctgccttgtgctggctgatccccagggtgtctgagcaactggctggggcagggcaggtttcaggtacctttgaggcaggggcagtattgaggaccaggaagaagagtgaagtggaggaaatcccctgtgctcgcagctcctgactcaggccaggcaaggatggggctagggctgcttcccagggagcctcttccacctgcactgcagcttttggagtctgcggccttcggtgcaatcctgtgcctcttgggggtgggtggaggagacctggggggctgtgtggagtgtgacctgcaccgctgtggccccgacaccccgagccttcccaggcccggctccctcacccttgggcccagggtctgggaataggaatgacatactgagactgcagggcctgtggttaggggtgttatgctggggaagaatgcagaaggttctagaaagagaggcctggggacaggaggcaaacagtctgcaggtttggagctgaggggccagggatgggattgcaagcgtggcgctccggggagcattctggaaataggaagattaagggtgggggggtcccctggaagtacctggcagggcctccagcccgaagtccagcctcatgaccgtgtccacctccacgagctggaaagccgtgggcctggcccctcttgtgctgctgccggagccccagatctttaccacctgcttcccttgctctcagcaggagcctgtgtgcctgccagtgtccccaggggtgactcagagtggcctgtgtttggggcgtgtgtctctggagctggtgttttaggtcaccgcccgggcaaggcgggcagtgggaggggccgggagcggctgctcctgggagggttgtgggtgtgccccgccccgcccttccgtcgaaggcccccgttggccccagccgctggttccctgtggctgctgctggtggggctctgggggctccttccccctgggccaccagccctggcttggaaccacagcacctgccctccgtgcctggagctgctcaggaggtgggaggtgaggggcaggaggccacaacagccggtgaggcttgggagcgggcctgggtgtcggtggtggcagagcttgactctgcccccttgtttcttcagtccctgaatatctccatgtttgtttggctgcctccgtctccatgtctccaggcggatggctctgtgtgagtctttgggcctgggtgtgcatctgtgggtctgtgtttggagttccctcctagcctggccttctcttcgccgtggcttcccacttgcgaagctgtgtccagtatttgtttcctggtgcggagtctgggaggccacctgccgcagctctgactgagtctaggctcagtccttctcagggtaccaggctgtgggcagaggggagacacctagatgtttcgtgctgtgtctagatttggagacacaaatgatgactggtctttcccaggggctcgtttggaggaaggggtggctggcagcacttttgttccgcatacagagcgggtgttggaatccattgcgggtccttggcctggtctggccctggagcctcggcttcctgtggtgggtgggagccaggcatccgggttatccctccaggcctgggcgcctgggacccctagggagaagagcgggcgggcgttttgaacagaatgtccggcattagttgagccatttctggactaccttcggcccggacgggaacgtggtgctgagatttccagagctggggcagccttaggcagttctcagcaccggcctctgttttccatcttgtctaccccagagatgttgaccagaggcccgggggcagcaggaggtagaaggttcatgcggaggtgttgggcccttttcctgctcccccaggaagtcctcatccgcccctgcttcagtcacggccgggtagcagccctggccctcccatggccacggggactccggcctgttcatggcgggagagagagggcgcggacagggcgggcctggaaggaagggctggcctcagtcccctctggactgctggtgcctcggccacactgagcctcacacgggtgcgtgtgggctgcgagaagtgacacggtcctcttggaagtcccactggagccttgggatgaagctgccttggagtgtgcgtgggcgccatcccgagggggagcttcctgtgcctccgagcgtgcgtgggcgccatcccgagggggagcttcttgtgcctcggagcgtgcgtgggcgccatcccgagggggagtttcttgtgcctcggagcgtgcgtgggcgccatcccgagggggagtttcttgtgcctcggagcgtgcgtgggcgccatcccgaggggagcttcgtgtgcctcggagcgtgcgtgggcgccatcccgaggggagcttcctgtgcctcggagcgtgcgtgggcgccatcccgagggggagtttcttgtgcctcggagcgtgcgtgggcgccatcccgaggggagcttcttgtgcctcggagtgtgcgtgggcgccatcccgaggggagcttcttgtgcctcggagtgtgcgtgggcgccatcccgagggggagcttcctgtgcctccgagcgtgcgtgggcgccatcccgagggggagtttcttgtgcctcggagcgtgcgtgggcgccatcccgaggggagcttcttgtgcctcggagtgtgcgtgggcgccatcccgaggggagcttcttgtgcctcggagcgtgcgtgggcgccatcccgagggggagtttcttgtgcctcggagcgtgcgtgggcgccatcccgaggggagcttcttgtgcctcggagtgtgcgtgggcgccatcccgaggggagcttcctgtgcctcggagcgtgcgtgggcgccatcccgaggggagcttcctgtgcctcggagcgtgcgtgggcgccatcccgagggagagtttcttgtgcctcggagcgtgcgtgggcgccatcccgaggggagcttcttgtgcctcggagtgtgcgtgggcgccatcccgaggggagcttcttgtgcctcggagtgtgcgtgggcgccatcccgagggggagcttcttgtgcctcggagcgtgcgtgggcgccatcccgagggggagtttcttgtgcctcggagtgtgcgtgggcgccatcccgaggggagcttcttgcacacgtcctccgcactcttactctccttcccccaggagcaagcatgttttctcgagtggtgtcaggactcccagcagccatgggggctcttgcctcggccatacctgcactaagggaggtgggcttgatgtctcctttccctctcagaagtgggtcccaaaggaggcttctgtgcctggagctgggcagtgttggcggaagggagaggccagacggagtgacctgccttgggcacgagtcacgctgctctgagcaaggtctcggcctcagcggcattctcacccagttactgagcgcctctgaagaggtgtggagagcagagtccggcgtctggcccgcggcagccaccggggagcccgtgggtgtagcgggagagccgcagcccagccggtgccggggttcctcctctacgggccgccgtgggaggctgtgtgcgtgctggggagccggggctctgctccttcgagtggccctgctatttttcagatgggactcgtctcgtctcggggtactgtcctctctccttccttccctccctgcaggcagggtgggaatcacagggtggctgtgtgtggtggggccaggccagtggccctgtgtatgaggaggctgggcagggggagcacagccccgtctccccgcgccccgcgccccccgcctccccgccgaccgtggtgctctcgggtttgactttggtctctgggatgggctgttccggagtcaccccgctccagccaggcctcgtcaccttacaaggctgtgggtctgggtgcccaggcgtcgccacctcctccgtcctctctccccggcctggctgggtttcagaggagcccttcttcacgctttggccctgggacaggagaagtgggggttggtggggagggcgtgcagtgtggtgccacacgtgtccaccctagcagctctgggctgtcaccgcccccgcgtgcccagactctgcccacggggctgtcaccgcccccgcctgcccagacactgcccacggggctctcaccgcccccgcctgcccagacactgcccacggggctctcaccgcccccgcctgcccagactctgctcacggcatcacgtatgacaagtccagcagcagacgcgggagcctcacaacctgtgagagccttcgggagtcaggagtgtcttgcgggagccctgtgcttcctggcctgcctgcccctgcccctgcccctgcccctgcccaggccccggcttaggccacatcagcagaggtttcgtgtctgaggtcagagggggactggcagccctactgtctggtcactgtgggagagctgagttcccttttggacacaggtagagcccctcctgaggagacggggaggctcccgcaggccttccgggaggtggtggaaagctccggaagcaggtgaagcggtggagggagggactgagttgcccgagtgctcctagactctcccgcgtctgcattcgggaggcaggttgtagctggaggcctggcccccagcctagtgcaaggccctaggtgtcccccggcacccccgcacctctcagaactcctggaacccagccgaggagtgaaatcaagtggccagaagaggactggggccccggccttgccagggaactgaggggtgaggaggaggtgtgggcggggcgctggccccacagacctgaaagctggcgttgggtcccaggtctgctgggatctttctggtaaccgtggacaggtcatgttgcctgctgcagcagcttccagcgtgcctccttatttgcaaaccatagggaaagctgcctgacccacctagagagttgtgggtaaggccgtgtgcaaacaggcctgtacggggcatggtgggtcacgggggctgttggggaggagggccggtggcacacagcctggtcctgaggcctgagctccatcccccttctgccacagtggccagggtgtgaggagggtcccagtgccggggctgccccgccacgcctggcgttcaccgtgccatctctgtcgcgcagggccgagaactactggtggcgtggccagaacacacggacgctgtgtgtggggcccttccctcgcaacgtggtgacctccgtggccggcctgtcggcccaggacatcagccagcccctgcagaacagcttcatccacacagggcatggcgacagtgacccccgccactgctggggcttcccggacaggattgacgagtgagtactgggcggggatggatgctgacctggccccgctcgggactccagggccctcagcacggcacgcgtgggcggaatctgctcttcaccctttcgcccgggcttcagcccccgacccgccactctcccctcctcaccctggccttactctcgggaagctgtggaaccctaggaagcccagcctggtgggggttctccaggggaatgttctccaggggagtgttctccaggggagggttctccaggggagggttctccaggggaatgttctccaggggagggttctccaggggagggttctccaggggagggttctccaggggaatgttctccaggggagggttctccaggggagggttctccggggagcgttctccaggggaatgctgtccctgccattttcaagctttggggggccgatctcctaactctgagacacttcatctgtgaaacaggttcacccccccaataaggggaaggctgtaaatgcactctgaattagcacttgctgctcagatgcaggggtcctgagagaagctttcccactcactgtagatgaaagtagggtcaggagcttctgaggatggactcctgtttggtggaaaggtccccggagccacagctgtaacccctcttggtactcgggccttaggaaaatgaacttgggaggaacccggtgggagctgctgaggaggagagcttctcccatgacccccctgtggccccctgtgaccctgtgaccctgtgacccctgcacacgagcagtggttttccttctcctgctggtggtgccagagtcctggagacgtgaacctgctggctcaggccctggggatgtatgcaggtccacatgggagtgagcctgctttccagaaccagagtgggactggggaccttggggactgcagagggaacgttaggtggcagctccgcctccccaccacacagtactctacggagctcactccatacctgggagaggccctgtctcctatgtaagaggataaggccaccgaggggcatctgggaaggacacgcagaatcagtcacttccgggatgccaccccccaccccccgaagcttcttgcgccaggcctccaagcctctctgctggccgcagggggattccaggcccctggcctctgcagcccttctcctgctgacttctgatactctggtctgccctgagaggcgtggaaagcaggggccttcacccaccgggccccacacaccagaaccccacacagcgggcccccacacaccagaacccacacagcgggcccccacacaccagaaccccacacagcgagtccccccacaccagaacccacacagcgggcccccacacaccagaacccacacagcgggcccacacacactggaaccccaagctcacagggctcagcccatgtgttttgcctaaaaagaacccagcaagggcctgagagttggggtgaaagactgcagacacctccaggagaggctggtgccctctgccccactcctggcatgctgtggccagcccagccccattcctccaggctttaatcagccccagtgactaagtctcagatactgacagttggtgcagggacggagggtggatccggagcaggacaggtggcccagcctctcccgcacctcctggccatgtggcagaagggtgcctcctgcccaccctggctgggcaccatagctgggatgccccgttcttaggccctccatcgtggcctgcgggacaggagtgtctgccctctggccgctgcctggtgtgggctgggggcctggggggttgtggaggaccacctctgcccttgtagggtgtagttggagtccctgaggtcctaggctttccatcctggggtcaggtgtcctttctctgccttctctccaggacaccccccagctgagacgtgcggtcaggttctgtggactgggaggcgggaggcctgtgcttcagacccaagactacacccggtttcctccaggacgaaggggctctgatgagattctgccacccctccacacgcttcccctgctctcttgacccagctctctcccccacagactgtatctgggaaaccccatggacccccccgacctcctgagcgtggaactgagcacctcccggcccccccagcatctaggaggggtgaaaagtaagagcccctctgctccctggtgtccctaactcatcggctactcaggaaggggcactgtcttcacaggccaccctaaggctgctgttctgtttttggggacagtggggtcagggcagcaggcgggacagctgtgtccctggctccggctgggcgtggggtggaagacaggcagctgtatccgccgaggtgggcctcctcgggctgggtctgcagcaggcccgtccgccccggcgtccctcctccctccttccacggccgagctcagatcctggctttcctcacttccccctaatcctgctctcctgtcccaagccaaaaccaccccacggctccggctctgcctggggcctcctccatctcccggtcctctgcctatcatactggaccgccgtgttcctcatcctgccgcctgcggcctcccgtttgctgggggcttgtacattcactcgcccccattcacttctctcccttcgtctctctacactctgccctctcgtccggccgtctccctcctttgtcctctgtcctgctccgtctctctccccctgtccgcatggcctttcttgcaggggagcctccacctcgcccacctcagcctgccttcttcactcagagtaagtggggctgcttccgatgccttggcccccgcccccgccccctctctctcactcctctcctggaaggtacagagcctgggcggctgggccggaggggaggtgggtgggtgtgtgctgtgagcttccgcggctgccctggcctagcatgcctgccccccctcgagcccgccccccggagcctgggcttctgctcacgagtgtggccctggcttccgcctcggcctcactccctcccagacctgtctgagcttctggagcacgagtgtggccctggcttctgccttggcctcgctgcctcccagacctgcaggcgctgtctgggctttgtggccgttggtcaggagtactgtcctctccaaggatagtccttatagcccctgatggcaggaggcggctccgtgcctgcactaatggtgtgccgtgacaggggcggggatgagggctcactaactcgccagggcgcaggagcagggccgccggggtcttgtgctggtggaggcagcgtcaggcaggagccagtgttgcttgctgcagcttagacggagcgaggcggggctcaccggcccacatggggctgccgggcagagcaggttccgccctcctgatggagtggtcggaggtgcgctgagaacctggccgccggtggctgacctcagacctcggggggagttgggagtggagggttgctgggggacacttggctttctctcccacgtgccacctcccctcgtgtcccagaccctgcctgactgccttcctgttgggctctccctttccatcacagaaccaacctatgaccctgtgagcgaggaccaagaccccttgtccagcgacttcaagaggctgggcctgcggaagccaggcctgccccgagggctgtggctggcgaagccctcggcgcgggtgccgggcaccaaggccagccgaggcagcggggctgaggtcacgctcatcgacttcggtgaggagcccgtggtcccggccctacggccctgcgcgccctccctggcgcagctggccatggacgcctgctccctgctggacgagaccccgcctcagagccccacgcgggcactgccccggcccctgcaccccacgcctgtggtggactgggacgcacgcccgctgccccccccgcccgcctatgacgacgtggcccaggatgaggatgactttgagatctgctccatcaacagcaccctcgtgggcgcgggggtccctgccgggcccagccagggccagaccaactacgcctttgtgcctgagcaggcgcggccgccc

SEQ ID NO: 14569 - DNA, 3549 bp, Homo sapiens
ggaagccggggagtagggctggactgtgaccactgccctggagagaagacagaaacaggacagaggatcccggctgcagccagcgtgaggaaagctctgctccctgccagaccggccagctgtggaaacccagcggggcttgcagcagagcggaggggcccaccccgttcttcctcatttcccacccctggtgtgggatttggggggctcctgggcagagtgcgaagctccggagccgaggccactggatccccagtgactgctcgggggggtcccgctgcgtggagatgccggcagcacgtcggttccctggcctggagctctccttccctctcctggccagactgcggcgacgcctgtacacaaggctgggaggcggcagaatgcagccagaggagggcacaggctggctgctggagctgctgtccgaggtgcagctgcaacagtacttcctgcggctccgagatgacctcaacgtcacccgcctgtcccactttgagtacgtcaagaatgaggacctggagaagatcggcatgggtcggcctggccagcggcggctgtgggaggctgtgaagaggaggaaggccttgtgcaaacgcaagtcgtggatgagtaaggtgttcagtggaaagcgactggaggctgagttcccacctcatcactctcagagcaccttccggaagacctcgcccgcccctgggggcccagcaggggaggggcccctgcagagcctcacctgcctcattggggagaaggacctgcgcctcctggagaagctgggtgatggttcctttggcgtggtgcgcaggggcgagtgggacgcgccctcagggaagacggtgagtgtggctgtgaagtgcctgaagcccgatgtcctgagccagccagaagccatggacgacttcatccgggaggtcaatgccatgcactcgctcgaccaccgaaacctcatccgcctctacggggtggtgctcacgccgcccatgaagatggtgtgcccccgagagcctgaagacacgcaccttctcccatgccagcgacacctggatgttcggggtgacactgtgggaaatgttcacctacggccaggagccctggatcggcctcaacggcagtcagatcctgcataagatcgacaaggagggggagcggctgccccggcccgaggactgtccccaggacatctacaacgtcatggtccagtgctgggctcacaagccagaggacagacccacgtttgtggccctgcgggacttcctgctggaggcccagcccacagacatgcgggcccttcaggactttgaggaaccggacaagctgcacatccagatgaatgatgtcatcaccgtcatcgagggaagggccgagaactactggtggcgtggccagaacacacggacgctgtgtgtggggcccttccctcgcaacgtggtgacctccgtggccggcctgtcggcccaggacatcagccagcccctgcagaacagcttcatccacacagggcatggcgacagtgacccccgccactgctggggcttcccggacaggattgacgaactgtatctgggaaaccccatggacccccccgacctcctgagcgtggaactgagcacctcccggcccccccagcatctaggaggggtgaaaagtaagagcccctctgctccctggtgtccctaactcatcggctactcaggaaggggcactgtcttcacaggccaccctaaggctgctgttctgtttttggggacagtggggtcagggcagcaggcgggacagctgtgtccctggctccggctgggcgtggggtggaagacaggcagctgtatccgccgaggtgggcctcctcgggctgggtctgcagcaggcccgtccgccccggcgtccctcctccctccttccacggccgagctcagatcctggctttcctcacttccccctaatcctgctctcctgtcccaagccaaaaccaccccacggctccggctctgcctggggcctcctccatctcccggtcctctgcctatcatactggaccgccgtgttcctcatcctgccgcctgcggcctcccgtttgctgggggcttgtacattcactcgcccccattcacttctctcccttcgtctctctacactctgccctctcgtccggccgtctccctcctttgtcctctgtcctgctccgtctctctccccctgtccgcatggcctttcttgcaggggagcctccacctcgcccacctcagcctgccttcttcactcagagtaagtggggctgcttccgatgccttggcccccgcccccgccccctctctctcactcctctcctggaaggtacagagcctgggcggctgggccggaggggaggtgggtgggtgtgtgctgtgagcttccgcggctgccctggcctagcatgcctgccccccctcgagcccgccccccggagcctgggcttctgctcacgagtgtggccctggcttccgcctcggcctcactccctcccagacctgtctgagcttctggagcacgagtgtggccctggcttctgccttggcctcgctgcctcccagacctgcaggcgctgtctgggctttgtggccgttggtcaggagtactgtcctctccaaggatagtccttatagcccctgatggcaggaggcggctccgtgcctgcactaatggtgtgccgtgacaggggcggggatgagggctcactaactcgccagggcgcaggagcagggccgccggggtcttgtgctggtggaggcagcgtcaggcaggagccagtgttgcttgctgcagcttagacggagcgaggcggggctcaccggcccacatggggctgccgggcagagcaggttccgccctcctgatggagtggtcggaggtgcgctgagaacctggccgccggtggctgacctcagacctcggggggagttgggagtggagggttgctgggggacacttggctttctctcccacgtgccacctcccctcgtgtcccagaccctgcctgactgccttcctgttgggctctccctttccatcacagaaccaacctatgaccctgtgagcgaggaccaagaccccttgtccagcgacttcaagaggctgggcctgcggaagccaggcctgccccgagggctgtggctggcgaagccctcggcgcgggtgccgggcaccaaggccagccgaggcagcggggctgaggtcacgctcatcgacttcggtgaggagcccgtggtcccggccctacggccctgcgcgccctccctggcgcagctggccatggacgcctgctccctgctggacgagaccccgcctcagagccccacgcgggcactgccccggcccctgcaccccacgcctgtggtggactgggacgcacgcccgctgccccccccgcccgcctatgacgacgtggcccaggatgaggatgactttgagatctgctccatcaacagcaccctcgtgggcgcgggggtccctgccgggcccagccagggccagaccaactacgcctttgtgcctgagcaggcgcggccgccc

SEQ ID NO: 14570 - DNA, 4238 bp, Homo sapiens
gccccaggagggagagggacccggcgaggggctcaggacccggaggcgccggcggaggaggaggtggtgactggcaggcccgggccccacggtacctccggggctgaaggggacgcaggatgtaggggcatggggagtcgggcgcagaagagtgcggggaaccgctgagctctgggagccactgcctgagggcaggccgcggccggcgggaacctcttctgccgtctcagcctgggcgtcgctgaagctgtgtctgcggggaggcagcggaaggcggcagaggctgggaggcggcagaatgcagccagaggagggcacaggctggctgctggagctgctgtccgaggtgcagctgcaacagtacttcctgcggctccgagatgacctcaacgtcacccgcctgtcccactttgagtacgtcaagaatgaggacctggagaagatcggcatgggtcggcctggccagcggcggctgtgggaggctgtgaagaggaggaaggccttgtgcaaacgcaagtcgtggatgagtaaggtgttcagtggaaagcgactggaggctgagttcccacctcatcactctcagagcaccttccggaagacctcgcccgcccctgggggcccagcaggggaggggcccctgcagagcctcacctgcctcattggggagaaggacctgcgcctcctggagaagctgggtgatggttcctttggcgtggtgcgcaggggcgagtgggacgcgccctcagggaagacggtgagtgtggctgtgaagtgcctgaagcccgatgtcctgagccagccagaagccatggacgacttcatccgggaggtcaatgccatgcactcgctcgaccaccgaaacctcatccgcctctacggggtggtgctcacgccgcccatgaagatggtgacagagctggcacctctgggatcgttgttggaccggctacgtaagcaccagggccacttcctcctggggactctgagccgctacgctgtgcaggtggctgagggcatgggctacctggagtccaagcgctttattcaccgtgacctggctgcccgcaatctgctgttggctacccgcgacctggtcaagatcggggactttgggctgatgcgagcactacctcagaatgacgaccattacgtcatgcaggaacatcgcaaggtgcccttcgcctggtgtgcccccgagagcctgaagacacgcaccttctcccatgccagcgacacctggatgttcggggtgacactgtgggaaatgttcacctacggccaggagccctggatcggcctcaacggcagtcagatcctgcataagatcgacaaggagggggagcggctgccccggcccgaggactgtccccaggacatctacaacgtcatggtccagtgctgggctcacaagccagaggacagacccacgtttgtggccctgcgggacttcctgctggaggcccagcccacagacatgcgggcccttcaggactttgaggaaccggacaagctgcacatccagatgaatgatgtcatcaccgtcatcgagggaagggccgagaactactggtggcgtggccagaacacacggacgctgtgtgtggggcccttccctcgcaacgtggtgacctccgtggccggcctgtcggcccaggacatcagccagcccctgcagaacagcttcatccacacagggcatggcgacagtgacccccgccactgctggggcttcccggacaggattgacgaactgtatctgggaaaccccatggacccccccgacctcctgagcgtggaactgagcacctcccggcccccccagcatctaggaggggtgaaaaaaccaacctatgaccctgtgagcgaggaccaagaccccttgtccagcgacttcaagaggctgggcctgcggaagccaggcctgccccgagggctgtggctggcgaagccctcggcgcgggtgccgggcaccaaggccagccgaggcagcggggctgaggtcacgctcatcgacttcggtgaggagcccgtggtcccggccctacggccctgcgcgccctccctggcgcagctggccatggacgcctgctccctgctggacgagaccccgcctcagagccccacgcgggcactgccccggcccctgcaccccacgcctgtggtggactgggacgcacgcccgctgccccccccgcccgcctatgacgacgtggcccaggatgaggatgactttgagatctgctccatcaacagcaccctcgtgggcgcgggggtccctgccgggcccagccagggccagaccaactacgcctttgtgcctgagcaggcgcggccgccccctcccctggaggacaacctgttcctcccgccccagggtgggggcaagccgcccagctccgcacagaccgcagagatcttccaggcgctacagcaggagtgcatgaggcaactgcaggctccggccggctccccggccccctctcccagcccggggggtgacgacaagccccaggtgcctcctcgggtacccatcccccctcggcccacgcgcccacacgtccagctgtctccagcccccccgggcgaggaggagaccagccagtggcctggacctgcttcccctccccgggtgcctccgcgggagcccctgtcccctcaaggctcgaggacacccagccccctggtaccacctggcagctccccgctgccaccccggctctcaagctcacctgggaagaccatgcccaccacccagagctttgcctcagaccccaagtacgccaccccccaggtgatccaggcccctggcccgcgggctggtccctgcatcctgcccatcgtccgggatggcaagaaggtcagcagcacccactattacttgctgcccgagcgaccatcctacctggagcgctaccagcgcttcctgcgtgaggcccagagccccgaggagcctacccccctgcctgtgcctctgctgctgcccccacccagcaccccagcccccgccgcccccacggccaccgtgcggccgatgccccaggctgccttggaccccaaggccaacttctccaccaacaacagcaacccaggggcccggccaccacccccgagggccactgctcggctgccacagaggggctgccctggcgatgggccagaggcgggccggccagcagacaagatccagatgctgcaggccatggtgcatggggtgaccacagaggagtgccaggcggccctgcagtgccacggctggagcgtgcagagggctgcccagtatctgaaggtggagcagctcttcgggctgggtctgcggcccagaggggagtgccacaaagtgctggagatgttcgactggaacctggagcaggccggctgccaccttctgggctcctggggccctgcccaccacaagcgctgagatgcgtctggagagccagagggcctgcctgaaggaatcacctgagcctgtccgtccaccaggagtggggagatgcccccatccagtcctggaggacccgctgctcctgctgctcccggggatggagcaaggccaaggctgcgggaggctgggagccctgccctgcccatccctcctgcaccagcgctgtccctgcacactttggttcagtcccggtgcccctgccaagatgtggaaggggccgggtgaagacaggcttgagggctgccccagcaggctctgggtatgacctgcctctggccctggtcctgggcggggcctgtgggtggagtagtacccccaggccctgccctgggtgacagactgggaggaaaccaggctggacctgggcaggcgggatgtgttggccacagggagaggcggaccggcacccggtgggacctcctaggactgggccttcttccagggggcccctggcagcagctggggtgtcgggcagaatgtgacttgtggccttaccatggacttgaatgggacttggctggcctcaggatcttgtgcctggaaatagcctgaggtggctcaggaagcggagaaagggtgccagaccattctctggcggggaccagggcccaaggccccagggctggaaggagaccaaggggcagccgccctggagggacatcagtgcttcctcttccacccaattcccccacgcggttccatgttttcccaccagcctgttggcgaagttgctgctccggcattcagtacctgcttcttccagagaaataaagttagtttctattttatgtta

SEQ ID NO: 14571 - DNA, 2085 bp, Homo sapiens
ctgagcgtggaactgagcacctcccggcccccccagcatctaggaggggtgaaaagtaagagcccctctgctccctggtgtccctaactcatcggctactcaggaaggggcactgtcttcacaggccaccctaaggctgctgttctgtttttggggacagtggggtcagggcagcaggcgggacagctgtgtccctggctccggctgggcgtggggtggaagacaggcagctgtatccgccgaggtgggcctcctcgggctgggtctgcagcaggcccgtccgccccggcgtccctcctccctccttccacggccgagctcagatcctggctttcctcacttccccctaatcctgctctcctgtcccaagccaaaaccaccccacggctccggctctgcctggggcctcctccatctcccggtcctctgcctatcatactggaccgccgtgttcctcatcctgccgcctgcggcctcccgtttgctgggggcttgtacattcactcgcccccattcacttctctcccttcgtctctctacactctgccctctcgtccggccgtctccctcctttgtcctctgtcctgctccgtctctctccccctgtccgcatggcctttcttgcaggggagcctccacctcgcccacctcagcctgccttcttcactcagagtaagtggggctgcttccgatgccttggcccccgcccccgccccctctctctcactcctctcctggaaggtacagagcctgggcggctgggccggaggggaggtgggtgggtgtgtgctgtgagcttccgcggctgccctggcctagcatgcctgccccccctcgagcccgccccccggagcctgggcttctgctcacgagtgtggccctggcttccgcctcggcctcactccctcccagacctgtctgagcttctggagcacgagtgtggccctggcttctgccttggcctcgctgcctcccagacctgcaggcgctgtctgggctttgtggccgttggtcaggagtactgtcctctccaaggatagtccttatagcccctgatggcaggaggcggctccgtgcctgcactaatggtgtgccgtgacaggggcggggatgagggctcactaactcgccagggcgcaggagcagggccgccggggtcttgtgctggtggaggcagcgtcaggcaggagccagtgttgcttgctgcagcttagacggagcgaggcggggctcaccggcccacatggggctgccgggcagagcaggttccgccctcctgatggagtggtcggaggtgcgctgagaacctggccgccggtggctgacctcagacctcggggggagttgggagtggagggttgctgggggacacttggctttctctcccacgtgccacctcccctcgtgtcccagaccctgcctgactgccttcctgttgggctctccctttccatcacagaaccaacctatgaccctgtgagcgaggaccaagaccccttgtccagcgacttcaagaggctgggcctgcggaagccaggcctgccccgagggctgtggctggcgaagccctcggcgcgggtgccgggcaccaaggccagccgaggcagcggggctgaggtcacgctcatcgacttcggtgaggagcccgtggtcccggccctacggccctgcgcgccctccctggcgcagctggccatggacgcctgctccctgctggacgagaccccgcctcagagccccacgcgggcactgccccggcccctgcaccccacgcctgtggtggactgggacgcacgcccgctgccccccccgcccgcctatgacgacgtggcccaggatgaggatgactttgagatctgctccatcaacagcaccctcgtgggcgcgggggtccctgccgggcccagccagggccagaccaactacgcctttgtgcctgagcaggcgcggccgccccctcccctggaggacaacctgttcctcccgccccagggtgggggcaagccgcccagctccgcacagaccgcagagatcttccaggcgctacagcaggagtgcatgaggcaactgcaggctccggccggc

SEQ ID NO: 14572 - DNA, 491 bp, Homo sapiens
ctgagcgtggaactgagcacctcccggcccccccagcatctaggaggggtgaaaagggagcctccacctcgcccacctcagcctgccttcttcactcagaaaccaacctatgaccctgtgagcgaggaccaagaccccttgtccagcgacttcaagaggctgggcctgcggaagccaggcctgccccgagggctgtggctggcgaagccctcggcgcgggtgccgggcaccaaggccagccgaggcagcggggctgaggtcacgctcatcgacttcgcaccctcgtgggcgcgggggtccctgccgggcccagccagggccagaccaactacgcctttgtgcctgagcaggcgcggccgccccctcccctggaggacaacctgttcctcccgccccagggtgggggcaagccgcccagctccgcacagaccgcagagatcttccaggcgctacagcaggagtgcatgaggcaactgcaggctccggccggc

SEQ ID NO: 14573 - DNA, 7772 bp, Homo sapiens
tcatttcccacccctggtgtgggatttggggggctcctgggcagagtgcgaagctccggagccgaggccactggatccccagtgactgctcgggggggtcccgctgcgtggagatgccggcagcacgtcggttccctggcctggagctctccttccctctcctggccagactgcggcgacgcctgtacacagtgagtggggggcaggggctggactgctggggactggttgggctcctcagcaccagcacttgactgagaggcagaaagcaagactgggagcggctgagggaccccgccagtgagggcttgacggggagtccgggccaagtggcctctcctgcggctgctgcattccttcttcttggcctgtgtgtttgcacgccggccacagagtagtgacggacacaggtgtgcagactccatgaggtgcgggggccaggaccatgcagaattggagagtgtttgaactctggaggagctgcagccatgccctgtgctgcacaaagaaccttgggctggagggggacttagaggggaggcggacccctgcggagtcaccctggactgagaccctgaccgcttgcctcaccagcatcccggagttccttcccgtcctcccacatgcatcccctgtgcagagctgcgctgttgctgggtcagggagcatggagtgcacagctgaacagaggtgcattagctggtgtttcagggagagggaacaggccgggctgtgctttctgaagagcttcaggggaggggcctctgggtctcccccagccctgaccaccccgggcatggctttgagctgttttcaggagcctagaggagggggcctggatccttgggagttggtggtgggaaaaagaagaggagccctggagactgctctccctgcgggagactaggagcctccatcctgaggctgagccctggagggggggggtcactttgctccagggacagggcagcggtggccgtggccgggtggagaggagacgctgcctaggcccgtgactcctagtgtgcctctgggcttgcttccggaaagccacgacgcctggtcctcttaaaccccacgcctcttgttttgtaaacagatgattttgttgaggataaatgaatacagcttaatacttagaactgttcctcgcatatagtaagtgcagttgaagtgttagattttattttattttgagatggagttttgctcttgttgcccaggctggagtgcaatggcacgatcttggctcaccacagcctccgcctcccgggttcaagtgattctcctgcctcagcctcctgagtagctgagattacaggcatgtgccaccaggcccggctaattttctattttcagtagagatggggtttctccatgttggtcaggctggtctcgaactcaggtgatccgcccacctcagcctaagtgctgggattacagctgtgagccactgtgcttggcctagatgttatttttattgttacttgtcttaaataaagttaatagaaatatataacctgttatattaacatgttaacctgtgtacagtgaaacaagcaacacagtgggaactctaatataaagagacataagaggaaggtaataatattttatgtatcctaatacgttagtaacctagacaatgtagtgaggagtcagatcttgagacctcaggtggaaacaccgtgaaggcagcatctgcaagtgctgaccgagaggggagttttgaaataatgagagggggttgccttcactgacatttttgcaaatagtggacttctgctatgttctgaataaagcaaagtccattttcccttaagtttacacagtagtttcattccaggaaaatttattttatattaaaactgtaaggccaggagcagtggctccccagcactttgggaggccagggcaggtggatcacttgagctcaggagttcgagaccagcctggccaacatggaggaaccctgtctccactaaaaatacaaaaattagccgggcgcctgtgatcccagcttcttgggaggctgaggcgggagaattgcctgaacccgggaggctgagtttgcaatgagccaagatcataccattgtactccagcctgggagtctcactctgtctcaaaaaaaaaaaaaaaaaaaaccaaaaaactataaaagtactttcttatttatatataaagtgggatcatattctaggtttgcatgatcataaacaccttcatgaattgagttgtgtgggatttgggacagtgcgagaatgtcctacgcattgcaggctagctcacgctcttgtcccccaaccacccactgaatgtcactaaggcccccccaaatgttgtggcaaccagaactgtcccatagggggctgtgcagcctcatgagaaccattccagtaaagggttacagctttaagtttggaaaccacccggctggcccagctgcctggcccggtcgccgaggtggaagagccaggatttgaactgagagtttctcattcccctttgttactctttgtacttccctgagctgcctgaaaaagtcggaactggcactgtgttggcagggccactgggaactgtgggggcaggaggctcacgctgggcccaggctgtgtgtgcctgcttctcagtgctgctcactgtgatgggagctggggaggaggccaccgctgagtgggggagggggatggcttggtccccagccgggcagctggccttttttctctcgcctgttcctctttggggattgagcatgggtccggggctagcctggccacgccctcagctctgacacaccttacgcagacagggatgggtttgctgtgcggtgggtccgcttgcttagctttgaaggtgccaccagcttctttatctgggcccaggatagtgtaggtcagaggtcactctccggtaccactggctgattgcggcctgcagtgtgctttggccagcacgctgtgtgtgcgtgtgcatgcttttcagatctgaactattcagcattgttaaaaagtcaggagaaagacgaatattaagtgaaatcagggaacagaatggtatggttaatgcgtgaatattcgtgtagggacaacagagtctgaagcgtccgcagaagacatcactggcaactcctggggagccgggtggctgtgcagctggggagggaatgagattcgtggctcagtgtgccttctgaatattttaccacgtgcatatattaccttttccaaactttaatggtgagatttcacatgtaaattgggatttatttcttgaaaaaatggaaagctttgacaacactgggccacagtttcttctgacaaccattgatgggatctgagctccctgttgacaggggtgtctgcgagcccaccgcaggccccacccctccctcctgtcttccgcttgctgtggccctgtaggcacttgagtggtggcccgtggagtggtctttggattgttaggagaggctggggtggtcaggcgctgggaggaacttagcttagagctcatctgaccctgagagttttctccgtcacatctaaggagcccatagatgggtctcggggcacattgcaccctagagatttttatcaaatattaggagtaagaacacgtcggtgttcccggagagaccactgttagtttttaaaagattttcaaggactttcgacccctagaaacttagagcaggaatgtgagcacaggttgatcttgggtcactcagtcacagatcacatttcgggagcaagaccctgactcctgactccagggccagggctgtatctccgccgccctaattgtgccctgtggctggcaggaataggggacgtgggtccaggcggttctcggtagcttccctcgggagtcagaaggtggtgtgagcccttccgggtggccgtgtagtgggatgaaggtgagcccaggtcactcgggcaggcccctgttgtccccccacaacccttgtccctgagccactcctccccccacagaggctgggaggcggcagaatgcagccagaggagggcacaggctggctgctggagctgctgtccgaggtgcagctgcaacagtacttcctgcggctccgagatgacctcaacgtcacccgcctgtcccactttgagtacgtcaagaatgaggacctggagaagatcggcatgggtcggcctggtaggtgggatgttggcctggcttgtcttgcccctgaccctttccgtcctctgtcctcaggaccactcggtgcacgggtggcagctgagaactctgtcccagagccctgagggagcaggagggacatcagtaggtgctgatgtgtgatgagaacagttggcagttataaaggtgaattggagtttgaggagagtgaggccttccctaaagctggctacacaggagtcactccatgccccgttgtgattgttctcacgtagagtgtatgtcctccattgcccctccttcataagcatcgaattgagtctgttctcatcattctgactaccggggggtccatgtgcagagatctgtagggagaacgctaactctcagatggtttgctgattcgtgctcacgctctctttcttgctctctcacacgcacacacgcatgcacacgcacaggcatacacacacacacacacacacgcaggcacacacgcacatgcgcacacacgtgcacgcacgcatgcacgtgcacacacgcatgcacgtgcgtacgcacgcgctcacacgcctgcgcacacagacacgcacacacacacacacgtgtgtgcgcacacccgcatgcacacgcacggcatacacacatgtacacacacgcgcgcagacgcacacacgtgcgcacacgcgtgtgcacacacacgcacatacacacaggtttgctctgatttgagttcaacccttatcttcatatttttcctaaaagtgggggttgtagcatctaaaagtcatgatgttcttcatagaacattagaaacgtattagggctttcaagttaaaatagctaaataggtaataatgtgtcaagttagacactgacttagttaaaatagctaaataggtaataatgtgtcaagttagacactgacttagttaaaatagctaaataggtaataacgtgtcaagttagacactgacttagttaaaatagctaaataggtagtaatgtgctaagttagacattgatttatgctactttaggcctggatagttggtgtctgatgccagtagcataaaaaaattttacggagggaaaaaaacctcaacattgagaaaattctgttcattaccttgatttttcctgagaactgggagaagcccatcgcttcaagtttttggttaaacaccttcacccagtttgagagccagtgccaggaagtggagtgcagagaccgtcggtcagttgaggctccgggttagttggggttgatttcattgctatcatcgggtgggcggtgtctagtgacaggctcacccccaaggggaccacaggcagcagcctctctcgggctacggcggccttcacagcacgcggttccccgctctccctgcaggccagcggcggctgtgggaggctgtgaagaggaggaaggccttgtgcaaacgcaagtcgtggatgagtaaggtgggtgaggaggtgggtgaggaggtgggaggggggcagcctcgaacgcccccctccgcttctggtcctgggaaccttccccagctccccggcaggtcgaatctcgccgttctgccggcactttgtacaggaccccctcgtccagggtcttatcgggcagggcacttgtagagctgctgggctaagtgtctgtctccgccagatacggacacgtgagcagcctgtgtgcggtgaggccttcacagcccctctcggcacgcctggaacaggacctcattgacaagtgtgccttaacttagccctgctgtgtctgagcgttggggccagtgtccagcgtggggtggtggacctgtctggacccagaacgtctttgcttggcttccctcctccctgaccctctctaatctctgggtttctctggtcatctgtccctgctgacagcttccttccccacagcctgtccccacctctccccacaccttgtcctaatttgggtctgtggtgtagtgagtccctggtctgactcagtggaactttgcccattgtctggaagacaatgagagaggaagtgagccagccgtggtctttcctccccacttctggcttcagggctgggttggggggtgggcagggccgaacagctgcagtgggattgggcagcagagattttcctggctgcaatccggcaaaggggctgtctcttgggatcctttggcttttcctggaaacactgtcctggtcctttgcccgggttttagggaaggatgagtagtgtcgggatggtggaggcaggagaagagagcagcgtggtttgctgagatttaggggtcttggatctgccactggctcctgataggtccctgggcggtcagtggcctccagatttttgttgtgtcttcagtgaaatgataccggtccccactgcccagctcacctcccggggctgcaggaggcaccggagataatggctgtagagggtcttgtaacctgaacattgcttgcaaacataaggaattctagttactgggaggaagcacagggcagaggccagaagaggccctcagatttgaggcaccctagcccagacggataaggatccaccagctctgggggcgtgagacccaagctggcaagaatctgcaatctggagccaaggctgtgggtgcctcagtggaggccgagtcagaccgacgtggccagctttgaccctcatggcctcctttcttctgtcccttgaccttcggctcctccctgtccaccctggcctccgagtctcctccacttttccttccgtctcagccctcagctctaggcgcccctccagagacccagctgtcttcccaggccccttcccagcaaggactagcttcatctgaaccacacacacactcacggttcaacctcagactaaaattatcctctcccctgggcaggatgaagggcagccgactccctggtgagggtggagacagacagcaccaaatggtcaggccagagaaggggccagggctaaaaatggacaaggaggtgtctgtggagggcccctgcggctccatcgatgcgggttagggctggagtctgcggggtggcgggtgcaggaagggagggtggggcaggactgggaggagactccgaccttggctgggcggtgccctccctctccacacagctgggtgtggggccgctcagccacaggctgcatgcctgtcggtctctttctggcaccctccttgaggccagcatcaggctttgggttcatgtttgggggtgtgccctggacggagtgtgggcctccagccaggctgccccactgacagtttggcaaaaccaggacctatctggaagccgaagccggggatcaccaggtggacccagcggggtgggactgagtgactgaccctggggtgttggattccatctggcccccggctgccttcaaacaggtgttcagtggaaagcgactggaggctgagttcccacctcatcactctcagagcaccttccggaagacctcgcccgcccctgggggcccagcaggggaggggcccctgcagagcctcacctgcctcattggggagaaggacctgcgcctcctggagaagctgggtgatggttcctttggcgtggtgcgcaggggcgagtgggac

SEQ ID NO: 14574 - DNA, 778 bp, Homo sapiens
tcatttcccacccctggtgtgggatttggggggctcctgggcagagtgcgaagctccggagccgaggccactggatccccagtgactgctcgggggggtcccgctgcgtggagatgccggcagcacgtcggttccctggcctggagctctccttccctctcctggccagactgcggcgacgcctgtacacaaggctgggaggcggcagaatgcagccagaggagggcacaggctggctgctggagctgctgtccgaggtgcagctgcaacagtacttcctgcggctccgagatgacctcaacgtcacccgcctgtcccactttgagtacgtcaagaatgaggacctggagaagatcggcatgggtcggcctggccagcggcggctgtgggaggctgtgaagaggaggaaggccttgtgcaaacgcaagtcgtggatgagtaaggatgaagggcagccgactccctggtgagggtggagacagacagcaccaaatggtcaggccagagaaggggccagggctaaaaatggacaaggaggtgtctgtggagggcccctgcggctccatcgatgcgggtgttcagtggaaagcgactggaggctgagttcccacctcatcactctcagagcaccttccggaagacctcgcccgcccctgggggcccagcaggggaggggcccctgcagagcctcacctgcctcattggggagaaggacctgcgcctcctggagaagctgggtgatggttcctttggcgtggtgcgcaggggcgagtgggac

SEQ ID NO: 14575 - DNA, 9756 bp, Homo sapiens
gtcgggctgttttcctgggcgaggagaaagggggccgggccgggccgggcgcggtggctcacgcctgtcatctcagcactttgggaggccgaggcgggcagatcacctgagacgaggacgctgaggtcaggaattcgggaccagcctggccaacatggcggaaaaaaaaaaaatagctgggcacggtggcgggggcctgtaatcccagctactcgggaggctgaggcaggagaatcacttgaacccgggatcgcgccactgcactcaagcctgggcgatagagcaagactctcaaaaaaaaaaagggggtgggggttccaggagccggcctggcgctgacccacacatactttgcttcttcccgcagctggattactgggccagttacaggtcttgttcttactggacatccaaggtcaggcatggggttctggtgactttgagacacatatttctggggacgctagagtttttaatctggccattctgatccagcagacccattttgaaatagagggaataaccctgcttaaattgttccccggcccccggtccctgggtctccttccaggtgtgcttggtgccagggtaaggctgtaggcttctctgatgcaagggcacagtcagccaaggtttggggaaaagtcagctccagtgtaacgcaggcctgatcttgtccacctgacctcagcccccactccatccacacctgccatctccacaagctttgtgggctggatggcagggggatgaggaagagggactgaagttgggggtgtccttctccccacctcctggagttagaccaggaaatggctgtcccttttggcatcatcagggaggtcaagtgctgggagaggccctgggaagggagcctgggatgctgagtccccaaagccctgctccccagctgcccacccctccagccagctgaggctccctgagctggtggccagctggacagggacaagagagcagtgtgcaagaaacaggggctccctaggcatggctcagcagggaggggggtgcctggggagctggagagggcttcctgcagctgtcaggtgtgtctgggggccgtagcgaggggggtgtaagagcagctggcaccctttgaggagggccagagagatcatttgtcagttctagaaacatgagggccccacgggggcttgatggagtgtctctaggccccttaatctgaggccgtggtctgtgtcaggggttatacaggagacatcctacagctttggggtgggggcgtcccagcaggagtctcagggcatatttgtttgttttgagcgggtttgggaacttggccacctggtctgagtaggaggcaccctgggtgtttgggcagcagacagggccaccccaggggagggggtgaggatcctcaccccaccctacccttgctcttggctggactgccccactctggcaggctgccggccgcctatttccgtcgggcaccagggtaacagggccacatcagggtctgagccaggagacacccagccaaggctgggactcgggggtgggggagggtctctgaggagtcatcgcagggcccagcggagcctctggggtccaagcctcccactcaggctgtgtgttagtccccacgtccccacacaggtccatgagggagtccacagccctgcttcatacgtgctgtttgagtcacatagccgccaccctaaagtcccaggagttgtctgcaactgtgagggctggggtagaagccagagacaggagctttgtgtatggggaggcaggggggccagcgcgggtggctgggaggaagagtcccccccattcctgccgccctcttggcagtgattcagaaaggtcctttttcagccagtgtcagagctgctcagctggggagggagggagagagggagagagagaggcaggcaagagggagggcggccgggcgggcagttgggtggggaagccggggagtagggctggactgtgaccactgccctggagagaagacagaaacaggacagaggatcccggctgcagccagcgtgaggaaagctctgctccctgccagaccggccagctgtggaaacccagcggggcttgcagcagagcggaggggcccaccccgttcttcctcatttcccacccctggtgtgggatttggggggctcctgggcagagtgcgaagctccggagccgaggccactggatccccagtgactgctcgggggggtcccgctgcgtggagatgccggcagcacgtcggttccctggcctggagctctccttccctctcctggccagactgcggcgacgcctgtacacagtgagtggggggcaggggctggactgctggggactggttgggctcctcagcaccagcacttgactgagaggcagaaagcaagactgggagcggctgagggaccccgccagtgagggcttgacggggagtccgggccaagtggcctctcctgcggctgctgcattccttcttcttggcctgtgtgtttgcacgccggccacagagtagtgacggacacaggtgtgcagactccatgaggtgcgggggccaggaccatgcagaattggagagtgtttgaactctggaggagctgcagccatgccctgtgctgcacaaagaaccttgggctggagggggacttagaggggaggcggacccctgcggagtcaccctggactgagaccctgaccgcttgcctcaccagcatcccggagttccttcccgtcctcccacatgcatcccctgtgcagagctgcgctgttgctgggtcagggagcatggagtgcacagctgaacagaggtgcattagctggtgtttcagggagagggaacaggccgggctgtgctttctgaagagcttcaggggaggggcctctgggtctcccccagccctgaccaccccgggcatggctttgagctgttttcaggagcctagaggagggggcctggatccttgggagttggtggtgggaaaaagaagaggagccctggagactgctctccctgcgggagactaggagcctccatcctgaggctgagccctggagggggggggtcactttgctccagggacagggcagcggtggccgtggccgggtggagaggagacgctgcctaggcccgtgactcctagtgtgcctctgggcttgcttccggaaagccacgacgcctggtcctcttaaaccccacgcctcttgttttgtaaacagatgattttgttgaggataaatgaatacagcttaatacttagaactgttcctcgcatatagtaagtgcagttgaagtgttagattttattttattttgagatggagttttgctcttgttgcccaggctggagtgcaatggcacgatcttggctcaccacagcctccgcctcccgggttcaagtgattctcctgcctcagcctcctgagtagctgagattacaggcatgtgccaccaggcccggctaattttctattttcagtagagatggggtttctccatgttggtcaggctggtctcgaactcaggtgatccgcccacctcagcctaagtgctgggattacagctgtgagccactgtgcttggcctagatgttatttttattgttacttgtcttaaataaagttaatagaaatatataacctgttatattaacatgttaacctgtgtacagtgaaacaagcaacacagtgggaactctaatataaagagacataagaggaaggtaataatattttatgtatcctaatacgttagtaacctagacaatgtagtgaggagtcagatcttgagacctcaggtggaaacaccgtgaaggcagcatctgcaagtgctgaccgagaggggagttttgaaataatgagagggggttgccttcactgacatttttgcaaatagtggacttctgctatgttctgaataaagcaaagtccattttcccttaagtttacacagtagtttcattccaggaaaatttattttatattaaaactgtaaggccaggagcagtggctccccagcactttgggaggccagggcaggtggatcacttgagctcaggagttcgagaccagcctggccaacatggaggaaccctgtctccactaaaaatacaaaaattagccgggcgcctgtgatcccagcttcttgggaggctgaggcgggagaattgcctgaacccgggaggctgagtttgcaatgagccaagatcataccattgtactccagcctgggagtctcactctgtctcaaaaaaaaaaaaaaaaaaaaccaaaaaactataaaagtactttcttatttatatataaagtgggatcatattctaggtttgcatgatcataaacaccttcatgaattgagttgtgtgggatttgggacagtgcgagaatgtcctacgcattgcaggctagctcacgctcttgtcccccaaccacccactgaatgtcactaaggcccccccaaatgttgtggcaaccagaactgtcccatagggggctgtgcagcctcatgagaaccattccagtaaagggttacagctttaagtttggaaaccacccggctggcccagctgcctggcccggtcgccgaggtggaagagccaggatttgaactgagagtttctcattcccctttgttactctttgtacttccctgagctgcctgaaaaagtcggaactggcactgtgttggcagggccactgggaactgtgggggcaggaggctcacgctgggcccaggctgtgtgtgcctgcttctcagtgctgctcactgtgatgggagctggggaggaggccaccgctgagtgggggagggggatggcttggtccccagccgggcagctggccttttttctctcgcctgttcctctttggggattgagcatgggtccggggctagcctggccacgccctcagctctgacacaccttacgcagacagggatgggtttgctgtgcggtgggtccgcttgcttagctttgaaggtgccaccagcttctttatctgggcccaggatagtgtaggtcagaggtcactctccggtaccactggctgattgcggcctgcagtgtgctttggccagcacgctgtgtgtgcgtgtgcatgcttttcagatctgaactattcagcattgttaaaaagtcaggagaaagacgaatattaagtgaaatcagggaacagaatggtatggttaatgcgtgaatattcgtgtagggacaacagagtctgaagcgtccgcagaagacatcactggcaactcctggggagccgggtggctgtgcagctggggagggaatgagattcgtggctcagtgtgccttctgaatattttaccacgtgcatatattaccttttccaaactttaatggtgagatttcacatgtaaattgggatttatttcttgaaaaaatggaaagctttgacaacactgggccacagtttcttctgacaaccattgatgggatctgagctccctgttgacaggggtgtctgcgagcccaccgcaggccccacccctccctcctgtcttccgcttgctgtggccctgtaggcacttgagtggtggcccgtggagtggtctttggattgttaggagaggctggggtggtcaggcgctgggaggaacttagcttagagctcatctgaccctgagagttttctccgtcacatctaaggagcccatagatgggtctcggggcacattgcaccctagagatttttatcaaatattaggagtaagaacacgtcggtgttcccggagagaccactgttagtttttaaaagattttcaaggactttcgacccctagaaacttagagcaggaatgtgagcacaggttgatcttgggtcactcagtcacagatcacatttcgggagcaagaccctgactcctgactccagggccagggctgtatctccgccgccctaattgtgccctgtggctggcaggaataggggacgtgggtccaggcggttctcggtagcttccctcgggagtcagaaggtggtgtgagcccttccgggtggccgtgtagtgggatgaaggtgagcccaggtcactcgggcaggcccctgttgtccccccacaacccttgtccctgagccactcctccccccacagaggctgggaggcggcagaatgcagccagaggagggcacaggctggctgctggagctgctgtccgaggtgcagctgcaacagtacttcctgcggctccgagatgacctcaacgtcacccgcctgtcccactttgagtacgtcaagaatgaggacctggagaagatcggcatgggtcggcctggtaggtgggatgttggcctggcttgtcttgcccctgaccctttccgtcctctgtcctcaggaccactcggtgcacgggtggcagctgagaactctgtcccagagccctgagggagcaggagggacatcagtaggtgctgatgtgtgatgagaacagttggcagttataaaggtgaattggagtttgaggagagtgaggccttccctaaagctggctacacaggagtcactccatgccccgttgtgattgttctcacgtagagtgtatgtcctccattgcccctccttcataagcatcgaattgagtctgttctcatcattctgactaccggggggtccatgtgcagagatctgtagggagaacgctaactctcagatggtttgctgattcgtgctcacgctctctttcttgctctctcacacgcacacacgcatgcacacgcacaggcatacacacacacacacacacacgcaggcacacacgcacatgcgcacacacgtgcacgcacgcatgcacgtgcacacacgcatgcacgtgcgtacgcacgcgctcacacgcctgcgcacacagacacgcacacacacacacacgtgtgtgcgcacacccgcatgcacacgcacggcatacacacatgtacacacacgcgcgcagacgcacacacgtgcgcacacgcgtgtgcacacacacgcacatacacacaggtttgctctgatttgagttcaacccttatcttcatatttttcctaaaagtgggggttgtagcatctaaaagtcatgatgttcttcatagaacattagaaacgtattagggctttcaagttaaaatagctaaataggtaataatgtgtcaagttagacactgacttagttaaaatagctaaataggtaataatgtgtcaagttagacactgacttagttaaaatagctaaataggtaataacgtgtcaagttagacactgacttagttaaaatagctaaataggtagtaatgtgctaagttagacattgatttatgctactttaggcctggatagttggtgtctgatgccagtagcataaaaaaattttacggagggaaaaaaacctcaacattgagaaaattctgttcattaccttgatttttcctgagaactgggagaagcccatcgcttcaagtttttggttaaacaccttcacccagtttgagagccagtgccaggaagtggagtgcagagaccgtcggtcagttgaggctccgggttagttggggttgatttcattgctatcatcgggtgggcggtgtctagtgacaggctcacccccaaggggaccacaggcagcagcctctctcgggctacggcggccttcacagcacgcggttccccgctctccctgcaggccagcggcggctgtgggaggctgtgaagaggaggaaggccttgtgcaaacgcaagtcgtggatgagtaaggtgggtgaggaggtgggtgaggaggtgggaggggggcagcctcgaacgcccccctccgcttctggtcctgggaaccttccccagctccccggcaggtcgaatctcgccgttctgccggcactttgtacaggaccccctcgtccagggtcttatcgggcagggcacttgtagagctgctgggctaagtgtctgtctccgccagatacggacacgtgagcagcctgtgtgcggtgaggccttcacagcccctctcggcacgcctggaacaggacctcattgacaagtgtgccttaacttagccctgctgtgtctgagcgttggggccagtgtccagcgtggggtggtggacctgtctggacccagaacgtctttgcttggcttccctcctccctgaccctctctaatctctgggtttctctggtcatctgtccctgctgacagcttccttccccacagcctgtccccacctctccccacaccttgtcctaatttgggtctgtggtgtagtgagtccctggtctgactcagtggaactttgcccattgtctggaagacaatgagagaggaagtgagccagccgtggtctttcctccccacttctggcttcagggctgggttggggggtgggcagggccgaacagctgcagtgggattgggcagcagagattttcctggctgcaatccggcaaaggggctgtctcttgggatcctttggcttttcctggaaacactgtcctggtcctttgcccgggttttagggaaggatgagtagtgtcgggatggtggaggcaggagaagagagcagcgtggtttgctgagatttaggggtcttggatctgccactggctcctgataggtccctgggcggtcagtggcctccagatttttgttgtgtcttcagtgaaatgataccggtccccactgcccagctcacctcccggggctgcaggaggcaccggagataatggctgtagagggtcttgtaacctgaacattgcttgcaaacataaggaattctagttactgggaggaagcacagggcagaggccagaagaggccctcagatttgaggcaccctagcccagacggataaggatccaccagctctgggggcgtgagacccaagctggcaagaatctgcaatctggagccaaggctgtgggtgcctcagtggaggccgagtcagaccgacgtggccagctttgaccctcatggcctcctttcttctgtcccttgaccttcggctcctccctgtccaccctggcctccgagtctcctccacttttccttccgtctcagccctcagctctaggcgcccctccagagacccagctgtcttcccaggccccttcccagcaaggactagcttcatctgaaccacacacacactcacggttcaacctcagactaaaattatcctctcccctgggcaggatgaagggcagccgactccctggtgagggtggagacagacagcaccaaatggtcaggccagagaaggggccagggctaaaaatggacaaggaggtgtctgtggagggcccctgcggctccatcgatgcgggttagggctggagtctgcggggtggcgggtgcaggaagggagggtggggcaggactgggaggagactccgaccttggctgggcggtgccctccctctccacacagctgggtgtggggccgctcagccacaggctgcatgcctgtcggtctctttctggcaccctccttgaggccagcatcaggctttgggttcatgtttgggggtgtgccctggacggagtgtgggcctccagccaggctgccccactgacagtttggcaaaaccaggacctatctggaagccgaagccggggatcaccaggtggacccagcggggtgggactgagtgactgaccctggggtgttggattccatctggcccccggctgccttcaaacaggtgttcagtggaaagcgactggaggctgagttcccacctcatcactctcagagcacctt

SEQ ID NO: 14576 - DNA, 580 bp, Homo sapiens
gtcgggctgttttcctgggcgaggagaaagggggccgggccgggccgggcgcggtggctcacgcctgtcatctcagcactttgggaggccgaggcgggcagatcacctgagacgaggacgctgagctggattactgggccagttacaggtcttgttcttactggacatccaagcatcccggagttccttcccgtcctcccacatgcatcccctgtgcagagctgcgctgttgctgggtcagggagcatggagtgcacagctgaacagagaggctgggaggcggcagaatgcagccagaggagggcacaggctggctgctggagctgctgtccgaggtgcagctgcaacagtacttcctgcggctccgagatgacctcaacgtcacccgcctgtcccactttgagtacgtcaagaatgaggacctggagaagatcggcatgggtcggcctggccagcggcggctgtgggaggctgtgaagaggaggaaggccttgtgcaaacgcaagtcgtggatgagtaaggtgttcagtggaaagcgactggaggctgagttcccacctcatcactctcagagcacctt

SEQ ID NO: 14577 - DNA, 3804 bp, Homo sapiens
ccccgactgcctgaaccgcgccaggagacggaccgcaagtccagcgtacccacagacgactcaggcgggagacgagcggtgtcatggccgccgacagtgacgatggcgcagtttcagctcccgcagcttccgacggtgagcggcttcccagaggtagccttcaaagcctctgcgctctgggagaggggaaggcctcgggctcatagttctagaggctcctcaagcttcagaggactgctccttccgcctgaactagccacgaggagactacaagttccgttgtacaccgcggctccggctgcaaaagcctggagcgttgggagcatggggctgatggaggcatggcgggagatgtagtctggagctcataacggttagtagtaatagttgtgattcagttcagtggagtggattgagcgttgtgatccaaaggaaggtaggacgtattgggagctctggtgtggggcactgccaggctctggggcttactgggagctgttgcttgtggcgctggggcaccatgagaacagtagtatggatccctgtgggatattaagggagctgagatcctcaagccctacaaaatgtttcctgcaggacatgggaaaaaagaatcaaaggtcgtctagtccaactttctcctctacagattgtgaaagcgaggtgggaagtaatttacccaggctcatacaagccagtagaagactcaggcttcctctccccaaattcagggcattctccactccaaggcctgtgtgtagaacacgtgggttacaaaggcttgtgggaaaagctaccaatggaaactaccccccttaccaccatcaccgtggcctagcttggtgtctgttcccctgggctctttccttaagcatgaacatccatcaccctcctaacccccaggtggtgtcagcaaaagcacaacatctggggaggagctagtagtccaggttcccgtagtggatgtgcaaagcaacaacttcaaggagatgtggccatccctcctgctagccataaagacagctaatttcgtggctgtggacacggtgagagttgggaaacaaggagggcaggtggttgtgaaggggctggtgctagaggcctgtcacaactctccctttacctacccacaggagctgagtgggcttggggacaggaagagtttgctgaaccagtaagtataagcccttttctctttagtgccagccctcaactgtggagtgggggggtcacagacctgggtggtttgggtccttcataaggctaactcctagccacagcaacccccatacccaaccccaaggtgcattgaggaacgttacaaggccgtgtgtcatgctgccaggacccgttctatcctttccctgggcctcgcctgcttcaagcggcagccagacaaggtatgagctgatctcaccccaatcctaggtgtggctgtggggtggagggtagagagattctagggaacatcagataggaagcatttctctcccaaatctttttttttgacttgatagtttttttttttttatttgaataggtttatggggaacaggtggtgtttggttaaatgagtaagttctttagtggcaatttctgagattttggtgcacctatcacccagtgtacactgtgcccaatgcgtagtcttttatccctcacctgcctccatcctttcccccctgagtccccagagtccattgtatcattcttaagcttttgcatcctcctagcttggctctctgaaatcttgatatagcagacttctctttctcccagggtgaacattcctatctggctcaagtgttcaatctcactctgctgtgcatggaggagtatgtcatagaaccaaagtctgtgcagttcctgatacagcatggcttcaacttcaaccagcagtatgcccaaggcatcccctaccataagggcaatgacaaggtaggcctctagcctccctagccttgagtctgccctttctgtgactttatttcttcctaccctaggctggatgtctggggagaatctgcttcttagggagtatggggaatcactagtgacagggcttgggaaacaagactggtatgaggagggtgggcagcattgggtaaggtagagagagagcgttccaagtggggaagtctgggataagtgcccagcagaagaggctccctgggggactctgtcctcctcattgacccctttactttcatctagggtgatgagagccagagccagtcagtacggaccctattcctggagctaatccgagcccgccggcccctggtgctacacaatggccttatagacttggtgttcctgtaccagaacttctatgcacacctccctgagagtctgggaaccttcaccgctgacctgtgtgagatgttcccagcaggcatttatgacaccaaatatgctgctgagtttcatgcccgtttcgtggcctcctacttagaatatgccttccggaaatggtgaggaaatggttgagggaaaggggtggggcctgatacgagtttatttcattcacttaagatatttattgagctcctaccatgtgcccaggcagtgttttaggtgctgaggattcagcagtgaacaaaacagaccacaaaaccctgctcttatggagcttatatgctagtggaccattaccctcttgcgctgttgcagtgaacgggaaaatgggaagcagcgggcagctggcagcccacaccttaccctggagttctgcaactatccttccagcatgagggaccatattgattaccgctgctgcctgcccccagcaacccaccgtcctcatcccaccagcatctgtgacaacttctcggtgagagcacccacctgtttcttgggagggaaggttctgatgcctggagcctctttctaagcctctttcccacccctaggcttatggctggtgccccctgggaccacagtgtcctcagtctcacgatattgaccttatcattgacactgatgaggctgcggcagaggacaagcggcgacggcgacgacgtagggaaaaacggaagagggctttattgaacctaccggggacacagacctctggggaagctaaggatggtcctcccaagaagcaggtctgtggggatagcatcaagcctgaagaaaccgagcaggaggtggctgccgatgaaactaggaacctgcctcactccaagcaaggcaacaaaaatgacttagagatggggattaaggcagcaaggcctgaaatagctgatagagctacctcagaagtgccagggagccaagccagtcctaacccagtgcctggggatggattgcaccgggctggttttgatgcctttatgacaggttatgtgatggcctatgtggaagtgagccagggaccgcagccctgcagctctggaccctggctccctgaatgccacaataaggtatatttgagtggcaaagctgtacccctcacagtggccaagagccagttctctcgttcctccaaagcccacaatcagaagatgaagctcacttggggcagtagctgatgcaacttccaccttgctctcaggtggaacagaggtattttgggtctctctagcctgaaatgtcatcctcaactgctactgagtttaggggagggggaatgtcttgacagacatcactgcattgccctggaccgcctcctttatcccagtgtttgaggtacaagtaagaaggctgaccagcacctgtaacactgactttatttttaagtctgaaaatgtcttgggaaagttttacaaaaaaaaaaatcaacagaagcaagttatgaaaata

SEQ ID NO: 14578 - DNA, 1887 bp, Homo sapiens
ccccgactgcctgaaccgcgccaggagacggaccgcaagtccagcgtacccacagacgactcaggcgggagacgagcggtgtcatggccgccgacagtgacgatggcgcagtttcagctcccgcagcttccgacggtggtgtcagcaaaagcacaacatctggggaggagctagtagtccaggttcccgtagtggatgtgcaaagcaacaacttcaaggagatgtggccatccctcctgctagccataaagacagctaatttcgtggctgtggacacggagctgagtgggcttggggacaggaagagtttgctgaaccagtgcattgaggaacgttacaaggccgtgtgtcatgctgccaggacccgttctatcctttccctgggcctcgcctgcttcaagcggcagccagacaagggtgaacattcctatctggctcaagtgttcaatctcactctgctgtgcatggaggagtatgtcatagaaccaaagtctgtgcagttcctgatacagcatggcttcaacttcaaccagcagtatgcccaaggcatcccctaccataagggcaatgacaagggtgatgagagccagagccagtcagtacggaccctattcctggagctaatccgagcccgccggcccctggtgctacacaatggccttatagacttggtgttcctgtaccagaacttctatgcacacctccctgagagtctgggaaccttcaccgctgacctgtgtgagatgttcccagcaggcatttatgacaccaaatatgctgctgagtttcatgcccgtttcgtggcctcctacttagaatatgccttccggaaatgtgaacgggaaaatgggaagcagcgggcagctggcagcccacaccttaccctggagttctgcaactatccttccagcatgagggaccatattgattaccgctgctgcctgcccccagcaacccaccgtcctcatcccaccagcatctgtgacaacttctcggcttatggctggtgccccctgggaccacagtgtcctcagtctcacgatattgaccttatcattgacactgatgaggctgcggcagaggacaagcggcgacggcgacgacgtagggaaaaacggaagagggctttattgaacctaccggggacacagacctctggggaagctaaggatggtcctcccaagaagcaggtctgtggggatagcatcaagcctgaagaaaccgagcaggaggtggctgccgatgaaactaggaacctgcctcactccaagcaaggcaacaaaaatgacttagagatggggattaaggcagcaaggcctgaaatagctgatagagctacctcagaagtgccagggagccaagccagtcctaacccagtgcctggggatggattgcaccgggctggttttgatgcctttatgacaggttatgtgatggcctatgtggaagtgagccagggaccgcagccctgcagctctggaccctggctccctgaatgccacaataaggtatatttgagtggcaaagctgtacccctcacagtggccaagagccagttctctcgttcctccaaagcccacaatcagaagatgaagctcacttggggcagtagctgatgcaacttccaccttgctctcaggtggaacagaggtattttgggtctctctagcctgaaatgtcatcctcaactgctactgagtttaggggagggggaatgtcttgacagacatcactgcattgccctggaccgcctcctttatcccagtgtttgaggtacaagtaagaaggctgaccagcacctgtaacactgactttatttttaagtctgaaaatgtcttgggaaagttttacaaaaaaaaaaatcaacagaagcaagttatgaaaata

SEQ ID NO: 14579 - DNA, 1564 bp, Homo sapiens
cccacaggagctgagtgggcttggggacaggaagagtttgctgaaccagtaagtataagcccttttctctttagtgccagccctcaactgtggagtgggggggtcacagacctgggtggtttgggtccttcataaggctaactcctagccacagcaacccccatacccaaccccaaggtgcattgaggaacgttacaaggccgtgtgtcatgctgccaggacccgttctatcctttccctgggcctcgcctgcttcaagcggcagccagacaaggtatgagctgatctcaccccaatcctaggtgtggctgtggggtggagggtagagagattctagggaacatcagataggaagcatttctctcccaaatctttttttttgacttgatagtttttttttttttatttgaataggtttatggggaacaggtggtgtttggttaaatgagtaagttctttagtggcaatttctgagattttggtgcacctatcacccagtgtacactgtgcccaatgcgtagtcttttatccctcacctgcctccatcctttcccccctgagtccccagagtccattgtatcattcttaagcttttgcatcctcctagcttggctctctgaaatcttgatatagcagacttctctttctcccagggtgaacattcctatctggctcaagtgttcaatctcactctgctgtgcatggaggagtatgtcatagaaccaaagtctgtgcagttcctgatacagcatggcttcaacttcaaccagcagtatgcccaaggcatcccctaccataagggcaatgacaaggtaggcctctagcctccctagccttgagtctgccctttctgtgactttatttcttcctaccctaggctggatgtctggggagaatctgcttcttagggagtatggggaatcactagtgacagggcttgggaaacaagactggtatgaggagggtgggcagcattgggtaaggtagagagagagcgttccaagtggggaagtctgggataagtgcccagcagaagaggctccctgggggactctgtcctcctcattgacccctttactttcatctagggtgatgagagccagagccagtcagtacggaccctattcctggagctaatccgagcccgccggcccctggtgctacacaatggccttatagacttggtgttcctgtaccagaacttctatgcacacctccctgagagtctgggaaccttcaccgctgacctgtgtgagatgttcccagcaggcatttatgacaccaaatatgctgctgagtttcatgcccgtttcgtggcctcctacttagaatatgccttccggaaatggtgaggaaatggttgagggaaaggggtggggcctgatacgagtttatttcattcacttaagatatttattgagctcctaccatgtgcccaggcagtgttttaggtgctgaggattcagcagtgaacaaaacagaccacaaaaccctgctcttatggagcttatatgctagtggaccattaccctcttgcgctgttgcagtgaacgggaaaatggga

SEQ ID NO: 14580 - DNA, 592 bp, Homo sapiens
cccacaggagctgagtgggcttggggacaggaagagtttgctgaaccaggtgaacattcctatctggctcaagtgttcaatctcactctgctgtgcatggaggagtatgtcatagaaccaaagtctgtgcagttcctgatacagcatggcttcaacttcaaccagcagtatgcccaaggcatcccctaccataagggcaatgacaagggtgatgagagccagagccagtcagtacggaccctattcctggagctaatccgagcccgccggcccctggtgctacacaatggccttatagacttggtgttcctgtaccagaacttctatgcacacctccctgagagtctgggaaccttcaccgctgacctgtgtgagatgttcccagcaggcatttatgacaccaaatatgctgctgagtttcatgcccgtttcgtggcctcctacttagaatatgccttccggaaatggcagtgttttaggtgctgaggattcagcagtgaacaaaacagaccacaaaaccctgctcttatggagcttatatgctagtggaccattaccctcttgcgctgttgcagtgaacgggaaaatggga

SEQ ID NO: 14581 - DNA, 2804 bp, Homo sapiens
actgcctgaaccgcgccaggagacggaccgcaagtccagcgtacccacagacgactcaggcgggagacgagcggtgtcatggccgccgacagtgacgatggcgcagtttcagctcccgcagcttccgacggtgagcggcttcccagaggtagccttcaaagcctctgcgctctgggagaggggaaggcctcgggctcatagttctagaggctcctcaagcttcagaggactgctccttccgcctgaactagccacgaggagactacaagttccgttgtacaccgcggctccggctgcaaaagcctggagcgttgggagcatggggctgatggaggcatggcgggagatgtagtctggagctcataacggttagtagtaatagttgtgattcagttcagtggagtggattgagcgttgtgatccaaaggaaggtaggacgtattgggagctctggtgtggggcactgccaggctctggggcttactgggagctgttgcttgtggcgctggggcaccatgagaacagtagtatggatccctgtgggatattaagggagctgagatcctcaagccctacaaaatgtttcctgcaggacatgggaaaaaagaatcaaaggtcgtctagtccaactttctcctctacagattgtgaaagcgaggtgggaagtaatttacccaggctcatacaagccagtagaagactcaggcttcctctccccaaattcagggcattctccactccaaggcctgtgtgtagaacacgtgggttacaaaggcttgtgggaaaagctaccaatggaaactaccccccttaccaccatcaccgtggcctagcttggtgtctgttcccctgggctctttccttaagcatgaacatccatcaccctcctaacccccaggtggtgtcagcaaaagcacaacatctggggaggagctagtagtccaggttcccgtagtggatgtgcaaagcaacaacttcaaggagatgtggccatccctcctgctagccataaagacagctaatttcgtggctgtggacacggtgagagttgggaaacaaggagggcaggtggttgtgaaggggctggtgctagaggcctgtcacaactctccctttacctacccacaggagctgagtgggcttggggacaggaagagtttgctgaaccagtaagtataagcccttttctctttagtgccagccctcaactgtggagtgggggggtcacagacctgggtggtttgggtccttcataaggctaactcctagccacagcaacccccatacccaaccccaaggtgcattgaggaacgttacaaggccgtgtgtcatgctgccaggacccgttctatcctttccctgggcctcgcctgcttcaagcggcagccagacaaggtatgagctgatctcaccccaatcctaggtgtggctgtggggtggagggtagagagattctagggaacatcagataggaagcatttctctcccaaatctttttttttgacttgatagtttttttttttttatttgaataggtttatggggaacaggtggtgtttggttaaatgagtaagttctttagtggcaatttctgagattttggtgcacctatcacccagtgtacactgtgcccaatgcgtagtcttttatccctcacctgcctccatcctttcccccctgagtccccagagtccattgtatcattcttaagcttttgcatcctcctagcttggctctctgaaatcttgatatagcagacttctctttctcccagggtgaacattcctatctggctcaagtgttcaatctcactctgctgtgcatggaggagtatgtcatagaaccaaagtctgtgcagttcctgatacagcatggcttcaacttcaaccagcagtatgcccaaggcatcccctaccataagggcaatgacaaggtaggcctctagcctccctagccttgagtctgccctttctgtgactttatttcttcctaccctaggctggatgtctggggagaatctgcttcttagggagtatggggaatcactagtgacagggcttgggaaacaagactggtatgaggagggtgggcagcattgggtaaggtagagagagagcgttccaagtggggaagtctgggataagtgcccagcagaagaggctccctgggggactctgtcctcctcattgacccctttactttcatctagggtgatgagagccagagccagtcagtacggaccctattcctggagctaatccgagcccgccggcccctggtgctacacaatggccttatagacttggtgttcctgtaccagaacttctatgcacacctccctgagagtctgggaaccttcaccgctgacctgtgtgagatgttcccagcaggcatttatgacaccaaatatgctgctgagtttcatgcccgtttcgtggcctcctacttagaatatgccttccggaaatggtgaggaaatggttgagggaaaggggtggggcctgatacgagtttatttcattcacttaagatatttattgagctcctaccatgtgcccaggcagtgttttaggtgctgaggattcagcagtgaacaaaacagaccacaaaaccctgctcttatggagcttatatgctagtggaccattaccctcttgcgctgttgcagtgaacgggaaaatgggaagcagcgggcagctggcagcccacaccttaccctggagttctgcaactatccttccagcatgagggaccatattgattaccgctgctgcctgcccccagcaacccaccgtcctcatccc

SEQ ID NO: 14582 - DNA, 1074 bp, Homo sapiens
actgcctgaaccgcgccaggagacggaccgcaagtccagcgtacccacagacgactcaggcgggagacgagcggtgtcatggccgccgacagtgacgatggcgcagtttcagctcccgcagcttccgacggtggtgtcagcaaaagcacaacatctggggaggagctagtagtccaggttcccgtagtggatgtgcaaagcaacaacttcaaggagatgtggccatccctcctgctagccataaagacagctaatttcgtggctgtggacacggagctgagtgggcttggggacaggaagagtttgctgaaccagtgcattgaggaacgttacaaggccgtgtgtcatgctgccaggacccgttctatcctttccctgggcctcgcctgcttcaagcggcagccagacaagggtgaacattcctatctggctcaagtgttcaatctcactctgctgtgcatggaggagtatgtcatagaaccaaagtctgtgcagttcctgatacagcatggcttcaacttcaaccagcagtatgcccaaggcatcccctaccataagggcaatgacaagggtgatgagagccagagccagtcagtacggaccctattcctggagctaatccgagcccgccggcccctggtgctacacaatggccttatagacttggtgttcctgtaccagaacttctatgcacacctccctgagagtctgggaaccttcaccgctgacctgtgtgagatgttcccagcaggcatttatgacaccaaatatgctgctgagtttcatgcccgtttcgtggcctcctacttagaatatgccttccggaaatggcagtgttttaggtgctgaggattcagcagtgaacaaaacagaccacaaaaccctgctcttatggagcttatatgctagtggaccattaccctcttgcgctgttgcagtgaacgggaaaatgggaagcagcgggcagctggcagcccacaccttaccctggagttctgcaactatccttccagcatgagggaccatattgattaccgctgctgcctgcccccagcaacccaccgtcctcatccc

SEQ ID NO: 14583 - DNA, 2710 bp, Homo sapiens
cggcagcacaggccaataggcaattagcgcgcgccaggctgccttccccgcgccggacccgggacgtctgaacggaagttcgacccatcggcgacccgacggcgagaccccgccccatccccgactgcctgaaccgcgccaggagacggaccgcaagtccagcgtacccacagacgactcaggcgggagacgagcggtgtcatggccgccgacagtgacgatggcgcagtttcagctcccgcagcttccgacggtgagcggcttcccagaggtagccttcaaagcctctgcgctctgggagaggggaaggcctcgggctcatagttctagaggctcctcaagcttcagaggactgctccttccgcctgaactagccacgaggagactacaagttccgttgtacaccgcggctccggctgcaaaagcctggagcgttgggagcatggggctgatggaggcatggcgggagatgtagtctggagctcataacggttagtagtaatagttgtgattcagttcagtggagtggattgagcgttgtgatccaaaggaaggtaggacgtattgggagctctggtgtggggcactgccaggctctggggcttactgggagctgttgcttgtggcgctggggcaccatgagaacagtagtatggatccctgtgggatattaagggagctgagatcctcaagccctacaaaatgtttcctgcaggacatgggaaaaaagaatcaaaggtcgtctagtccaactttctcctctacagattgtgaaagcgaggtgggaagtaatttacccaggctcatacaagccagtagaagactcaggcttcctctccccaaattcagggcattctccactccaaggcctgtgtgtagaacacgtgggttacaaaggcttgtgggaaaagctaccaatggaaactaccccccttaccaccatcaccgtggcctagcttggtgtctgttcccctgggctctttccttaagcatgaacatccatcaccctcctaacccccaggtggtgtcagcaaaagcacaacatctggggaggagctagtagtccaggttcccgtagtggatgtgcaaagcaacaacttcaaggagatgtggccatccctcctgctagccataaagacagctaatttcgtggctgtggacacggtgagagttgggaaacaaggagggcaggtggttgtgaaggggctggtgctagaggcctgtcacaactctccctttacctacccacaggagctgagtgggcttggggacaggaagagtttgctgaaccagtaagtataagcccttttctctttagtgccagccctcaactgtggagtgggggggtcacagacctgggtggtttgggtccttcataaggctaactcctagccacagcaacccccatacccaaccccaaggtgcattgaggaacgttacaaggccgtgtgtcatgctgccaggacccgttctatcctttccctgggcctcgcctgcttcaagcggcagccagacaaggtatgagctgatctcaccccaatcctaggtgtggctgtggggtggagggtagagagattctagggaacatcagataggaagcatttctctcccaaatctttttttttgacttgatagtttttttttttttatttgaataggtttatggggaacaggtggtgtttggttaaatgagtaagttctttagtggcaatttctgagattttggtgcacctatcacccagtgtacactgtgcccaatgcgtagtcttttatccctcacctgcctccatcctttcccccctgagtccccagagtccattgtatcattcttaagcttttgcatcctcctagcttggctctctgaaatcttgatatagcagacttctctttctcccagggtgaacattcctatctggctcaagtgttcaatctcactctgctgtgcatggaggagtatgtcatagaaccaaagtctgtgcagttcctgatacagcatggcttcaacttcaaccagcagtatgcccaaggcatcccctaccataagggcaatgacaaggtaggcctctagcctccctagccttgagtctgccctttctgtgactttatttcttcctaccctaggctggatgtctggggagaatctgcttcttagggagtatggggaatcactagtgacagggcttgggaaacaagactggtatgaggagggtgggcagcattgggtaaggtagagagagagcgttccaagtggggaagtctgggataagtgcccagcagaagaggctccctgggggactctgtcctcctcattgacccctttactttcatctagggtgatgagagccagagccagtcagtacggaccctattcctggagctaatccgagcccgccggcccctggtgctacacaatggccttatagacttggtgttcctgtaccagaacttctatgcacacctccctgagagtctgggaaccttcaccgctgacctgtgtgagatgttcccagcaggcatttatgacaccaaatatgctgctgagtttcatgcccgtttcgtggcctcctacttagaatatgccttccggaaatggtgaggaaatggttgagggaaaggggtggggcctgatacgagtttatttcattcacttaagatatttattgagctcctaccatgtgcccaggcagtgttttaggtgctgaggattcag

SEQ ID NO: 14584 - DNA, 994 bp, Homo sapiens
cggcagcacaggccaataggcaattagcgcgcgccaggctgccttccccgcgccggacccgggacgtctgaacggaagttcgacccatcggcgacccgacggcgagaccccgccccatccccgactgcctgaaccgcgccaggagacggaccgcaagtccagcgtacccacagacgactcaggcgggagacgagcggtgtcatggccgccgacagtgacgatggcgcagtttcagctcccgcagcttccgacggtgagcggcttcccagaggtggtgtcagcaaaagcacaacatctggggaggagctagtagtccaggttcccgtagtggatgtgcaaagcaacaacttcaaggagatgtggccatccctcctgctagccataaagacagctaatttcgtggctgtggacacggagctgagtgggcttggggacaggaagagtttgctgaaccagtgcattgaggaacgttacaaggccgtgtgtcatgctgccaggacccgttctatcctttccctgggcctcgcctgcttcaagcggcagccagacaagggtgaacattcctatctggctcaagtgttcaatctcactctgctgtgcatggaggagtatgtcatagaaccaaagtctgtgcagttcctgatacagcatggcttcaacttcaaccagcagtatgcccaaggcatcccctaccataagggcaatgacaagggtgatgagagccagagccagtcagtacggaccctattcctggagctaatccgagcccgccggcccctggtgctacacaatggccttatagacttggtgttcctgtaccagaacttctatgcacacctccctgagagtctgggaaccttcaccgctgacctgtgtgagatgttcccagcaggcatttatgacaccaaatatgctgctgagtttcatgcccgtttcgtggcctcctacttagaatatgccttccggaaatgtgttttaggtgctgaggattcag

SEQ ID NO: 14585 - DNA, 3744 bp, Homo sapiens
acagacgactcaggcgggagacgagcggtgtcatggccgccgacagtgacgatggcgcagtttcagctcccgcagcttccgacggtgagcggcttcccagaggtagccttcaaagcctctgcgctctgggagaggggaaggcctcgggctcatagttctagaggctcctcaagcttcagaggactgctccttccgcctgaactagccacgaggagactacaagttccgttgtacaccgcggctccggctgcaaaagcctggagcgttgggagcatggggctgatggaggcatggcgggagatgtagtctggagctcataacggttagtagtaatagttgtgattcagttcagtggagtggattgagcgttgtgatccaaaggaaggtaggacgtattgggagctctggtgtggggcactgccaggctctggggcttactgggagctgttgcttgtggcgctggggcaccatgagaacagtagtatggatccctgtgggatattaagggagctgagatcctcaagccctacaaaatgtttcctgcaggacatgggaaaaaagaatcaaaggtcgtctagtccaactttctcctctacagattgtgaaagcgaggtgggaagtaatttacccaggctcatacaagccagtagaagactcaggcttcctctccccaaattcagggcattctccactccaaggcctgtgtgtagaacacgtgggttacaaaggcttgtgggaaaagctaccaatggaaactaccccccttaccaccatcaccgtggcctagcttggtgtctgttcccctgggctctttccttaagcatgaacatccatcaccctcctaacccccaggtggtgtcagcaaaagcacaacatctggggaggagctagtagtccaggttcccgtagtggatgtgcaaagcaacaacttcaaggagatgtggccatccctcctgctagccataaagacagctaatttcgtggctgtggacacggtgagagttgggaaacaaggagggcaggtggttgtgaaggggctggtgctagaggcctgtcacaactctccctttacctacccacaggagctgagtgggcttggggacaggaagagtttgctgaaccagtaagtataagcccttttctctttagtgccagccctcaactgtggagtgggggggtcacagacctgggtggtttgggtccttcataaggctaactcctagccacagcaacccccatacccaaccccaaggtgcattgaggaacgttacaaggccgtgtgtcatgctgccaggacccgttctatcctttccctgggcctcgcctgcttcaagcggcagccagacaaggtatgagctgatctcaccccaatcctaggtgtggctgtggggtggagggtagagagattctagggaacatcagataggaagcatttctctcccaaatctttttttttgacttgatagtttttttttttttatttgaataggtttatggggaacaggtggtgtttggttaaatgagtaagttctttagtggcaatttctgagattttggtgcacctatcacccagtgtacactgtgcccaatgcgtagtcttttatccctcacctgcctccatcctttcccccctgagtccccagagtccattgtatcattcttaagcttttgcatcctcctagcttggctctctgaaatcttgatatagcagacttctctttctcccagggtgaacattcctatctggctcaagtgttcaatctcactctgctgtgcatggaggagtatgtcatagaaccaaagtctgtgcagttcctgatacagcatggcttcaacttcaaccagcagtatgcccaaggcatcccctaccataagggcaatgacaaggtaggcctctagcctccctagccttgagtctgccctttctgtgactttatttcttcctaccctaggctggatgtctggggagaatctgcttcttagggagtatggggaatcactagtgacagggcttgggaaacaagactggtatgaggagggtgggcagcattgggtaaggtagagagagagcgttccaagtggggaagtctgggataagtgcccagcagaagaggctccctgggggactctgtcctcctcattgacccctttactttcatctagggtgatgagagccagagccagtcagtacggaccctattcctggagctaatccgagcccgccggcccctggtgctacacaatggccttatagacttggtgttcctgtaccagaacttctatgcacacctccctgagagtctgggaaccttcaccgctgacctgtgtgagatgttcccagcaggcatttatgacaccaaatatgctgctgagtttcatgcccgtttcgtggcctcctacttagaatatgccttccggaaatggtgaggaaatggttgagggaaaggggtggggcctgatacgagtttatttcattcacttaagatatttattgagctcctaccatgtgcccaggcagtgttttaggtgctgaggattcagcagtgaacaaaacagaccacaaaaccctgctcttatggagcttatatgctagtggaccattaccctcttgcgctgttgcagtgaacgggaaaatgggaagcagcgggcagctggcagcccacaccttaccctggagttctgcaactatccttccagcatgagggaccatattgattaccgctgctgcctgcccccagcaacccaccgtcctcatcccaccagcatctgtgacaacttctcggtgagagcacccacctgtttcttgggagggaaggttctgatgcctggagcctctttctaagcctctttcccacccctaggcttatggctggtgccccctgggaccacagtgtcctcagtctcacgatattgaccttatcattgacactgatgaggctgcggcagaggacaagcggcgacggcgacgacgtagggaaaaacggaagagggctttattgaacctaccggggacacagacctctggggaagctaaggatggtcctcccaagaagcaggtctgtggggatagcatcaagcctgaagaaaccgagcaggaggtggctgccgatgaaactaggaacctgcctcactccaagcaaggcaacaaaaatgacttagagatggggattaaggcagcaaggcctgaaatagctgatagagctacctcagaagtgccagggagccaagccagtcctaacccagtgcctggggatggattgcaccgggctggttttgatgcctttatgacaggttatgtgatggcctatgtggaagtgagccagggaccgcagccctgcagctctggaccctggctccctgaatgccacaataaggtatatttgagtggcaaagctgtacccctcacagtggccaagagccagttctctcgttcctccaaagcccacaatcagaagatgaagctcacttggggcagtagctgatgcaacttccaccttgctctcaggtggaacagaggtattttgggtctctctagcctgaaatgtcatcctcaactgctactgagtttaggggagggggaatgtcttgacagacatcactgcattgccctggaccgcctcctttatcccagtgtttgaggtacaagtaagaaggctgaccagcacctgtaacactgactttatttttaagtctgaaaatgtcttgggaaagttttacaaaaaaaaaaatcaacagaagcaagtt

SEQ ID NO: 14586 - DNA, 2173 bp, Homo sapiens
acagacgactcaggcgggagacgagcggtgtcatggccgccgacagtgacgatggcgcagtttcagctcccgcagcttccgacggtgagcggcttcccagaggtagccttcaaagcctctgcgctctgggagaggggaaggcctcgggctcatagttctagaggctcctcaagcttcagaggactgctccttccgcctgaactagccacgaggagactacaagttccgttgtacaccgcggctccggctgcaaaagcctggagcgttgggagcatggggctgatggaggcatggcgggagatgtagtctggagctcataacggtggtgtcagcaaaagcacaacatctggggaggagctagtagtccaggttcccgtagtggatgtgcaaagcaacaacttcaaggagatgtggccatccctcctgctagccataaagacagctaatttcgtggctgtggacacggagctgagtgggcttggggacaggaagagtttgctgaaccagtgcattgaggaacgttacaaggccgtgtgtcatgctgccaggacccgttctatcctttccctgggcctcgcctgcttcaagcggcagccagacaagggtgaacattcctatctggctcaagtgttcaatctcactctgctgtgcatggaggagtatgtcatagaaccaaagtctgtgcagttcctgatacagcatggcttcaacttcaaccagcagtatgcccaaggcatcccctaccataagggcaatgacaagggtgatgagagccagagccagtcagtacggaccctattcctggagctaatccgagcccgccggcccctggtgctacacaatggccttatagacttggtgttcctgtaccagaacttctatgcacacctccctgagagtctgggaaccttcaccgctgacctgtgtgagatgttcccagcaggcatttatgacaccaaatatgctgctgagtttcatgcccgtttcgtggcctcctacttagaatatgccttccggaaatggcagtgttttaggtgctgaggattcagcagtgaacaaaacagaccacaaaaccctgctcttatggagcttatatgctagtggaccattaccctcttgcgctgttgcagtgaacgggaaaatgggaagcagcgggcagctggcagcccacaccttaccctggagttctgcaactatccttccagcatgagggaccatattgattaccgctgctgcctgcccccagcaacccaccgtcctcatcccaccagcatctgtgacaacttctcggcttatggctggtgccccctgggaccacagtgtcctcagtctcacgatattgaccttatcattgacactgatgaggctgcggcagaggacaagcggcgacggcgacgacgtagggaaaaacggaagagggctttattgaacctaccggggacacagacctctggggaagctaaggatggtcctcccaagaagcaggtctgtggggatagcatcaagcctgaagaaaccgagcaggaggtggctgccgatgaaactaggaacctgcctcactccaagcaaggcaacaaaaatgacttagagatggggattaaggcagcaaggcctgaaatagctgatagagctacctcagaagtgccagggagccaagccagtcctaacccagtgcctggggatggattgcaccgggctggttttgatgcctttatgacaggttatgtgatggcctatgtggaagtgagccagggaccgcagccctgcagctctggaccctggctccctgaatgccacaataaggtatatttgagtggcaaagctgtacccctcacagtggccaagagccagttctctcgttcctccaaagcccacaatcagaagatgaagctcacttggggcagtagctgatgcaacttccaccttgctctcaggtggaacagaggtattttgggtctctctagcctgaaatgtcatcctcaactgctactgagtttaggggagggggaatgtcttgacagacatcactgcattgccctggaccgcctcctttatcccagtgtttgaggtacaagtaagaaggctgaccagcacctgtaacactgactttatttttaagtctgaaaatgtcttgggaaagttttacaaaaaaaaaaatcaacagaagcaagtt

SEQ ID NO: 14587 - DNA, 8098 bp, Homo sapiens
agtggcttctgcgggcttcgaggagcgggatgttgcgggctgggtggctccggggcgcggcggcgctggcgctgctgctggcggcccgagtggtggcggcgttcgagcccatcaccgtgggcctagccatcggggccgcgtcggccatcaccggctacctgtcctacaatgacatctactgccgcttcgccgagtgctgccgcgaggagcggccgctcaacgcttcgggtacggcgcgcgcgcgagctgtgggtcggcgctgcggggggcgcgggggcgcgggggcgcggagggacggcctcgtgggcgcctggcacggaccgggcccgtggcatctagacggcggtggtcccagctggggtgggcggggagcggatggggcggccccggaaccgttcgcgggaacgcagaagcggtgccttcgcaaacagtctccagatcgtggggctgccccagcgcctttctaaagctcccgttccttgggatcacaggtggaagaaacggaaagtaggcgggcggcccttctgcgccctgccaaccctattaagtagttttcagacgtgctgcgtcgcccagaaagcccacatttggcccctggttttcctgcaggtcagcaagggtggctgggattagcaagcgctcagtcaagcgatggttcatctctgaatgaatgaacatttagcttccttatcagaccccgaagcgttaaggacctccacataatcttgaaagtggcatcgtttgactgcctcggccctagggtgtggcagacaccctgctgtgtccctggataatctgtgcttcttgctttggccagctaagaaagtgctgcgttgctgatgcatttttaaggtctgtttctctctttgttctggggctgttcttgcagctctcaagctggatttggaggagaagctgtttggacagcatctagccacggaagtgattttcaaggcgctgactggcttcaggaacaacaaaaatcccaagaaaccactgaccctttccttacacggctgggctggcacaggcaagaattttgtcagtcaaattgtggctgaaaatcttcacccaaaaggtctgaagagtaactttgtccacctgtttgtatcgactctgcacttccctcatgagcagaagataaaactgtaccaggcaagagaacccgctattatctcgtctgcaggccagtcggactggtccgggtgacctgctcactaactctggcctctgcttctctttcctttgtgttgctgtagcccccggctccactgagttaaggcacacttagtccaggtagttacaaagctctcctacaacatttctcttacttggttccaaaacagtccagtggggtaggggatgttatttccattaaaagatggggagccaagggcctggcgccgtggctcacgcctgtaatcccagcattttggggaagccgaggcgggcggatcatttgaggccaggagtttgagaccagcctggccaacatggtgaaaccccatctctacctaaaagtaccaaaattacctgagcacggtggcacgcacctgtaatcccagctacttgggaggctgaggcaggagaatcgcttgaacctgggtggcagaggttgcagtgagctgagatcgcgccaccgtactcggtctcaaaaaaaaaaaaaaaaaaaaggcctggcacagtggctcacgcctgtaatcccagcactttcggaggccgaggggggcggatcacgaggtcaggagatggagaccatcctggctaacacggtgagaccccgtctctactaaaaatacaaaaaattagccggggatggtggcgggcacctgttgtcccagctactcgggaggctgaggcaggagaatggcctgaacccgggaggcggagcttgcactgagccgagatcgcgccactgcactccagcctgggcgacacagtgagactctgtctcagaaaaaaaaaaaaaaaagagagatgtagtcagggccaggtgcagtggctcacgcctgtaatcccagcactttgggatccgccaaggcgggcggatcacctgaggtcgggagttcgagaccagcctgaccaacatggagaaaccccgtctctactgaaaatacaaaattagccgggcgtgatggcgtgcgcctgtaattcaagctacttgggaggctgaggttgcagtcagctgagaatgggccactgcaccccagcctgggcaacagaatgagactctgtctcaaaaaaaaagaaaaaaaaaaaagatggagcctggagcccagaggcaaggtgacttactcctacaatctttgtagcagaacaggacctttgtagcagaaccaaaacctcccaactcccagttgacatggtagccaccttctctggtgagtgaagggattccacatccccagcagtgcagttggtgagaaggggcagtcagtcttcaaggatttgctccggtgtggcttcattcaatgctgcccacctctggtgcagcctcagctttgcctctgctctttgcaatgtagcctagaggtcttttttctccttaacaggttttattccctttgttcctcccatccttcatgtccttggcattgctttcttcaaaggaagcctcaaagaactgaaccttgagactgtttctccttttgagatattgtttccacattcattttatattaagttgtctaggagggttagttctcatttaaatgaatgttgtccttgtcaaggttaacattcccactggcaacatagcaagactccatctctacaaaaaataaaaaaattagccaggtgtagtggcatgcacctgtagtcccagctacttgggaggctgagatgggaggatcgcttgagcccgggaggctgagcctacaatgaaccatggtcatgtcactgcattccagtctgggcgacagagtaagactctatctcaaaaaaaaaaaaaaaaaattcctcctgttaggtggggactgaagaaagaaatagaaacttaactgaacaaggaagtagaagtgtttgcccaacaaactgacgtgagacagggaagactgctaaaaaggaaggaaggaaggattttcttgttctttacattcttcataaatctccggaaacagagtaatataaatggttgagggcatgtctgggggagtttcctggtatagcctttcacgctttggggttgagggcttgttgcttgagtgtctttatgtttgtttgaagaaaacatctggaacagatgcttttcatgaaatgtcattgagtcagctctgttggtctggggcactgtgtactgtgcaggtcttgatctagttccttattcctcagtatgtctgatagtactaacttgagattgtagtccaagagagatgaaaactatggctacgttagcagtgaatgatattcacggatcttgccgggtggctcattcctgtaatctcagcactttgggagggtgaggtgggtggatcacctgaggtcaggagtttgagacgagcctggccaacatggcacaaccctgtctctactaaaaatacaaaaattagccaggcatggtgcaggggatcggggcgcctgtagtcccaactacacggggggctgaggccggggaatcgcttgaacccaagaggcagaggttgcagtgagctgagatcacgccactacacaccagcctgggggatagagtgagaccctgtttccaaagacaaaaaagagaagaaaagaatcacggatcttgtacctcttatacctttaaaaagtcagatttaatagtcatttgagttaggaaaaaacttctctgcattttagcatctatctctgccaatttccactttttagagataaggttttagaaaagctgctacctagcgagtgggggtgagggtgccattctaagagctctgacctcgtccttcagtgcatgaggagcagatggagcctgcgcgcctcttggtgcaccctttgagcttcgcatcctgtttcttctttcatggttggtccaggaccagttacagaagtggatccgcggtaatgtgagtgcatgtgcgaactctgttttcatatttgacgagatggataaattgcaccccgggatcattgacgcaatcaagccgtttctagactactacgagcaggttgacggagtgtcttaccgcaaagccatcttcatctttctcaggtcagcgggaggcggttttttggggcacacaagcccttcattctctcaatgataaaatgaggtcctgaggaccatcagcactttgtttaccaggacgaaagtgcctgcttggcacaaggcacttacctactgctttacttttcctttgccagtctcagcatggcacacagtgtgggttgtggaaatgaactaaagaaataatcactgggccaggcgcggtggctcacacctgtaatcccagcactttgggaggccatggcgggcggatcaccaggagatcgagaccatcctggctaacatggtgaaaccctgtctctactaaaaatacaaaaattagccgggcgtggtggcgggcgcctgtagtcccatctactcgggagactgaggcaagagaatggcgtgaacccgggaggcggagcttgcagtgagccgggatcacaccactgcactccagcctgggtgacagagtgagactctgtctcaaaaaaaaaaaaaaaagaaataatcactgatagcaggcaattttagctgggcatcgtggcatgtgcctggagtcccagctcctggggaagtcgaggcaggaggattggttgagcccaggagttcaaggttttattgagctatgatcataccactgcactcctgcctgggtgacaatcaagaccccgaccctaaaaatgaaacagaaatgaaaacagttaattttattaactgtgcatgttggtttttagggttataaagggccatagcattatcccagctagttgtgaataaacactttaagttccatgagagcacacttttttgtctagtagcactcagtaaatattccttgatgaaaaatagatcttcggccgggtgtggtggctcacacctgtaatcctagcactttgggaggccaaggtgggcagatcacttgaggtcaggatttcaagaccaggctggccaacatggtgaaaccccgtgtctactaaaaatacaaaaattagaaggggcgtcgtggcaggcgcctgtaatcccagctactcaggaggttgaggcagaagaatcacttgaacccggaaggtggaggttgcagtgagctgatattgcgccactgcactccagcctgcgtgacagagtgtctcaaaaggaaaaatagacttagagcagattcatttcttggtaagacacagaagtctttttttttttttttttttttttgagaccgagtttcatttttgttgcccaggctggagtgcaatggcatgatctcggctcgctgcaacctccacctcccggattcaaacgattctcccacctcagcctcccatgtagctgggattacaggcatgcaccaccattagcctggctaatttttgtgtttttagtagagatggggttactctatgttggtcaggctggccttgaactcccgacctcaggtgatctacctgcctcggcctcccaaagtgctgggattacaggcatgagccaccacacccagcagacacagaagtcttaatatgtgattttaatctttatttctctggcaaactcagcaatgcaggcggggaccttataactaagacggctcttgacttttggcgggccggaagaaagagggaagacattcagctgaaggacctggaacctgtactgtctgtcggagtcttcaataataaacacagtgagtccaccagggtaaaggagccccttaactgtccagcagtgagccgtctgctctttcattgagtgtttcacaaagccacaggatcccactggatttcctcactttgctaaagtcaggaattttcttagggcatactgtgctagaaaccagtgagtgagtgtccagctgagtcctgcatgggcttgttgcacactgacaagagactctctcaaggggtacggacatgaggaatgtgctgagggtcgggactggagcttggccaggtggcggtggtggcaggaaacccagctgtgtcttgttctgcaggtggcctgtggcacagtggactgatcgacaaaaacctcattgattactttatccccttcctgcctttggagtacagacatgtgaaaatgtgtgtgagggccgagatgagggcccgtggttctgccatagatgaagacattgtcacaagagtggcagaggaaatgacgtttttccccagagacgagaaaatctactcagacaagggctgcaagactgtgcagtcgcggctggatttccactgagctcctatccagatggggtaggagacagctgggaggctccgcacgccagaggccttgcctttcagaagaaccctgaagaccgctttggggttttgcctgtttgcaccttagacttttgggtatagaatcttttttttgagaagaggtctcactccgtcatccaagctggagtgcagtggtgcaatcctcaactcactgcaacctccgctcccggtttgagtgattctcatgcctcagcctcccgagtagctgggattacaggcatgagccactgtgcccagctgggatatagaatctaagagttgattgtggaaaacacgtgaatctattgcgcgcatttgtcatttagcaagatggcagcagtccagctgttctttgcagctggagatgaacttttaaaaatccccttcacacttaatgtactgaccgagacagaagtacctgaaaacagctgtgcatggcaggcccggcaatagcttctgacccacagcacccgcgcctcagaagctacggtcacaactaaaggagtccagggacttgctgcaggctggggggcactgggtggttctcaccagcaggctgcggggcactgtgttctcattggccaaaaacatccttttgctctgtctcgttctttacacagagttcactgacttgaagtatactcagttaaaatcggggctggaggtgcagacggtgtctgaccggaggatgtggccgtgcccgccgagcactcttgatctgagctgacctgtgtgtgtgtgtgtgggggggtggggccttcacctaagacctctgcagcagacctggacagacaggcccctcccgcctgtccatcgctctagctgctaatacagccctggctgtggaatccttcaccgtctcagctggtatcagccccagcctgccttgtgccatatctcagcttggatctctgctagagtccccccaaccatatatcatagagttgaatcacaatgagaccgttggctttgaatttgagtcgttggttcccatggtgagatgcttgttaagactttatacttgggtcaatctctcactttattttgtagaaccatttgaaatcctaggatgtgcttgttctggaaggatgacatgggcccagactgaacaagtcagcttgatgatcttaaatgatggaagtataggacgttgcttattttaaaacaagggaaggacacaaaatggaatgactgcttagtcctttctcagatactcttaaaacaattttttattgttaaatttgtggtaatacatggtcacaaccgtggatcaaacaaggtcagtctaaagtggcaggtcctaggtgtgacctgataccaccaccctttgtggcagcaccgggctggactgccctgatccctgggacgtgagacttagcttccagccagtgtgaatcattgtatctgtctcataatcacagcacagctgcagacacaacaacgtgcagcattttttacataaaaatatggtagaattaatttatgacatggaaatgccttacgtggtatcacacttagtcttgaaaaaaacaccaaggtgacgtttaaaatttttagtacatatcctcaaattggagctaagttatacttcttttataaccttttgggcatctggtcgagagaagacaagattttctctatttacagtgaggcaataaatatgtttgccaccttt

SEQ ID NO: 14588 - DNA, 2738 bp, Homo sapiens
agtggcttctgcgggcttcgaggagcgggatgttgcgggctgggtggctccggggcgcggcggcgctggcgctgctgctggcggcccgagtggtggcggcgttcgagcccatcaccgtgggcctagccatcggggccgcgtcggccatcaccggctacctgtcctacaatgacatctactgccgcttcgccgagtgctgccgcgaggagcggccgctcaacgcttcggctctcaagctggatttggaggagaagctgtttggacagcatctagccacggaagtgattttcaaggcgctgactggcttcaggaacaacaaaaatcccaagaaaccactgaccctttccttacacggctgggctggcacaggcaagaattttgtcagtcaaattgtggctgaaaatcttcacccaaaaggtctgaagagtaactttgtccacctgtttgtatcgactctgcacttccctcatgagcagaagataaaactgtaccaggaccagttacagaagtggatccgcggtaatgtgagtgcatgtgcgaactctgttttcatatttgacgagatggataaattgcaccccgggatcattgacgcaatcaagccgtttctagactactacgagcaggttgacggagtgtcttaccgcaaagccatcttcatctttctcagcaatgcaggcggggaccttataactaagacggctcttgacttttggcgggccggaagaaagagggaagacattcagctgaaggacctggaacctgtactgtctgtcggagtcttcaataataaacacagtggcctgtggcacagtggactgatcgacaaaaacctcattgattactttatccccttcctgcctttggagtacagacatgtgaaaatgtgtgtgagggccgagatgagggcccgtggttctgccatagatgaagacattgtcacaagagtggcagaggaaatgacgtttttccccagagacgagaaaatctactcagacaagggctgcaagactgtgcagtcgcggctggatttccactgagctcctatccagatggggtaggagacagctgggaggctccgcacgccagaggccttgcctttcagaagaaccctgaagaccgctttggggttttgcctgtttgcaccttagacttttgggtatagaatcttttttttgagaagaggtctcactccgtcatccaagctggagtgcagtggtgcaatcctcaactcactgcaacctccgctcccggtttgagtgattctcatgcctcagcctcccgagtagctgggattacaggcatgagccactgtgcccagctgggatatagaatctaagagttgattgtggaaaacacgtgaatctattgcgcgcatttgtcatttagcaagatggcagcagtccagctgttctttgcagctggagatgaacttttaaaaatccccttcacacttaatgtactgaccgagacagaagtacctgaaaacagctgtgcatggcaggcccggcaatagcttctgacccacagcacccgcgcctcagaagctacggtcacaactaaaggagtccagggacttgctgcaggctggggggcactgggtggttctcaccagcaggctgcggggcactgtgttctcattggccaaaaacatccttttgctctgtctcgttctttacacagagttcactgacttgaagtatactcagttaaaatcggggctggaggtgcagacggtgtctgaccggaggatgtggccgtgcccgccgagcactcttgatctgagctgacctgtgtgtgtgtgtgtgggggggtggggccttcacctaagacctctgcagcagacctggacagacaggcccctcccgcctgtccatcgctctagctgctaatacagccctggctgtggaatccttcaccgtctcagctggtatcagccccagcctgccttgtgccatatctcagcttggatctctgctagagtccccccaaccatatatcatagagttgaatcacaatgagaccgttggctttgaatttgagtcgttggttcccatggtgagatgcttgttaagactttatacttgggtcaatctctcactttattttgtagaaccatttgaaatcctaggatgtgcttgttctggaaggatgacatgggcccagactgaacaagtcagcttgatgatcttaaatgatggaagtataggacgttgcttattttaaaacaagggaaggacacaaaatggaatgactgcttagtcctttctcagatactcttaaaacaattttttattgttaaatttgtggtaatacatggtcacaaccgtggatcaaacaaggtcagtctaaagtggcaggtcctaggtgtgacctgataccaccaccctttgtggcagcaccgggctggactgccctgatccctgggacgtgagacttagcttccagccagtgtgaatcattgtatctgtctcataatcacagcacagctgcagacacaacaacgtgcagcattttttacataaaaatatggtagaattaatttatgacatggaaatgccttacgtggtatcacacttagtcttgaaaaaaacaccaaggtgacgtttaaaatttttagtacatatcctcaaattggagctaagttatacttcttttataaccttttgggcatctggtcgagagaagacaagattttctctatttacagtgaggcaataaatatgtttgccaccttt

SEQ ID NO: 14589 - DNA, 7251 bp, Homo sapiens
cccgagtggtggcggcgttcgagcccatcaccgtgggcctagccatcggggccgcgtcggccatcaccggctacctgtcctacaatgacatctactgccgcttcgccgagtgctgccgcgaggagcggccgctcaacgcttcgggtacggcgcgcgcgcgagctgtgggtcggcgctgcggggggcgcgggggcgcgggggcgcggagggacggcctcgtgggcgcctggcacggaccgggcccgtggcatctagacggcggtggtcccagctggggtgggcggggagcggatggggcggccccggaaccgttcgcgggaacgcagaagcggtgccttcgcaaacagtctccagatcgtggggctgccccagcgcctttctaaagctcccgttccttgggatcacaggtggaagaaacggaaagtaggcgggcggcccttctgcgccctgccaaccctattaagtagttttcagacgtgctgcgtcgcccagaaagcccacatttggcccctggttttcctgcaggtcagcaagggtggctgggattagcaagcgctcagtcaagcgatggttcatctctgaatgaatgaacatttagcttccttatcagaccccgaagcgttaaggacctccacataatcttgaaagtggcatcgtttgactgcctcggccctagggtgtggcagacaccctgctgtgtccctggataatctgtgcttcttgctttggccagctaagaaagtgctgcgttgctgatgcatttttaaggtctgtttctctctttgttctggggctgttcttgcagctctcaagctggatttggaggagaagctgtttggacagcatctagccacggaagtgattttcaaggcgctgactggcttcaggaacaacaaaaatcccaagaaaccactgaccctttccttacacggctgggctggcacaggcaagaattttgtcagtcaaattgtggctgaaaatcttcacccaaaaggtctgaagagtaactttgtccacctgtttgtatcgactctgcacttccctcatgagcagaagataaaactgtaccaggcaagagaacccgctattatctcgtctgcaggccagtcggactggtccgggtgacctgctcactaactctggcctctgcttctctttcctttgtgttgctgtagcccccggctccactgagttaaggcacacttagtccaggtagttacaaagctctcctacaacatttctcttacttggttccaaaacagtccagtggggtaggggatgttatttccattaaaagatggggagccaagggcctggcgccgtggctcacgcctgtaatcccagcattttggggaagccgaggcgggcggatcatttgaggccaggagtttgagaccagcctggccaacatggtgaaaccccatctctacctaaaagtaccaaaattacctgagcacggtggcacgcacctgtaatcccagctacttgggaggctgaggcaggagaatcgcttgaacctgggtggcagaggttgcagtgagctgagatcgcgccaccgtactcggtctcaaaaaaaaaaaaaaaaaaaaggcctggcacagtggctcacgcctgtaatcccagcactttcggaggccgaggggggcggatcacgaggtcaggagatggagaccatcctggctaacacggtgagaccccgtctctactaaaaatacaaaaaattagccggggatggtggcgggcacctgttgtcccagctactcgggaggctgaggcaggagaatggcctgaacccgggaggcggagcttgcactgagccgagatcgcgccactgcactccagcctgggcgacacagtgagactctgtctcagaaaaaaaaaaaaaaaagagagatgtagtcagggccaggtgcagtggctcacgcctgtaatcccagcactttgggatccgccaaggcgggcggatcacctgaggtcgggagttcgagaccagcctgaccaacatggagaaaccccgtctctactgaaaatacaaaattagccgggcgtgatggcgtgcgcctgtaattcaagctacttgggaggctgaggttgcagtcagctgagaatgggccactgcaccccagcctgggcaacagaatgagactctgtctcaaaaaaaaagaaaaaaaaaaaagatggagcctggagcccagaggcaaggtgacttactcctacaatctttgtagcagaacaggacctttgtagcagaaccaaaacctcccaactcccagttgacatggtagccaccttctctggtgagtgaagggattccacatccccagcagtgcagttggtgagaaggggcagtcagtcttcaaggatttgctccggtgtggcttcattcaatgctgcccacctctggtgcagcctcagctttgcctctgctctttgcaatgtagcctagaggtcttttttctccttaacaggttttattccctttgttcctcccatccttcatgtccttggcattgctttcttcaaaggaagcctcaaagaactgaaccttgagactgtttctccttttgagatattgtttccacattcattttatattaagttgtctaggagggttagttctcatttaaatgaatgttgtccttgtcaaggttaacattcccactggcaacatagcaagactccatctctacaaaaaataaaaaaattagccaggtgtagtggcatgcacctgtagtcccagctacttgggaggctgagatgggaggatcgcttgagcccgggaggctgagcctacaatgaaccatggtcatgtcactgcattccagtctgggcgacagagtaagactctatctcaaaaaaaaaaaaaaaaaattcctcctgttaggtggggactgaagaaagaaatagaaacttaactgaacaaggaagtagaagtgtttgcccaacaaactgacgtgagacagggaagactgctaaaaaggaaggaaggaaggattttcttgttctttacattcttcataaatctccggaaacagagtaatataaatggttgagggcatgtctgggggagtttcctggtatagcctttcacgctttggggttgagggcttgttgcttgagtgtctttatgtttgtttgaagaaaacatctggaacagatgcttttcatgaaatgtcattgagtcagctctgttggtctggggcactgtgtactgtgcaggtcttgatctagttccttattcctcagtatgtctgatagtactaacttgagattgtagtccaagagagatgaaaactatggctacgttagcagtgaatgatattcacggatcttgccgggtggctcattcctgtaatctcagcactttgggagggtgaggtgggtggatcacctgaggtcaggagtttgagacgagcctggccaacatggcacaaccctgtctctactaaaaatacaaaaattagccaggcatggtgcaggggatcggggcgcctgtagtcccaactacacggggggctgaggccggggaatcgcttgaacccaagaggcagaggttgcagtgagctgagatcacgccactacacaccagcctgggggatagagtgagaccctgtttccaaagacaaaaaagagaagaaaagaatcacggatcttgtacctcttatacctttaaaaagtcagatttaatagtcatttgagttaggaaaaaacttctctgcattttagcatctatctctgccaatttccactttttagagataaggttttagaaaagctgctacctagcgagtgggggtgagggtgccattctaagagctctgacctcgtccttcagtgcatgaggagcagatggagcctgcgcgcctcttggtgcaccctttgagcttcgcatcctgtttcttctttcatggttggtccaggaccagttacagaagtggatccgcggtaatgtgagtgcatgtgcgaactctgttttcatatttgacgagatggataaattgcaccccgggatcattgacgcaatcaagccgtttctagactactacgagcaggttgacggagtgtcttaccgcaaagccatcttcatctttctcaggtcagcgggaggcggttttttggggcacacaagcccttcattctctcaatgataaaatgaggtcctgaggaccatcagcactttgtttaccaggacgaaagtgcctgcttggcacaaggcacttacctactgctttacttttcctttgccagtctcagcatggcacacagtgtgggttgtggaaatgaactaaagaaataatcactgggccaggcgcggtggctcacacctgtaatcccagcactttgggaggccatggcgggcggatcaccaggagatcgagaccatcctggctaacatggtgaaaccctgtctctactaaaaatacaaaaattagccgggcgtggtggcgggcgcctgtagtcccatctactcgggagactgaggcaagagaatggcgtgaacccgggaggcggagcttgcagtgagccgggatcacaccactgcactccagcctgggtgacagagtgagactctgtctcaaaaaaaaaaaaaaaagaaataatcactgatagcaggcaattttagctgggcatcgtggcatgtgcctggagtcccagctcctggggaagtcgaggcaggaggattggttgagcccaggagttcaaggttttattgagctatgatcataccactgcactcctgcctgggtgacaatcaagaccccgaccctaaaaatgaaacagaaatgaaaacagttaattttattaactgtgcatgttggtttttagggttataaagggccatagcattatcccagctagttgtgaataaacactttaagttccatgagagcacacttttttgtctagtagcactcagtaaatattccttgatgaaaaatagatcttcggccgggtgtggtggctcacacctgtaatcctagcactttgggaggccaaggtgggcagatcacttgaggtcaggatttcaagaccaggctggccaacatggtgaaaccccgtgtctactaaaaatacaaaaattagaaggggcgtcgtggcaggcgcctgtaatcccagctactcaggaggttgaggcagaagaatcacttgaacccggaaggtggaggttgcagtgagctgatattgcgccactgcactccagcctgcgtgacagagtgtctcaaaaggaaaaatagacttagagcagattcatttcttggtaagacacagaagtctttttttttttttttttttttttgagaccgagtttcatttttgttgcccaggctggagtgcaatggcatgatctcggctcgctgcaacctccacctcccggattcaaacgattctcccacctcagcctcccatgtagctgggattacaggcatgcaccaccattagcctggctaatttttgtgtttttagtagagatggggttactctatgttggtcaggctggccttgaactcccgacctcaggtgatctacctgcctcggcctcccaaagtgctgggattacaggcatgagccaccacacccagcagacacagaagtcttaatatgtgattttaatctttatttctctggcaaactcagcaatgcaggcggggaccttataactaagacggctcttgacttttggcgggccggaagaaagagggaagacattcagctgaaggacctggaacctgtactgtctgtcggagtcttcaataataaacacagtgagtccaccagggtaaaggagccccttaactgtccagcagtgagccgtctgctctttcattgagtgtttcacaaagccacaggatcccactggatttcctcactttgctaaagtcaggaattttcttagggcatactgtgctagaaaccagtgagtgagtgtccagctgagtcctgcatgggcttgttgcacactgacaagagactctctcaaggggtacggacatgaggaatgtgctgagggtcgggactggagcttggccaggtggcggtggtggcaggaaacccagctgtgtcttgttctgcaggtggcctgtggcacagtggactgatcgacaaaaacctcattgattactttatccccttcctgcctttggagtacagacatgtgaaaatgtgtgtgagggccgagatgagggcccgtggttctgccatagatgaagacattgtcacaagagtggcagaggaaatgacgtttttccccagagacgagaaaatctactcagacaagggctgcaagactgtgcagtcgcggctggatttccactgagctcctatccagatggggtaggagacagctgggaggctccgcacgccagaggccttgcctttcagaagaaccctgaagaccgctttggggttttgcctgtttgcaccttagacttttgggtatagaatcttttttttgagaagaggtctcactccgtcatccaagctggagtgcagtggtgcaatcctcaactcactgcaacctccgctcccggtttgagtgattctcatgcctcagcctcccgagtagctgggattacaggcatgagccactgtgcccagctgggatatagaatctaagagttgattgtggaaaacacgtgaatctattgcgcgcatttgtcatttagcaagatggcagcagtccagctgttctttgcagctggagatgaacttttaaaaatccccttcacacttaatgtactgaccgagacagaagtacctgaaaacagctgtgcatggcaggcccggcaatagcttctgacccacagcacccgcgcctcagaagctacggtcacaactaaaggagtccagggacttgctgcaggctggggggcactgggtggttctcaccagcaggctgcggggcactgtgttctcattggccaaaaacatccttttgctctgtctcgttctttacacagagttcactgacttgaagtatactcagttaaaatcggggctggaggtgcagacggtgtctgaccggaggatgtggccgtgcccgccgagcactcttgatctgagctgacctgtgtgtgtgtgtgtgggggggtggggccttcacctaagacctctgcagcagacctggacagacaggcccctcccgcctgtccatcgctctagctgctaatacagccctggctgtggaatccttcaccgtctcagctggtatcagccccagcctgccttgtgccatatctcagcttggatctc

SEQ ID NO: 14590 - DNA, 702 bp, Homo sapiens
cccgagtggtggcggcgttcgagcccatcaccgtgggcctagccatcggggccgcgtcggccatcaccggctacctgtcctacaatgacatctactgccgcttcgccgagtgctgccgcgaggagcggccgctcaacgcttcggctctcaagctggatttggaggagaagctgtttggacagcatctagccacggaagtgattttcaaggcgctgactggcttcaggaacaacaaaaatcccaagaaaccactgaccctttccttacacggctgggctggcacaggcaagaattttgtcagtcaaattgtggctgaaaatcttcacccaaaaggtctgaagagtaactttgtccacctgtttgtatcgactctgcacttccctcatgagcagaagataaaactgtaccagagttcactgacttgaagtatactcagttaaaatcggggctggaggtgcagacggtgtctgaccggaggatgtggccgtgcccgccgagcactcttgatctgagctgacctgtgtgtgtgtgtgtgggggggtggggccttcacctaagacctctgcagcagacctggacagacaggcccctcccgcctgtccatcgctctagctgctaatacagccctggctgtggaatccttcaccgtctcagctggtatcagccccagcctgccttgtgccatatctcagcttggatctc

SEQ ID NO: 14591 - DNA, 1324 bp, Homo sapiens
gccgcttggccgcggggcgcctggctcagtggcttctgcgggcttcgaggagcgggatgttgcgggctgggtggctccggggcgcggcggcgctggcgctgctgctggcggcccgagtggtggcggcgttcgagcccatcaccgtgggcctagccatcggggccgcgtcggccatcaccggctacctgtcctacaatgacatctactgccgcttcgccgagtgctgccgcgaggagcggccgctcaacgcttcgggtacggcgcgcgcgcgagctgtgggtcggcgctgcggggggcgcgggggcgcgggggcgcggagggacggcctcgtgggcgcctggcacggaccgggcccgtggcatctagacggcggtggtcccagctggggtgggcggggagcggatggggcggccccggaaccgttcgcgggaacgcagaagcggtgccttcgcaaacagtctccagatcgtggggctgccccagcgcctttctaaagctcccgttccttgggatcacaggtggaagaaacggaaagtaggcgggcggcccttctgcgccctgccaaccctattaagtagttttcagacgtgctgcgtcgcccagaaagcccacatttggcccctggttttcctgcaggtcagcaagggtggctgggattagcaagcgctcagtcaagcgatggttcatctctgaatgaatgaacatttagcttccttatcagaccccgaagcgttaaggacctccacataatcttgaaagtggcatcgtttgactgcctcggccctagggtgtggcagacaccctgctgtgtccctggataatctgtgcttcttgctttggccagctaagaaagtgctgcgttgctgatgcatttttaaggtctgtttctctctttgttctggggctgttcttgcagctctcaagctggatttggaggagaagctgtttggacagcatctagccacggaagtgattttcaaggcgctgactggcttcaggaacaacaaaaatcccaagaaaccactgaccctttccttacacggctgggctggcacaggcaagaattttgtcagtcaaattgtggctgaaaatcttcacccaaaaggtctgaagagtaactttgtccacctgtttgtatcgactctgcacttccctcatgagcagaagataaaactgtaccaggcaagagaacccgctattatctcgtctgcaggccagtcggactggtccgggtgacctgctcactaactctggcctctgcttctctttcctttgtgttgctgtagcccccggctccactgagttaaggcacacttagtccagg

SEQ ID NO: 14592 - DNA, 663 bp, Homo sapiens
gccgcttggccgcggggcgcctggctcagtggcttctgcgggcttcgaggagcgggatgttgcgggctgggtggctccggggcgcggcggcgctggcgctgctgctggcggcccgagtggtggcggcgttcgagcccatcaccgtgggcctagccatcggggccgcgtcggccatcaccggctacctgtcctacaatgacatctactgccgcttcgccgagtgctgccgcgaggagcggccgctcaacgcttcggctctcaagctggatttggaggagaagctgtttggacagcatctagccacggaagtgattttcaaggcgctgactggcttcaggaacaacaaaaatcccaagaaaccactgaccctttccttacacggctgggctggcacaggcaagaattttgtcagtcaaattgtggctgaaaatcttcacccaaaaggtctgaagagtaactttgtccacctgtttgtatcgactctgcacttccctcatgagcagaagataaaactgtaccaggcaagagaacccgctattatctcgtctgcaggccagtcggactggtccgggtgacctgctcactaactctggcctctgcttctctttcctttgtgttgctgtagcccccggctccactgagttaaggcacacttagtccagg

SEQ ID NO: 14593 - DNA, 5959 bp, Homo sapiens
tctcgtctgcaggccagtcggactggtccgggtgacctgctcactaactctggcctctgcttctctttcctttgtgttgctgtagcccccggctccactgagttaaggcacacttagtccaggtagttacaaagctctcctacaacatttctcttacttggttccaaaacagtccagtggggtaggggatgttatttccattaaaagatggggagccaagggcctggcgccgtggctcacgcctgtaatcccagcattttggggaagccgaggcgggcggatcatttgaggccaggagtttgagaccagcctggccaacatggtgaaaccccatctctacctaaaagtaccaaaattacctgagcacggtggcacgcacctgtaatcccagctacttgggaggctgaggcaggagaatcgcttgaacctgggtggcagaggttgcagtgagctgagatcgcgccaccgtactcggtctcaaaaaaaaaaaaaaaaaaaaggcctggcacagtggctcacgcctgtaatcccagcactttcggaggccgaggggggcggatcacgaggtcaggagatggagaccatcctggctaacacggtgagaccccgtctctactaaaaatacaaaaaattagccggggatggtggcgggcacctgttgtcccagctactcgggaggctgaggcaggagaatggcctgaacccgggaggcggagcttgcactgagccgagatcgcgccactgcactccagcctgggcgacacagtgagactctgtctcagaaaaaaaaaaaaaaaagagagatgtagtcagggccaggtgcagtggctcacgcctgtaatcccagcactttgggatccgccaaggcgggcggatcacctgaggtcgggagttcgagaccagcctgaccaacatggagaaaccccgtctctactgaaaatacaaaattagccgggcgtgatggcgtgcgcctgtaattcaagctacttgggaggctgaggttgcagtcagctgagaatgggccactgcaccccagcctgggcaacagaatgagactctgtctcaaaaaaaaagaaaaaaaaaaaagatggagcctggagcccagaggcaaggtgacttactcctacaatctttgtagcagaacaggacctttgtagcagaaccaaaacctcccaactcccagttgacatggtagccaccttctctggtgagtgaagggattccacatccccagcagtgcagttggtgagaaggggcagtcagtcttcaaggatttgctccggtgtggcttcattcaatgctgcccacctctggtgcagcctcagctttgcctctgctctttgcaatgtagcctagaggtcttttttctccttaacaggttttattccctttgttcctcccatccttcatgtccttggcattgctttcttcaaaggaagcctcaaagaactgaaccttgagactgtttctccttttgagatattgtttccacattcattttatattaagttgtctaggagggttagttctcatttaaatgaatgttgtccttgtcaaggttaacattcccactggcaacatagcaagactccatctctacaaaaaataaaaaaattagccaggtgtagtggcatgcacctgtagtcccagctacttgggaggctgagatgggaggatcgcttgagcccgggaggctgagcctacaatgaaccatggtcatgtcactgcattccagtctgggcgacagagtaagactctatctcaaaaaaaaaaaaaaaaaattcctcctgttaggtggggactgaagaaagaaatagaaacttaactgaacaaggaagtagaagtgtttgcccaacaaactgacgtgagacagggaagactgctaaaaaggaaggaaggaaggattttcttgttctttacattcttcataaatctccggaaacagagtaatataaatggttgagggcatgtctgggggagtttcctggtatagcctttcacgctttggggttgagggcttgttgcttgagtgtctttatgtttgtttgaagaaaacatctggaacagatgcttttcatgaaatgtcattgagtcagctctgttggtctggggcactgtgtactgtgcaggtcttgatctagttccttattcctcagtatgtctgatagtactaacttgagattgtagtccaagagagatgaaaactatggctacgttagcagtgaatgatattcacggatcttgccgggtggctcattcctgtaatctcagcactttgggagggtgaggtgggtggatcacctgaggtcaggagtttgagacgagcctggccaacatggcacaaccctgtctctactaaaaatacaaaaattagccaggcatggtgcaggggatcggggcgcctgtagtcccaactacacggggggctgaggccggggaatcgcttgaacccaagaggcagaggttgcagtgagctgagatcacgccactacacaccagcctgggggatagagtgagaccctgtttccaaagacaaaaaagagaagaaaagaatcacggatcttgtacctcttatacctttaaaaagtcagatttaatagtcatttgagttaggaaaaaacttctctgcattttagcatctatctctgccaatttccactttttagagataaggttttagaaaagctgctacctagcgagtgggggtgagggtgccattctaagagctctgacctcgtccttcagtgcatgaggagcagatggagcctgcgcgcctcttggtgcaccctttgagcttcgcatcctgtttcttctttcatggttggtccaggaccagttacagaagtggatccgcggtaatgtgagtgcatgtgcgaactctgttttcatatttgacgagatggataaattgcaccccgggatcattgacgcaatcaagccgtttctagactactacgagcaggttgacggagtgtcttaccgcaaagccatcttcatctttctcaggtcagcgggaggcggttttttggggcacacaagcccttcattctctcaatgataaaatgaggtcctgaggaccatcagcactttgtttaccaggacgaaagtgcctgcttggcacaaggcacttacctactgctttacttttcctttgccagtctcagcatggcacacagtgtgggttgtggaaatgaactaaagaaataatcactgggccaggcgcggtggctcacacctgtaatcccagcactttgggaggccatggcgggcggatcaccaggagatcgagaccatcctggctaacatggtgaaaccctgtctctactaaaaatacaaaaattagccgggcgtggtggcgggcgcctgtagtcccatctactcgggagactgaggcaagagaatggcgtgaacccgggaggcggagcttgcagtgagccgggatcacaccactgcactccagcctgggtgacagagtgagactctgtctcaaaaaaaaaaaaaaaagaaataatcactgatagcaggcaattttagctgggcatcgtggcatgtgcctggagtcccagctcctggggaagtcgaggcaggaggattggttgagcccaggagttcaaggttttattgagctatgatcataccactgcactcctgcctgggtgacaatcaagaccccgaccctaaaaatgaaacagaaatgaaaacagttaattttattaactgtgcatgttggtttttagggttataaagggccatagcattatcccagctagttgtgaataaacactttaagttccatgagagcacacttttttgtctagtagcactcagtaaatattccttgatgaaaaatagatcttcggccgggtgtggtggctcacacctgtaatcctagcactttgggaggccaaggtgggcagatcacttgaggtcaggatttcaagaccaggctggccaacatggtgaaaccccgtgtctactaaaaatacaaaaattagaaggggcgtcgtggcaggcgcctgtaatcccagctactcaggaggttgaggcagaagaatcacttgaacccggaaggtggaggttgcagtgagctgatattgcgccactgcactccagcctgcgtgacagagtgtctcaaaaggaaaaatagacttagagcagattcatttcttggtaagacacagaagtctttttttttttttttttttttttgagaccgagtttcatttttgttgcccaggctggagtgcaatggcatgatctcggctcgctgcaacctccacctcccggattcaaacgattctcccacctcagcctcccatgtagctgggattacaggcatgcaccaccattagcctggctaatttttgtgtttttagtagagatggggttactctatgttggtcaggctggccttgaactcccgacctcaggtgatctacctgcctcggcctcccaaagtgctgggattacaggcatgagccaccacacccagcagacacagaagtcttaatatgtgattttaatctttatttctctggcaaactcagcaatgcaggcggggaccttataactaagacggctcttgacttttggcgggccggaagaaagagggaagacattcagctgaaggacctggaacctgtactgtctgtcggagtcttcaataataaacacagtgagtccaccagggtaaaggagccccttaactgtccagcagtgagccgtctgctctttcattgagtgtttcacaaagccacaggatcccactggatttcctcactttgctaaagtcaggaattttcttagggcatactgtgctagaaaccagtgagtgagtgtccagctgagtcctgcatgggcttgttgcacactgacaagagactctctcaaggggtacggacatgaggaatgtgctgagggtcgggactggagcttggccaggtggcggtggtggcaggaaacccagctgtgtcttgttctgcaggtggcctgtggcacagtggactgatcgacaaaaacctcattgattactttatccccttcctgcctttggagtacagacatgtgaaaatgtgtgtgagggccgagatgagggcccgtggttctgccatagatgaagacattgtcacaagagtggcagaggaaatgacgtttttccccagagacgagaaaatctactcagacaagggctgcaagactgtgcagtcgcggctggatttccactgagctcctatccagatggggtaggagacagctgggaggctccgcacgccagaggccttgcctttcagaagaaccctgaagaccgctttggggttttgcctgtttgcaccttagacttttgggtatagaatcttttttttgagaagaggtctcactccgtcatccaagctggagtgcagtggtgcaatcctcaactcactgcaacctccgctcccggtttgagtgattctcatgcctcagcctcccgagtagctgggattacaggcatgagccactgtgcccagctgggatatagaatctaagagttgattgtggaaaacacgtgaatctattgcgcgcatttgtcatttagcaagatggcagcagtccagctgttctttgcagctggagatgaacttttaaaaatccccttcacacttaatgtactgaccgagacagaagtacctgaaaacagctgtgcatggcaggcccggcaatagcttctgacccacagcacccgcgcctcagaagctacggtcacaactaaaggagtccagggacttgctgcaggctggggggcactgggtggttctcaccagcaggctgcggggcactgtgttctcattggccaaaaacatccttttgctctgtctcgttctttacacagagttcactgacttgaagtatactcagttaaaatcggggctggaggtgcagacggtgtctgaccggaggatgtggccgtgcccgccgagca

SEQ ID NO: 14594 - DNA, 516 bp, Homo sapiens
tctcgtctgcaggccagtcggactggtccgggtgacctgctcactaactctggcctctgcttctctttcctttgtgttgctgtagcccccggctccactgagttaaggcacacttagtccaggaccagttacagaagtggatccgcggtaatgtgagtgcatgtgcgaactctgttttcatatttgacgagatggataaattgcaccccgggatcattgacgcaatcaagccgtttctagactactacgagcaggttgacggagtgtcttaccgcaaagccatcttcatctttctcagcaatgcaggcggggaccttataactaagacggctcttgacttttggcgggccggaagaaagagggaagacattcagctgaaggacctggaacctgtactgtctgtcggagtcttcaataataaacacaagttcactgacttgaagtatactcagttaaaatcggggctggaggtgcagacggtgtctgaccggaggatgtggccgtgcccgccgagca

SEQ ID NO: 14595 - DNA, 22520 bp, Homo sapiens
agactttagttcggccctaggatttggtagccccgaagtgtgggctctctccagtaccagactcatttcagtaccagcctttgggaagtcgtgtgaatacctcggtctcttagccacagggatagaatggcggcctgacggagccgcggcgccggcgaagtcgctgaggcgcgagctggaacccccagaccagctcaaacgggagccaaaactcgaagcttggaagaattagcaggaaatggcggatgaggcgttgtttttgcttctccataacgagatggtgtctggagtgtacaagtccgcggagcagggggaggtggtgagtgctgccacacaaccttgaggtccttttgcggtgacacaccttgtttcccctcagtgctttccttcaacccctgtcccatcgccacccgacgcctcccgaggtgtacacaaaatggtccacctccaggtgtcctaaaccctagaacctgtcagttgtctcctttgaaccgtcatctttcatcgttttctctttcgtatcttcttctatttgattctcttttgtctattcccgtacgtttgtcttgcacgccacagattttggtacttttagtgttgtccctgccattatttacgagagggttaactgcagagcctacttagttttgctggcacttccagcacttgagccatgcactggacagacctgtgccaacctgagaagcctgtccctccttcctcattcctaatgctcagtacaactccacacaacttgagacctgaagcctaatgaaggttgagtttgcaaaggaaagtttgcaggcgttaggataattagggaacataatttaaattaattatttcagaaagtatttatttagtgcccttatgtcagagcgatttctaggtgccagggatatagtagtgaatgaaacaatggccccatccttgtagagatttttttttaatctaatttaatccgaaatgtgatagtatgtagcggttacttctaatatgtgggagtccttattcaatcattgtgggcctgtcactgctgacactgctagataaattaaataaaataatactcctgcctcacagtatttagggaatagtgatttaatgaatagttaacactgagtattggctggtagaatcatggagttgtaacggattttagaaatactccaaagtcatgctcaagtcaggagccctttctttaatgctattgataaaaaatgagtggagagtggggataggaaatgtatcctaggcaaagataaagtggtagaggtatgaaagagtggtggatttaaatacacttaagcatttctttggactagactgaatagagagtgagaagaattgagaggtgaagttagaaagctttgtgtaattaaagaattcggatcttttcgagggaatatttttaaggaagggaatgatgtggaccatttgcattttagaaaagtaatccagtgtttgggctagagagggaagatccttgtagggggaaaatcctttattacgggagtcactgcaggaggagatgaagatctggattaagacagggatagtgagaaaaggagataacagatttgaaagttagaaagtggaattctgtaggccttgtttaaggatgggagtgggagttgaaaattatcgtcaggttttcagcttgagcagctgggttggatggtggtactattaatcagaaaaggaaataaaggagaagaaaaaaataaggaggtaagataatgagttatttcggggcaggttgaacttttgaggtgcctgtatgacatccaaaaaaaggtactgccagtttgcacaagaaggataggcaggatacatttggaaggttattggaaatgaagcgaattctattcttattcaaatgacccatctataatagagatttttttcaagtcacaaacttctgactttattattgacctcaaggtttactgtttgtgcaaagctagccttccttttccctctagaacagttaacacaccccttttacttttttgtcataacccccgatccccccaaaccacttgcgtattcagttctcttcattctcccctcccttcttacctttcctcttctctctctctctttttttttttttttagatggagttttgttcttgtctcccaggctggagtgcagtggtgtgatctcagctcactgcagcctccgcctcttgggttcaagcgattctcctgcttcagcctcctgagtatctggaattacaggtgccggccaccatgcctgactaatttttttgtatttttagtagagacggagtttcaccctgttgaccaggctgttcttgaacttctgacctcaggtgatctgcccgccttggcctcccaaagtgctgggattacaagcgtaagccactgcgcctggcccttttctgactcttgtctagaataatattttttcttctttttaaaatatcttttttttttcccgtgggttaatcctaaataaaatgaacagagctgttctactcaggcctgataattttaagagatggactaacatacaagagaaaggaagttcatagttttgaatcatttaagctaaaaataactttctttttctactgcagtgtatttatgatgggggggaaaattgaaagtacataataagcaaaaattatataaataacagttatgtggtagtcttcataatcagaacccatactgaaatacgggtatataagggttcacattagtgtccatactttgagtgtgcttgaaatttttcatcatgaaaaatgtaaaagatacataatcctgtcatccagaggtgatttttagagatttttttcagacataaaaagatctgtaaaaactatgttgtttatgtctgaaaagacctataaaatccatttctcgctgacaggattatgtgtctttttttttgtttttgttatggaaagtttttttaaatgaaataaagttttataaattttcagtatagcaaaataaacttccataagacttgaggtgagataaaagaaagaaacagtgttctaaccctccaaatcaaggtttttcaaactatgcttaaagaggaattctcttaaaatggactaattgggcatttctcaatttatggtgaatggattttgaaaggctaatggataaaatgttctcaagttgaatttttcttaaaaatttggtgcctactcaaaagtgcatgaacaagtagcaaaattaagtagtagggcttaattcaaaagctcatgtgatcataggatttgaaagtgtctgcatataagcatattgtaactgcccagtgggttcttcttccccactgcccaggtagagctgatctatcaagacaggagaattgcaataaggagtttatgtagagctgctaaatgggagagcagagttttattattgctcaaatcagcctccccaaacatgcagagtctagggtttatcaaggatagtttggtaggctgggggctggggaatgggtgctcctggttggttggggatgcagttacagaggtgggggccagaggaccagttggagtcatccgaaatgcaaaagtctgaaaagacatctcaaaaggccttttttaggttctacaatagtgatattatttacaggagtaattggggaagttacaaatctgtgacttccagaataatgtctgattatcatttaactacctacattttagcagaattcagacccctctcataagcctaaccttatagtctttcattagttttgcaaaggtgatttagtttcgggaagggctattatcattcttgctttaagcttacactataaactaaatttctcccaaagttagcttgggctgcatccagaaatgaccaagggcagcttggaggttaaaggcaagatggagttgattaggtgagatctcttttacagtcatgattttcttactgttacaatctttgcaaaggtggtttcaatagttcctgctaataaatatgttcctaggtgattctacagagagcagattattccaaaaagagcatcatgatttacagacacttattctagctgaacttgtttttttgttttttttttttttaagagacaagtctctgggttagtgtggtggctcacacctgtaaatcccagcactttggaaggctgaggtgggagaattacttgagcccaggagttggagaccaacctgggcaacatagtgaaacagtgtctctatttaaataaaaaaaaaaagaggctggacacggtggctcaggcctgtaatcctagcactttgggaggccaaggcaggcaggtcacaaggacaggagttccaggccagcctggccaacatggtgaaactccgtctctactaaaaatacaaaaaatagctgggtgtggtggtgcacgcatgtagtcccagctactcgggaggctgaggcagaagaatcacttgaacccaggaggcggaggttgcattgagccgagattgtgtcactgcactccaacctgggtgacagagcaagactcagtctcaaaaaaaaacagagagagagagagagagacaatgtcttgctctgtcatgcaggctgaaatgcagtgttgggactttggctcactgcagccttgacctcctgggcttaagtgatcctcccacatcagcctctcgaatagctagggctatgggcatgctaccatgtccagctaattaaaaaaatttttttttgtagaaacagagtcttgctatgttgctcaggctggtctcagactcctagtctcaagtgaccctcctgcctcagcctcctacggtgctgggattataggcatgagcactgcgcctggcctcatcctaagcatgtttgagaagtgtggagaatagcagaaaaactgaagatagtgatacgtacagtaatagatgtatgtacagaattttacgacagcatagggcctaaggaagtttcagggaagccatctgggagaatgtaatacttgagcagaatttaaagaatgtgaatgccaggcgcggtggctcacgcttgtaacccagcactttgggaggccgaggcgggcggatcacaaggtcaggagatcgagaccgtcctggctaacatggtgaaaccccatctctactaaaaatacaaaaaattagccgggcgtggtggcggtcgcctgtagtcccagctactcaggaggctgaggcaggagaatggcgtgaacctgggaggcagagcttgcagtgagccgagatcacgccactacactccagcctgggcaactgagcgagactccgtctcaaaaaaaaaaaaaaaagaatgtgaagtctagggaatagcacataaaaaggcagggagacagaagagaacatggcactctggagttgctgcagaaatttcagagtggtaaaagggaaggatgtttgtgaatttggttaactagccaggagtctttaaggaaaggacataccatgatgccatgctaaggagtttggactttattttttgtttgtttgttggtttgttttgagacaggatctcactctgttgcccggtctagagtgcagtggctagatattggctcactgaaacctctgcctcctgcactcaagccatcctcctacctcagcctcccaagtagctgggactataggtgcatgccaccatgttcacctaatttttgtaatttttttaaagatgaggtttcactatgttgcccaggctgccctcgaactcctaagctcaagcaatccttggcctcccaatgtactgggatttacaggcatgagtcactacatcaggcctggactttattttgaagaaaggggagcaggtgctgaaattccagtagagaataacatgattttttttttagacagagtttcactgttattgcccaggctggaatgcaatggggtgaccttggctcactgcaacctccgcctcctgggttcaagcaattctcctgcctcagcctcccgagtagctgggattacaggcatgcgccaccatgcccagctaatgttttatgtttttagtagagatggggtttttccgtgtcggtaaagctggtctcgaactcctgacctcaggtaatccgcctgcctcggcctcccaaaatgctaggaggcgtgagccatcatgcccggccgagaataacatgattttttttagaaatttactttagtagaagttacactaccagaaatatagaagatgacacaaagtaggaaaaaatgagacaagaccagttggaaagctatagctaaaaaccaggagagaaatgataaggctttacttaagaagtaagggtagagagagacgatgaattttgaaaagcttgtaaaagataggctccaccggactacagtgtatggggggttgggagcacaggggtgaagaaaatggaagttttctggttggagtaactaggtgaatggtggtgccattaatgaagttaggaaattttggaggcagagcaggctgaagacattaataaaatgaatatcatttgaatatgcatacttcgaaggtcctgtgggaccactagatgtctatgcccaataaagtctgtactagaaacgcagatttaatagtcacagcaccataagcagagtgcatggttccttagaagaaagtttagcaaataataagccctatggtttccttagtgggagacaaacagccttcagaatatacaaaaatccctgcctttttggagctttattttagcagagaggggaacaaggggcacatgggcaatataaaatagtaaaatgtatggtatattaaatggtgaaagaagttctgtggagacagattaagcaaggaagtgggactgagtatcaaaatcaatttttagaaggtttgttaaagctgattagcggccccatacccagagtttctgattaagtaaattgggagtgggactagagaatttgcaagttcccatgtgatgctgatgttgctggtcttttttttttttttttttctggtgatgaagtctcgccctgtcacccagactggagtgcagtggcatgatctcggctcgctgcaatctctgcctcctgggttcaagcgtttctcctgcctcagcctcttgagtagctgggactacaggtatgtgccaccatgcccggctaattttttgtatttttagtagagatgaggtttcactgtgttagccaggatgatctcgatctcctgacttcgtgatccgcccacctcagccttccaaatgctgggattacagatgtgagccaccacacccagccaacacatttttaaaatcactaggatagagagttgccaaaggggtatgatgttgcacttttaaagaagatggttaaaatgggcctaagatggtgacatgagagtagactcaaaggaagtgagggagttggttgtgtgactatctggaggaagagttgatgcaaaagcccctggaatgtgcctggcatgtttaagggacggggcagagtgcatctgcagaaggttgaagccagagaggtatggggtctggattgtagaggacagtccatcagtcatccataggatttggatgtgttcagcatagaggtactatttcaagccttaagattgaatgagattgtcaaagaaagagcaaagcaatctcatgatttaaggcaaagtgtgataatcagctaagacactgagaactgggaagcctggatgattctgagacattttgaagcaaggaacaatagaacttagagcagaaagcaaatgactcagggaaaaacatcaaaggtgataccaggttttataacctaggagagaagaatgattgaaattgggataaaagggagacgaggagtaattaggaagaggatttgatttctgaaaatcaattataagcagtagttccctgtttatcctgttgccttgtgccaggtgcagtggctcacacctgtagtcccacagctttgggaggccaagccaggaggatatcttgaggtcaggactttgagaccagcctgggtaacagagtgagatcccatctcttaaaaaaaaaaaaaatagccaggcatggtgatgtgcctgtagtcctagctacttgggagactgaggtgggaggattgcttgaacccaggaatttaaagcttcaatgaaccatgatctcgccagtgcactgcagcctgggcgacagagcaagacttgtcaaataaataagtaaatagcagtttggtcttttgttggaggaacgtctattcttagcttggacactgcggtttttccttgggcagcagaagcaatgtggcgattgaagaagtgacctaaaactttgatgttaggtagaagcagatggcccaagccaagacaagtgcttgtaaatccactggtgggagcccctcctcctaacagcaggttattaacgctgccagaaaaaaagtgtcccctctaccggtctggtgaagaaacctcatcgctacgggcctgggactgtggcacttctagagattctcgttaccagaaattgacctagcttctcatctggaagctgcctttctagaggttggtgagagagatcacccaggatttcaaaaccaactttaggtttcagagcacagtcattggggtgctgcaggaggctagtgaagtgtacctggaggctagtgaagtgtacctggtgggttggtttgaagatgctaatttgtgtgccatctacggtaagagagttggctctcatgcccaaagacatccagttggctcgccagacacggagtgagcgagcttaagtgaaggcagattttaaggcattttatatgaattctgtaaaatactttggtttaatttgtgactttttggggagaaattatttataatatgttgcatttgtgcttaagtcattccgtcttttgggatgaatgtgaaaagtgactgttcatagacctcagtgacgtaagcactgttgctcaggagtgacaagttgctaatacgcagaagggatgggtgacattttttcattctcatgacgcatgtttctgtaagttaatgacttgttaggtagctattaaggaactagagttgataaataaatgtgtataggttccttttgcaatataactggttattacttgatccaagtgtttaacatttggagctaagtctgaccatacattactgtgatagaatgtgggccttttcaagggtgaagatacaagccttaaccacagtataacttgcagtttccttaaacaaacaaagaaataaaaacctagcatggagtacattatgtgcatttataatagctattttaaatattgtagtgtcaacattcaaaaattaattcttttacattcgcaaatggtggggagtcttgtcattaaggtgtgtataacttagaatccacttggttttctcctaactggactgcatttgttttcatagtagtaaaatgttatgtgtattacaccttgcataagtcctcattctactacgtgttaactaaccctctagatgataatgcagatgctaactgtgggattttatttataagaactctagaataaataccagttattcctaccaacatcggctgttactaatattctgaagtagttagtgcaacttttcattgtgttgtggttggtctcctaagtaggttggatttttctcctcttctaagagaaaacaatagtgaaattattttctttctcttttctctctgtttctgtctctttctctctctctttctcccttcccttcccttccctcccctcccctcccctcttcttttcttttctttctcttctcttctcttttctttctttcatggggtcccttgctcaacctgttgcccaggctggagtgcaatgacatgatcatggctcagtgcagcctcaacttcctggactcaagcaatccacctgcatcagcctccaaaatggcacatgctaccatgcccagctattttatttttacttttagtacagatgtggtcttgctatgttgcccaggctggtcttgagccattgagctcaagtgatcctcctgctttggcctcctaaagtgctgggattacaggcatgagccaccgtgtcttgaggggtttgtttctattaaaagacttggtgtcagggaggagcacaaagctttaacccattgaacctctgacagttaagatggtgttgggttaggttacatctggttactatcctgggaaaatcacttctatagagatggccttccaagtggttttaaaatgtatctttctgtctgggcgcggtggctcacgcctgtaatccctgcactttgggaggccaaggcaggtggattgcttgaggtcaggagtttgagaccagcatggccaacattttgtatttttgtattttctctactaaaaatacaaaaattaaccaggcatggtggtgggtgcttataattccagctacttaggaacctgaggcaggagaatcacttgaaccctgtagatggaggttgcagtgagccgagatggccccactgtactgcagcctggatgacagagcgagactccatctcaaaataaattaaaaaaatgtatccttctattgaagtttttaggttaatcatgtatatgttgactaaattatgaattaacttgtttatcaaaaaaaaagtaaaaagtaaagtaagtaaaagtaaagtaaaataaataaaatcaaccttataattcactttttcttaaactgtttcagggaaaaaagtataaatgtttacattaatatttttaaccaatcttgtaaaacaatttctgaatactaacatcctagcattctaaaagtatttaaaactattgttttttaaaataggaaaacggacgatgtattactaagctggaaaacatggggtttcgagtgggacaaggattgatagaaaggtgagcaggttggatttgaaaattttcttgcaggtaggttataaacaaaggtgatctatttcaaaagattgcataaaacttgggatattttaattttaattcctgaatgttattctctttacttcaaaaattaaaatttctttttagatccaatgccatttaactcatttattcaaattttattttaatgtttaaagaaaatatatattttatatattttagactttcttcctgaagctattttagactttattcctgaagctattgaagcaactatctaaaatcttactgcattttcaacttaagatctgctaggttctttaacctgcatagaatttttaagtacataggtttgaaataactatagtctatgtttatgcgtgtaattatctttgaacttataaatcagttctttttagtatttctttctcactacctgaatagttaaactcggagtatattttatataacaatgtcatgataatgctcagctctttgttcttttgtggttttttgatgtgctagaatgcattgcacctgaaattttggctataatgttagactaatttgaggcctcataatttatataacataatgtgaatccattgagataggatcatgttacctggtgcttatgactttattagtgttaataaatgttcagccaggtgtggtggctcatgcctgtaatcccagcactttgtgaggccaaggtgggagaatctcttgagctcaggagtttgagaccagccagggtaacaaagtggaaccctgtctctacaaagatatacagattagctgagcatggtgacatgtgcctgtggtctcagctgctagggaggctgaggtgggaggatagcttgagcctgggagggaggtagacgttgcaatgagccgagattatgctattgcactctaacctgggcgacagagccagaatctgtctcaaaaaaaaaattaaaattaaaaaacccaataaatgttcagtgctgttctggcatttggaaattagttaataattagtccctcttgctttttttggaggagaaatactgtattacttctagttgatctttttaggtttacaaaagatactgcaaggttcaaggatgagttagatatcatgaagttcatttgtaaagatttttggactacggtattcaagaaacaaatcgacaatctaaggacaaatcatcaggtaattaaattaattaaggcctatattttaaagtcctttaacttgatataaatatcgtattttagtgacttatttaaaacctaaaataatttctggttaactttggaatatgtttatgttattaatgagttattagtttttttcttctaatagtgtgaactgagtaaagacaaagggacagttatcagtaatgatagctgttcctttcacccaattatatgctatgttaagttttttaaagtagcataagtcaggatgagaatagcttttactatttggttccttagttactgttaattagtggtaataatatgcagaaccacaaatatatcacctttatgtctttagagtcatttcttttttttgaagaagaagaatttggattattttaattatttttatatacagaaaactcaacagtgtatgtttaacccagtttggtgtcaagttctttagcctttgccttttcctgcttgacaattcaagccacagacttgagacccaggacattgcctccccagtgacagtggatttcgttttgtctgtcgtaattggttctgatagcttccaccagctgaacctaagctccattgtcctctgagttaatctgtgtaaaggcgacagtggtgcgggtcttcttgtggattagacatcccagtcttgccttccccttgataatgcggtaagggacccccattttatgacacaaggcaggcaggaagacagccacctcgatgggatccacatagtgtgcagtcaccaccagctgagccttcttgttctcctccaaggtggagatggtgttaactcctgctcggaggacaagtggtctcttagtggggacatcccctttgcctgcagctttcttttcagcccgggccaatagcctctgcttattttcttgctttgtctttggtctgtacttgtgggccagcttaagcagctaagtagctatttggcggtgcagggcctgggtgaactggttaattgtaggaggcactttcagctgcttacagaggatggctttgtgccactgcaacctgatatagcggggccatttcacaaagtgagtgaggtccatattgggtggatgtcctgtccaatgccagaattcttaggccttttctcaaacaggggattcaccactttctttctttcttttttttttttttttttttgagatggagtcttgctgtgttgcccaggctagagtgcaatggtgcgatctcggctcaccacaacctccgcctcctgggttcaagccattctgcctcaggctcccaggtagctgggactacaggcatgtgccaccactccggctaatttttgtatttttagtagaggtggggtttcaccatgctggccaggctggtctcgaactcctgacctcaagtgatccgcttgtctcggcctcccaatgtgctgggagtacagacgtgagccaccacgcccaaccaggattcaccactttcttggcctcctgtttcttcatgacaccaagggccagagccacctccttcctcttggcctttccttttggcatcttgggtggcaggaagagattctttatagtcatttctaaagtctaatttatagagcattttactcttaaataactcctggattattactgctgtcatattttctactcttaaaagattttcttactacaaaattaatagattacatagaaaactatgtatttattaaaattttaaaagggagacagagtctcgctttgttgcccagactagtcttgagctcctggactcaagtaattctttggcctcagcctcttgcatagctgggattataggcatgcaccaccactcccagcttcattagattttattttatgaacttcaaggaaatacttagagtagatttggaattttgattaagtaaaaaattaaatgtatctggtactctcaataggataattcatttatttatttatttttaattagagacagtgtctcactatgttttccagactggtctcaaactcttgggctcaatggatcctcccgccttggcctcccagagttctgggattacaggtgtgagccactgtgcctggcctggaattcattttgtaccaactttagcttggaattactggaaatgctaataggaagaaatgactatgatttttttactctctagacatgatttactaatatatatcagctggctggacatggtggctcatgcttagaattgcagcattttgggaggctgaggcagaaggattgcttgagctcaggagttggagaccagcctgagcaacatacttagaacctatttctacaaaaaacttgaaaaaaatttcaccaggcatattggtatgtgcctgaggtttcagctacatgggaggagttcaaggatacagtgaaatactacacttttgcctggataacagcaaaattctgtctcttaaaaaaataaagctgggcgcggtggctcacccctgtaatcccagcactttgggaggccgaggtgggcagatcacctgaggtcaggagttcgagaccagcctggccaacgtggtgaaaccctgtctctactaaaaatacaaaaattagccaggcatattggcgcacgcttatagtcccagccactcaggaggctgaggaaggagaattgcttgaacccgggaggcagaggttgcagtgagcctagatcacaccactgcactccagcctgggcgacagagcaagactctgtctcaaataaacaaataaatccgggtgcggtggctcacgcctataatcccagcacttcaggaggccaaggcgggtggatcacctgaggttgggagttcaagaccagccctgccaacatggagaaaccccgtctctactaaaaatacaaaattagctgggcgtagtggcgcatgcctgtaatcccagctacttgggaggctgaggcaggagaatcacttgaacccaggaggcggaggttgtggtgagctgagatcgagccattgcactccagcctgggcaacaagagtgaaactctgtctcaaaaaaataaataaataaaaataaaaattaggtcgggtgtggtgatcatacatgtaatttcagcactttgggaggctgaggcaggaggattacttgagccctggagttccagaccagcctaggcaacatagggagaccccctttctacaaaaaattaataaaactagccgggtgtggtggcatgtgtctgtggtcccagctactcggaaggctgaggcaagagaattgctaaacacccaggtgtttgagggtgcagtgagctgtgattgcaccaccacactccagcctagacaacagagtgagagctcatgtctaaataaataactatacaaacaaacagcttatttcatgtggacatgtattaatgattccatcgtactagactatgagtttttaaggatagggactatgtctcagacagtgtttttatcttcagtgtataaaaccgttcggtatacattagtgttgtgaaaatactgaactcgcaactcttcagcttgaacattgcaaaactccttcatttaaacaaaatttgaccaggctgggcacgtgggcttatgcctgtaatcccagcacttcgggaggtcaaggtgggcagattgcttgagcccaggagtttgagaccagcctgggcaacatggcgaaaccccatctgtacaagaaatataaaaattagcagggcatggtgatgcacgcctgtagtcccagctacttgggagcctgcggtgggaggattgattgagtctgggagttggaggctgcagtgaggcgtaattgtgccactgcattctaccctgggcgacagaggagaccccgtctcaaagaacagaaaaagaaaacttggccaatgggaaggagacttttaataactttaaaaaacacttaaattgtttcataagaataaaataattttaaggactgctaggtacattgactttggattttttttctatttttggaacagggcatctatgtacttcaggacaacaaatttcgcctgcttactcagatgtctgcaggaaaacagtatttagaacatgcatctaaggtatttaatggaatagaagttggggtttttgttaatagtaggactacagggaaaagtacagtgctaatcataacaaactattgaattaaaaatatgttttaaggtgttcttttttgtttaaagagttttctatgaaatgagagacatgttacaataacactaaactgtagctaaatagtcatagagtgaccaattaaagaaacactggccgggcgctatggctcacgcctgtaatcccagcactttgggaggccaaggcaggtggattacctgaggtcaagagttcaagaccagcttggccagcatggggaaaccctttctctactaaaaatatgaaaaatagctggacgttctggcgagcgcctgcaatcccagctattcgggaggctgaggcaggagaatcacttgaacccgggaggcagaagttgcagtgagctgagatcgtgctatcattgcactccagcctggggtataagagcaaaactccatctcaaaaaaaaaaaaaaagaaaaaaaagaaacactataactaaatgacagtgaaatgtagatgtatggtagatcactttttttttttttttaagacaaggtcttgctctgtcatctaggctggagtgtagtggtacaatcatggcctatcttgaccttgacccccccgggctcaagtgatcctcccacttcagtcacccaaggaggtaggactgcaggtgtgggccaccatgcctggctaatttttaaaaaaattttttagagatgggatcccacgatgttgcccaggctcgtcttgaactcctgggctcaagtgatcacctcacctcggcctcccagtgtgttgggattacaggtgtgagccactgcatccggcctgattgcctattttctatatttttggggtatccaggctctaattacatttttatggttaatgtgtatattttctctcttttttttttttttcggacagagtgtgagactcactgcaacctctgcctcctgggttcaagtgattctcctgcctcagcctcctgagtagctgggattacaggtgtgcgccaccatgcctggctaattttttgtatctttagtagagacagggtttcaccatgttggcgaggctagtctcaaactcctgacctcgtgatccacccacctcagcctcccaaagtgctcggattacagacgtgattacaaaagccacccaaaatgctgggattacagcctcccaaagtgctgggattacagacgtgattacaaaagccacccaaaatgctgggattacagcctcccaaagtgctgggattataggccatgcctggcatattttctcttttttactaacttcttagtttaatatttctggttctcacttaactttttgggatcttggtttcttcagctgtgaaaagagtaagttggaccaattcagtgatttctaactattttgagttatggacatctttgagaactggaacacctttccccataaatacgcacatatacatggtttttattttcataggggtcacaaattccccgattaagaactcttgggatgaacaatctctaaggcctcttccagcttaaaatttcatgactcagatctagttacttattagtgcccatttatgtatattatttataagataatattttatattattcgtagataatgtagtatgttgaacatcatgcagtatagatgtgggtaatcaaaaattccctgaattgctaatttttcaatccagttcttgtcatgacttttggttttgtagctcagccctattccctttctttgtttctatatgacagggtttctcaacgtccaaactgttgatactttcaaccagataattctttgttgtggcaagctataagtcttgaacaagtcaagattcttggttgtaaataggggaaagaaattctgcttgtaagctaacaaaattgataagctcaaagaataggcaataaccaggggaggttaaggcagccagtaagatagccaagtcactctgcagactgtatctacttagaatcctgcaggcagcagggactgtagacacaaactacctttactgcctccagaactaattctgatcagtttctggcttgtttttgtcactgagtctagattcacagtcctggactggagtacttaattggctgagcttaagtcttaagtcctacgtccatgctttagtttccagggagctgggaaatatatcaatatttttcagtaatttgaacagttcttcaaaatcctttttttaaacaggaatgacttactgatgataaatcatgtaatgttgtatttatcaatagctttactattttagtaaatccttactatttttaatgattttttttccttttagtatttagcatttacgtgtggcttaatcagaggtggcttatcaaacttgggaataaaaagtattgtaacagctgaagtgtcttcaatgcctgcttgtaagttgaattcgcctttcttacaaatgttttagtaatttgttttcaggtctgtttttttttttaatttaactgagaggaaatttaaaatgctgaaactttcattttagttttatcaatgtaacactttagtgtagtaatatgtagcatactacattcattttcagtaatttttgaataatggactaaaatccaaatttataagacaatttaagggatgatttttaacttttctaaagttattcaaactgtaacttttttaaagatattcttctgaatatctcctgcagtgttttaagatagcaaatttccctagaacattgaaaatgctattttttttttttttttttttttttgagacggagtctcgctctgttgcccaggctggagtgcagtggcacaatctcggctcactgcaagctccacctcccgggttcacgccattctcctgcctcaacctcccgagtagctgggactacagttgcctgccaccacgcccagctaattttttgtatttttagtagagatgggtttcaccgtgttagccaggatggtctccatctcctgaccttgtgatccgtctgcctcggcctcccaaagtgctgggattacaggcatgaaccaccgcgcccggcccgaaaatgctatttttaaacaattgtttaggatatgtctattatatcaagctaagtaaaaccaaatattcttttatcactaaatgtctccctaaagatcttttcaccagagctaccaaccaagaaaaaatggacttgagctttattgtatttcttttcaatttacaatgatcattagccatgaaatactgtacccaaatgtaggattcataaagagaaacaaaagtgcttactcaacaaaccatataatcatcccataaaaatagaattgactggccgggtgtggtgcctcacacctgtaagctcagcactttgggaggccgaggtgggcgtatcatgaggtcaggagtttgagaccagcctggccaataaggtgaaaccctgtctctactaaaaatacaaaaattagctgggcgtggtgacagacgcctgtagtcccagctactcaggaggctgaggcaggagaatcacttgaacccaggaggtggaggttgcagtgagcagagatcgtgccactgcactccagcctgggcaacagagcaagactccatctcaaaaaaaaagaaaaaatagaattgactttattgaatattatgaagaatgcgaaaaagtttttgacatagcagatttcttgactgaaactatttcctatatggaacagaaaattgatgtttagacttgttttctttgtatctaaaatcaaagaattatttgtatttttttttttaggcaaatttcaggtgatgatacagaagctgtagaacatactgaaatgcaaggcttcaacagtgtaaagagataaattattcatgtaaaagtatttcaagtagtgatgatttaattacattgttcgatgtttgtacaggagtaagcatgtatttttatcaatttaacacagatcaaaggagatgaagggacattctgccatgacatacacttaaccaaaactattcaaaatgaaaaccggatttcaaataaccagacaccaagatgcagggcccttattttaaacctttttatttggttagagtgatatgtatttagccatagatggagaaacaaagctcagggtttgttgaattagcatgagagaaaattatgtaccaacagaattatttgtgagaagaatgaacaaattttgataaagtatgaatttgttttattttaaaaagcaaacatactaaattttttttattttattgcttataatttattaagaatgtttacacctgtataaggatttcatatatacattgtatgtgtgtatatataaatacatatatgactgcctaaattgtttataaatttaatttttctttaataggtttcattccttcagagctccattaatgtaatcaaaatgaaatatagattagtttaaatgtgaattcagtgactctagggccaaagaatattaggtatgtttggaaagaatttttgtatttattcctgttacagttttgactttcaacttctctccccgtgcatggaagtcctggtaaaggatctaacatctttattcccttctttcctcttccagctgagcagagttggataattgaattagtcattctgacattctttggaccatatcatcttagtggtttggggtcagtgctcatctgatatatctttcttaccacctcttctacttactttctcttacttaaattatctggcataagcagttatctccagcttttgttagaatcttgcatgttgattactaaaactatactttgtttcccatttatttattacccttttgcatgtatttgtgtgacagggaactctgcagcagggggtgactgacacaccaaacaagatgtttcactgggtactctgccatagaaatggcagattaagaagattgactataccaaacattatattaaaaacacaaaataaaaactataaaaatgtactttaggacattaaagaaaactcaagttagaagcataccattttcctttcatggaagggtacagtattacaaagataatttgtttaacttgatttattaaattctagttatgtgccctataatgatgtttcagtcagtgacagacctcatatatggcagtggttccataagattacaatactgtatttttactgtaccttctttatgtttagatatgcaagtacttaccattgtgttacagtgtcctacagtattcactacaataatatgctgtacaggtttgtagcctaggagcaataggccatagcttaggtgtatagtagatcataccatctaggtttgtgtaagtacactctgtgattgtacaattttaaaatctcctaatgatgatgcatttctcagaatgtatcccctttgctaagcaatgcatgactgcaatcctaattctcacatgttttggggaaaaaattttaattttgaaaaaatttaggaaagttcctaccaaatatacatgtataaagtttattaaaagtcataatgacccaggaatagctaatgacacagaagtagatcaaaatagaacacaatagagaacttcaaaataaaacaggtgtgagaattgtgtgtgtgaaaaagctgggttcaaataagttggtttgttagacattcatatgcctacccatcagccatttcgttctcccttccttgctgacaaagccccattttttttttctttttttttggcctaaaactctgtatggctgccttgtgctatagaatagggtgcttccctagcctagagagggtgagtgttgattagattctgtgccaatcatggtaattggcttacttgatcatttgatggaatctaggctaacgagacaaaggaagtctgaaggctttgaataagaaattttctgttgctcttaacaattgatacaagttagggatttgccagcatccctcttctgcttctcagtgaagatatgtgatatggatgtttgaagctaatctgcaacagccttctgatggccatgaaaggacaagtatggagatgaaagctatcacactgagaatagtgggatgtagatagaaagcacctgaattgtgcttctgaattaaccaatccaggaactgctttacctttggactttttgttatgtgagatattctttatattgttccatttgctttgggtatatgtatattgttacttgtagccaaaaagaaacctctcttagtagaaacaaagggagagttaggttattcaaaaattagtatgggacaattgaatatgcctttttctgcgggagtaggtggggagaaacttaaaggttcacttgtaaaacaataaagtactaaagaaaatgtga

SEQ ID NO: 14596 - DNA, 3251 bp, Homo sapiens
agactttagttcggccctaggatttggtagccccgaagtgtgggctctctccagtaccagactcatttcagtaccagcctttgggaagtcgtgtgaatacctcggtctcttagccacagggatagaatggcggcctgacggagccgcggcgccggcgaagtcgctgaggcgcgagctggaacccccagaccagctcaaacgggagccaaaactcgaagcttggaagaattagcaggaaatggcggatgaggcgttgtttttgcttctccataacgagatggtgtctggagtgtacaagtccgcggagcagggggaggtggaaaacggacgatgtattactaagctggaaaacatggggtttcgagtgggacaaggattgatagaaaggtttacaaaagatactgcaaggttcaaggatgagttagatatcatgaagttcatttgtaaagatttttggactacggtattcaagaaacaaatcgacaatctaaggacaaatcatcagggcatctatgtacttcaggacaacaaatttcgcctgcttactcagatgtctgcaggaaaacagtatttagaacatgcatctaagtatttagcatttacgtgtggcttaatcagaggtggcttatcaaacttgggaataaaaagtattgtaacagctgaagtgtcttcaatgcctgcttgcaaatttcaggtgatgatacagaagctgtagaacatactgaaatgcaaggcttcaacagtgtaaagagataaattattcatgtaaaagtatttcaagtagtgatgatttaattacattgttcgatgtttgtacaggagtaagcatgtatttttatcaatttaacacagatcaaaggagatgaagggacattctgccatgacatacacttaaccaaaactattcaaaatgaaaaccggatttcaaataaccagacaccaagatgcagggcccttattttaaacctttttatttggttagagtgatatgtatttagccatagatggagaaacaaagctcagggtttgttgaattagcatgagagaaaattatgtaccaacagaattatttgtgagaagaatgaacaaattttgataaagtatgaatttgttttattttaaaaagcaaacatactaaattttttttattttattgcttataatttattaagaatgtttacacctgtataaggatttcatatatacattgtatgtgtgtatatataaatacatatatgactgcctaaattgtttataaatttaatttttctttaataggtttcattccttcagagctccattaatgtaatcaaaatgaaatatagattagtttaaatgtgaattcagtgactctagggccaaagaatattaggtatgtttggaaagaatttttgtatttattcctgttacagttttgactttcaacttctctccccgtgcatggaagtcctggtaaaggatctaacatctttattcccttctttcctcttccagctgagcagagttggataattgaattagtcattctgacattctttggaccatatcatcttagtggtttggggtcagtgctcatctgatatatctttcttaccacctcttctacttactttctcttacttaaattatctggcataagcagttatctccagcttttgttagaatcttgcatgttgattactaaaactatactttgtttcccatttatttattacccttttgcatgtatttgtgtgacagggaactctgcagcagggggtgactgacacaccaaacaagatgtttcactgggtactctgccatagaaatggcagattaagaagattgactataccaaacattatattaaaaacacaaaataaaaactataaaaatgtactttaggacattaaagaaaactcaagttagaagcataccattttcctttcatggaagggtacagtattacaaagataatttgtttaacttgatttattaaattctagttatgtgccctataatgatgtttcagtcagtgacagacctcatatatggcagtggttccataagattacaatactgtatttttactgtaccttctttatgtttagatatgcaagtacttaccattgtgttacagtgtcctacagtattcactacaataatatgctgtacaggtttgtagcctaggagcaataggccatagcttaggtgtatagtagatcataccatctaggtttgtgtaagtacactctgtgattgtacaattttaaaatctcctaatgatgatgcatttctcagaatgtatcccctttgctaagcaatgcatgactgcaatcctaattctcacatgttttggggaaaaaattttaattttgaaaaaatttaggaaagttcctaccaaatatacatgtataaagtttattaaaagtcataatgacccaggaatagctaatgacacagaagtagatcaaaatagaacacaatagagaacttcaaaataaaacaggtgtgagaattgtgtgtgtgaaaaagctgggttcaaataagttggtttgttagacattcatatgcctacccatcagccatttcgttctcccttccttgctgacaaagccccattttttttttctttttttttggcctaaaactctgtatggctgccttgtgctatagaatagggtgcttccctagcctagagagggtgagtgttgattagattctgtgccaatcatggtaattggcttacttgatcatttgatggaatctaggctaacgagacaaaggaagtctgaaggctttgaataagaaattttctgttgctcttaacaattgatacaagttagggatttgccagcatccctcttctgcttctcagtgaagatatgtgatatggatgtttgaagctaatctgcaacagccttctgatggccatgaaaggacaagtatggagatgaaagctatcacactgagaatagtgggatgtagatagaaagcacctgaattgtgcttctgaattaaccaatccaggaactgctttacctttggactttttgttatgtgagatattctttatattgttccatttgctttgggtatatgtatattgttacttgtagccaaaaagaaacctctcttagtagaaacaaagggagagttaggttattcaaaaattagtatgggacaattgaatatgcctttttctgcgggagtaggtggggagaaacttaaaggttcacttgtaaaacaataaagtactaaagaaaatgtga

SEQ ID NO: 14597 - DNA, 22582 bp, Homo sapiens
cgcccccgcccagcggccggatcgcatctcagctggttggctttggttagagctcccgtcagactttagttcggccctaggatttggtagccccgaagtgtgggctctctccagtaccagactcatttcagtaccagcctttgggaagtcgtgtgaatacctcggtctcttagccacagggatagaatggcggcctgacggagccgcggcgccggcgaagtcgctgaggcgcgagctggaacccccagaccagctcaaacgggagccaaaactcgaagcttggaagaattagcaggaaatggcggatgaggcgttgtttttgcttctccataacgagatggtgtctggagtgtacaagtccgcggagcagggggaggtggtgagtgctgccacacaaccttgaggtccttttgcggtgacacaccttgtttcccctcagtgctttccttcaacccctgtcccatcgccacccgacgcctcccgaggtgtacacaaaatggtccacctccaggtgtcctaaaccctagaacctgtcagttgtctcctttgaaccgtcatctttcatcgttttctctttcgtatcttcttctatttgattctcttttgtctattcccgtacgtttgtcttgcacgccacagattttggtacttttagtgttgtccctgccattatttacgagagggttaactgcagagcctacttagttttgctggcacttccagcacttgagccatgcactggacagacctgtgccaacctgagaagcctgtccctccttcctcattcctaatgctcagtacaactccacacaacttgagacctgaagcctaatgaaggttgagtttgcaaaggaaagtttgcaggcgttaggataattagggaacataatttaaattaattatttcagaaagtatttatttagtgcccttatgtcagagcgatttctaggtgccagggatatagtagtgaatgaaacaatggccccatccttgtagagatttttttttaatctaatttaatccgaaatgtgatagtatgtagcggttacttctaatatgtgggagtccttattcaatcattgtgggcctgtcactgctgacactgctagataaattaaataaaataatactcctgcctcacagtatttagggaatagtgatttaatgaatagttaacactgagtattggctggtagaatcatggagttgtaacggattttagaaatactccaaagtcatgctcaagtcaggagccctttctttaatgctattgataaaaaatgagtggagagtggggataggaaatgtatcctaggcaaagataaagtggtagaggtatgaaagagtggtggatttaaatacacttaagcatttctttggactagactgaatagagagtgagaagaattgagaggtgaagttagaaagctttgtgtaattaaagaattcggatcttttcgagggaatatttttaaggaagggaatgatgtggaccatttgcattttagaaaagtaatccagtgtttgggctagagagggaagatccttgtagggggaaaatcctttattacgggagtcactgcaggaggagatgaagatctggattaagacagggatagtgagaaaaggagataacagatttgaaagttagaaagtggaattctgtaggccttgtttaaggatgggagtgggagttgaaaattatcgtcaggttttcagcttgagcagctgggttggatggtggtactattaatcagaaaaggaaataaaggagaagaaaaaaataaggaggtaagataatgagttatttcggggcaggttgaacttttgaggtgcctgtatgacatccaaaaaaaggtactgccagtttgcacaagaaggataggcaggatacatttggaaggttattggaaatgaagcgaattctattcttattcaaatgacccatctataatagagatttttttcaagtcacaaacttctgactttattattgacctcaaggtttactgtttgtgcaaagctagccttccttttccctctagaacagttaacacaccccttttacttttttgtcataacccccgatccccccaaaccacttgcgtattcagttctcttcattctcccctcccttcttacctttcctcttctctctctctctttttttttttttttagatggagttttgttcttgtctcccaggctggagtgcagtggtgtgatctcagctcactgcagcctccgcctcttgggttcaagcgattctcctgcttcagcctcctgagtatctggaattacaggtgccggccaccatgcctgactaatttttttgtatttttagtagagacggagtttcaccctgttgaccaggctgttcttgaacttctgacctcaggtgatctgcccgccttggcctcccaaagtgctgggattacaagcgtaagccactgcgcctggcccttttctgactcttgtctagaataatattttttcttctttttaaaatatcttttttttttcccgtgggttaatcctaaataaaatgaacagagctgttctactcaggcctgataattttaagagatggactaacatacaagagaaaggaagttcatagttttgaatcatttaagctaaaaataactttctttttctactgcagtgtatttatgatgggggggaaaattgaaagtacataataagcaaaaattatataaataacagttatgtggtagtcttcataatcagaacccatactgaaatacgggtatataagggttcacattagtgtccatactttgagtgtgcttgaaatttttcatcatgaaaaatgtaaaagatacataatcctgtcatccagaggtgatttttagagatttttttcagacataaaaagatctgtaaaaactatgttgtttatgtctgaaaagacctataaaatccatttctcgctgacaggattatgtgtctttttttttgtttttgttatggaaagtttttttaaatgaaataaagttttataaattttcagtatagcaaaataaacttccataagacttgaggtgagataaaagaaagaaacagtgttctaaccctccaaatcaaggtttttcaaactatgcttaaagaggaattctcttaaaatggactaattgggcatttctcaatttatggtgaatggattttgaaaggctaatggataaaatgttctcaagttgaatttttcttaaaaatttggtgcctactcaaaagtgcatgaacaagtagcaaaattaagtagtagggcttaattcaaaagctcatgtgatcataggatttgaaagtgtctgcatataagcatattgtaactgcccagtgggttcttcttccccactgcccaggtagagctgatctatcaagacaggagaattgcaataaggagtttatgtagagctgctaaatgggagagcagagttttattattgctcaaatcagcctccccaaacatgcagagtctagggtttatcaaggatagtttggtaggctgggggctggggaatgggtgctcctggttggttggggatgcagttacagaggtgggggccagaggaccagttggagtcatccgaaatgcaaaagtctgaaaagacatctcaaaaggccttttttaggttctacaatagtgatattatttacaggagtaattggggaagttacaaatctgtgacttccagaataatgtctgattatcatttaactacctacattttagcagaattcagacccctctcataagcctaaccttatagtctttcattagttttgcaaaggtgatttagtttcgggaagggctattatcattcttgctttaagcttacactataaactaaatttctcccaaagttagcttgggctgcatccagaaatgaccaagggcagcttggaggttaaaggcaagatggagttgattaggtgagatctcttttacagtcatgattttcttactgttacaatctttgcaaaggtggtttcaatagttcctgctaataaatatgttcctaggtgattctacagagagcagattattccaaaaagagcatcatgatttacagacacttattctagctgaacttgtttttttgttttttttttttttaagagacaagtctctgggttagtgtggtggctcacacctgtaaatcccagcactttggaaggctgaggtgggagaattacttgagcccaggagttggagaccaacctgggcaacatagtgaaacagtgtctctatttaaataaaaaaaaaaagaggctggacacggtggctcaggcctgtaatcctagcactttgggaggccaaggcaggcaggtcacaaggacaggagttccaggccagcctggccaacatggtgaaactccgtctctactaaaaatacaaaaaatagctgggtgtggtggtgcacgcatgtagtcccagctactcgggaggctgaggcagaagaatcacttgaacccaggaggcggaggttgcattgagccgagattgtgtcactgcactccaacctgggtgacagagcaagactcagtctcaaaaaaaaacagagagagagagagagagacaatgtcttgctctgtcatgcaggctgaaatgcagtgttgggactttggctcactgcagccttgacctcctgggcttaagtgatcctcccacatcagcctctcgaatagctagggctatgggcatgctaccatgtccagctaattaaaaaaatttttttttgtagaaacagagtcttgctatgttgctcaggctggtctcagactcctagtctcaagtgaccctcctgcctcagcctcctacggtgctgggattataggcatgagcactgcgcctggcctcatcctaagcatgtttgagaagtgtggagaatagcagaaaaactgaagatagtgatacgtacagtaatagatgtatgtacagaattttacgacagcatagggcctaaggaagtttcagggaagccatctgggagaatgtaatacttgagcagaatttaaagaatgtgaatgccaggcgcggtggctcacgcttgtaacccagcactttgggaggccgaggcgggcggatcacaaggtcaggagatcgagaccgtcctggctaacatggtgaaaccccatctctactaaaaatacaaaaaattagccgggcgtggtggcggtcgcctgtagtcccagctactcaggaggctgaggcaggagaatggcgtgaacctgggaggcagagcttgcagtgagccgagatcacgccactacactccagcctgggcaactgagcgagactccgtctcaaaaaaaaaaaaaaaagaatgtgaagtctagggaatagcacataaaaaggcagggagacagaagagaacatggcactctggagttgctgcagaaatttcagagtggtaaaagggaaggatgtttgtgaatttggttaactagccaggagtctttaaggaaaggacataccatgatgccatgctaaggagtttggactttattttttgtttgtttgttggtttgttttgagacaggatctcactctgttgcccggtctagagtgcagtggctagatattggctcactgaaacctctgcctcctgcactcaagccatcctcctacctcagcctcccaagtagctgggactataggtgcatgccaccatgttcacctaatttttgtaatttttttaaagatgaggtttcactatgttgcccaggctgccctcgaactcctaagctcaagcaatccttggcctcccaatgtactgggatttacaggcatgagtcactacatcaggcctggactttattttgaagaaaggggagcaggtgctgaaattccagtagagaataacatgattttttttttagacagagtttcactgttattgcccaggctggaatgcaatggggtgaccttggctcactgcaacctccgcctcctgggttcaagcaattctcctgcctcagcctcccgagtagctgggattacaggcatgcgccaccatgcccagctaatgttttatgtttttagtagagatggggtttttccgtgtcggtaaagctggtctcgaactcctgacctcaggtaatccgcctgcctcggcctcccaaaatgctaggaggcgtgagccatcatgcccggccgagaataacatgattttttttagaaatttactttagtagaagttacactaccagaaatatagaagatgacacaaagtaggaaaaaatgagacaagaccagttggaaagctatagctaaaaaccaggagagaaatgataaggctttacttaagaagtaagggtagagagagacgatgaattttgaaaagcttgtaaaagataggctccaccggactacagtgtatggggggttgggagcacaggggtgaagaaaatggaagttttctggttggagtaactaggtgaatggtggtgccattaatgaagttaggaaattttggaggcagagcaggctgaagacattaataaaatgaatatcatttgaatatgcatacttcgaaggtcctgtgggaccactagatgtctatgcccaataaagtctgtactagaaacgcagatttaatagtcacagcaccataagcagagtgcatggttccttagaagaaagtttagcaaataataagccctatggtttccttagtgggagacaaacagccttcagaatatacaaaaatccctgcctttttggagctttattttagcagagaggggaacaaggggcacatgggcaatataaaatagtaaaatgtatggtatattaaatggtgaaagaagttctgtggagacagattaagcaaggaagtgggactgagtatcaaaatcaatttttagaaggtttgttaaagctgattagcggccccatacccagagtttctgattaagtaaattgggagtgggactagagaatttgcaagttcccatgtgatgctgatgttgctggtcttttttttttttttttttctggtgatgaagtctcgccctgtcacccagactggagtgcagtggcatgatctcggctcgctgcaatctctgcctcctgggttcaagcgtttctcctgcctcagcctcttgagtagctgggactacaggtatgtgccaccatgcccggctaattttttgtatttttagtagagatgaggtttcactgtgttagccaggatgatctcgatctcctgacttcgtgatccgcccacctcagccttccaaatgctgggattacagatgtgagccaccacacccagccaacacatttttaaaatcactaggatagagagttgccaaaggggtatgatgttgcacttttaaagaagatggttaaaatgggcctaagatggtgacatgagagtagactcaaaggaagtgagggagttggttgtgtgactatctggaggaagagttgatgcaaaagcccctggaatgtgcctggcatgtttaagggacggggcagagtgcatctgcagaaggttgaagccagagaggtatggggtctggattgtagaggacagtccatcagtcatccataggatttggatgtgttcagcatagaggtactatttcaagccttaagattgaatgagattgtcaaagaaagagcaaagcaatctcatgatttaaggcaaagtgtgataatcagctaagacactgagaactgggaagcctggatgattctgagacattttgaagcaaggaacaatagaacttagagcagaaagcaaatgactcagggaaaaacatcaaaggtgataccaggttttataacctaggagagaagaatgattgaaattgggataaaagggagacgaggagtaattaggaagaggatttgatttctgaaaatcaattataagcagtagttccctgtttatcctgttgccttgtgccaggtgcagtggctcacacctgtagtcccacagctttgggaggccaagccaggaggatatcttgaggtcaggactttgagaccagcctgggtaacagagtgagatcccatctcttaaaaaaaaaaaaaatagccaggcatggtgatgtgcctgtagtcctagctacttgggagactgaggtgggaggattgcttgaacccaggaatttaaagcttcaatgaaccatgatctcgccagtgcactgcagcctgggcgacagagcaagacttgtcaaataaataagtaaatagcagtttggtcttttgttggaggaacgtctattcttagcttggacactgcggtttttccttgggcagcagaagcaatgtggcgattgaagaagtgacctaaaactttgatgttaggtagaagcagatggcccaagccaagacaagtgcttgtaaatccactggtgggagcccctcctcctaacagcaggttattaacgctgccagaaaaaaagtgtcccctctaccggtctggtgaagaaacctcatcgctacgggcctgggactgtggcacttctagagattctcgttaccagaaattgacctagcttctcatctggaagctgcctttctagaggttggtgagagagatcacccaggatttcaaaaccaactttaggtttcagagcacagtcattggggtgctgcaggaggctagtgaagtgtacctggaggctagtgaagtgtacctggtgggttggtttgaagatgctaatttgtgtgccatctacggtaagagagttggctctcatgcccaaagacatccagttggctcgccagacacggagtgagcgagcttaagtgaaggcagattttaaggcattttatatgaattctgtaaaatactttggtttaatttgtgactttttggggagaaattatttataatatgttgcatttgtgcttaagtcattccgtcttttgggatgaatgtgaaaagtgactgttcatagacctcagtgacgtaagcactgttgctcaggagtgacaagttgctaatacgcagaagggatgggtgacattttttcattctcatgacgcatgtttctgtaagttaatgacttgttaggtagctattaaggaactagagttgataaataaatgtgtataggttccttttgcaatataactggttattacttgatccaagtgtttaacatttggagctaagtctgaccatacattactgtgatagaatgtgggccttttcaagggtgaagatacaagccttaaccacagtataacttgcagtttccttaaacaaacaaagaaataaaaacctagcatggagtacattatgtgcatttataatagctattttaaatattgtagtgtcaacattcaaaaattaattcttttacattcgcaaatggtggggagtcttgtcattaaggtgtgtataacttagaatccacttggttttctcctaactggactgcatttgttttcatagtagtaaaatgttatgtgtattacaccttgcataagtcctcattctactacgtgttaactaaccctctagatgataatgcagatgctaactgtgggattttatttataagaactctagaataaataccagttattcctaccaacatcggctgttactaatattctgaagtagttagtgcaacttttcattgtgttgtggttggtctcctaagtaggttggatttttctcctcttctaagagaaaacaatagtgaaattattttctttctcttttctctctgtttctgtctctttctctctctctttctcccttcccttcccttccctcccctcccctcccctcttcttttcttttctttctcttctcttctcttttctttctttcatggggtcccttgctcaacctgttgcccaggctggagtgcaatgacatgatcatggctcagtgcagcctcaacttcctggactcaagcaatccacctgcatcagcctccaaaatggcacatgctaccatgcccagctattttatttttacttttagtacagatgtggtcttgctatgttgcccaggctggtcttgagccattgagctcaagtgatcctcctgctttggcctcctaaagtgctgggattacaggcatgagccaccgtgtcttgaggggtttgtttctattaaaagacttggtgtcagggaggagcacaaagctttaacccattgaacctctgacagttaagatggtgttgggttaggttacatctggttactatcctgggaaaatcacttctatagagatggccttccaagtggttttaaaatgtatctttctgtctgggcgcggtggctcacgcctgtaatccctgcactttgggaggccaaggcaggtggattgcttgaggtcaggagtttgagaccagcatggccaacattttgtatttttgtattttctctactaaaaatacaaaaattaaccaggcatggtggtgggtgcttataattccagctacttaggaacctgaggcaggagaatcacttgaaccctgtagatggaggttgcagtgagccgagatggccccactgtactgcagcctggatgacagagcgagactccatctcaaaataaattaaaaaaatgtatccttctattgaagtttttaggttaatcatgtatatgttgactaaattatgaattaacttgtttatcaaaaaaaaagtaaaaagtaaagtaagtaaaagtaaagtaaaataaataaaatcaaccttataattcactttttcttaaactgtttcagggaaaaaagtataaatgtttacattaatatttttaaccaatcttgtaaaacaatttctgaatactaacatcctagcattctaaaagtatttaaaactattgttttttaaaataggaaaacggacgatgtattactaagctggaaaacatggggtttcgagtgggacaaggattgatagaaaggtgagcaggttggatttgaaaattttcttgcaggtaggttataaacaaaggtgatctatttcaaaagattgcataaaacttgggatattttaattttaattcctgaatgttattctctttacttcaaaaattaaaatttctttttagatccaatgccatttaactcatttattcaaattttattttaatgtttaaagaaaatatatattttatatattttagactttcttcctgaagctattttagactttattcctgaagctattgaagcaactatctaaaatcttactgcattttcaacttaagatctgctaggttctttaacctgcatagaatttttaagtacataggtttgaaataactatagtctatgtttatgcgtgtaattatctttgaacttataaatcagttctttttagtatttctttctcactacctgaatagttaaactcggagtatattttatataacaatgtcatgataatgctcagctctttgttcttttgtggttttttgatgtgctagaatgcattgcacctgaaattttggctataatgttagactaatttgaggcctcataatttatataacataatgtgaatccattgagataggatcatgttacctggtgcttatgactttattagtgttaataaatgttcagccaggtgtggtggctcatgcctgtaatcccagcactttgtgaggccaaggtgggagaatctcttgagctcaggagtttgagaccagccagggtaacaaagtggaaccctgtctctacaaagatatacagattagctgagcatggtgacatgtgcctgtggtctcagctgctagggaggctgaggtgggaggatagcttgagcctgggagggaggtagacgttgcaatgagccgagattatgctattgcactctaacctgggcgacagagccagaatctgtctcaaaaaaaaaattaaaattaaaaaacccaataaatgttcagtgctgttctggcatttggaaattagttaataattagtccctcttgctttttttggaggagaaatactgtattacttctagttgatctttttaggtttacaaaagatactgcaaggttcaaggatgagttagatatcatgaagttcatttgtaaagatttttggactacggtattcaagaaacaaatcgacaatctaaggacaaatcatcaggtaattaaattaattaaggcctatattttaaagtcctttaacttgatataaatatcgtattttagtgacttatttaaaacctaaaataatttctggttaactttggaatatgtttatgttattaatgagttattagtttttttcttctaatagtgtgaactgagtaaagacaaagggacagttatcagtaatgatagctgttcctttcacccaattatatgctatgttaagttttttaaagtagcataagtcaggatgagaatagcttttactatttggttccttagttactgttaattagtggtaataatatgcagaaccacaaatatatcacctttatgtctttagagtcatttcttttttttgaagaagaagaatttggattattttaattatttttatatacagaaaactcaacagtgtatgtttaacccagtttggtgtcaagttctttagcctttgccttttcctgcttgacaattcaagccacagacttgagacccaggacattgcctccccagtgacagtggatttcgttttgtctgtcgtaattggttctgatagcttccaccagctgaacctaagctccattgtcctctgagttaatctgtgtaaaggcgacagtggtgcgggtcttcttgtggattagacatcccagtcttgccttccccttgataatgcggtaagggacccccattttatgacacaaggcaggcaggaagacagccacctcgatgggatccacatagtgtgcagtcaccaccagctgagccttcttgttctcctccaaggtggagatggtgttaactcctgctcggaggacaagtggtctcttagtggggacatcccctttgcctgcagctttcttttcagcccgggccaatagcctctgcttattttcttgctttgtctttggtctgtacttgtgggccagcttaagcagctaagtagctatttggcggtgcagggcctgggtgaactggttaattgtaggaggcactttcagctgcttacagaggatggctttgtgccactgcaacctgatatagcggggccatttcacaaagtgagtgaggtccatattgggtggatgtcctgtccaatgccagaattcttaggccttttctcaaacaggggattcaccactttctttctttcttttttttttttttttttttgagatggagtcttgctgtgttgcccaggctagagtgcaatggtgcgatctcggctcaccacaacctccgcctcctgggttcaagccattctgcctcaggctcccaggtagctgggactacaggcatgtgccaccactccggctaatttttgtatttttagtagaggtggggtttcaccatgctggccaggctggtctcgaactcctgacctcaagtgatccgcttgtctcggcctcccaatgtgctgggagtacagacgtgagccaccacgcccaaccaggattcaccactttcttggcctcctgtttcttcatgacaccaagggccagagccacctccttcctcttggcctttccttttggcatcttgggtggcaggaagagattctttatagtcatttctaaagtctaatttatagagcattttactcttaaataactcctggattattactgctgtcatattttctactcttaaaagattttcttactacaaaattaatagattacatagaaaactatgtatttattaaaattttaaaagggagacagagtctcgctttgttgcccagactagtcttgagctcctggactcaagtaattctttggcctcagcctcttgcatagctgggattataggcatgcaccaccactcccagcttcattagattttattttatgaacttcaaggaaatacttagagtagatttggaattttgattaagtaaaaaattaaatgtatctggtactctcaataggataattcatttatttatttatttttaattagagacagtgtctcactatgttttccagactggtctcaaactcttgggctcaatggatcctcccgccttggcctcccagagttctgggattacaggtgtgagccactgtgcctggcctggaattcattttgtaccaactttagcttggaattactggaaatgctaataggaagaaatgactatgatttttttactctctagacatgatttactaatatatatcagctggctggacatggtggctcatgcttagaattgcagcattttgggaggctgaggcagaaggattgcttgagctcaggagttggagaccagcctgagcaacatacttagaacctatttctacaaaaaacttgaaaaaaatttcaccaggcatattggtatgtgcctgaggtttcagctacatgggaggagttcaaggatacagtgaaatactacacttttgcctggataacagcaaaattctgtctcttaaaaaaataaagctgggcgcggtggctcacccctgtaatcccagcactttgggaggccgaggtgggcagatcacctgaggtcaggagttcgagaccagcctggccaacgtggtgaaaccctgtctctactaaaaatacaaaaattagccaggcatattggcgcacgcttatagtcccagccactcaggaggctgaggaaggagaattgcttgaacccgggaggcagaggttgcagtgagcctagatcacaccactgcactccagcctgggcgacagagcaagactctgtctcaaataaacaaataaatccgggtgcggtggctcacgcctataatcccagcacttcaggaggccaaggcgggtggatcacctgaggttgggagttcaagaccagccctgccaacatggagaaaccccgtctctactaaaaatacaaaattagctgggcgtagtggcgcatgcctgtaatcccagctacttgggaggctgaggcaggagaatcacttgaacccaggaggcggaggttgtggtgagctgagatcgagccattgcactccagcctgggcaacaagagtgaaactctgtctcaaaaaaataaataaataaaaataaaaattaggtcgggtgtggtgatcatacatgtaatttcagcactttgggaggctgaggcaggaggattacttgagccctggagttccagaccagcctaggcaacatagggagaccccctttctacaaaaaattaataaaactagccgggtgtggtggcatgtgtctgtggtcccagctactcggaaggctgaggcaagagaattgctaaacacccaggtgtttgagggtgcagtgagctgtgattgcaccaccacactccagcctagacaacagagtgagagctcatgtctaaataaataactatacaaacaaacagcttatttcatgtggacatgtattaatgattccatcgtactagactatgagtttttaaggatagggactatgtctcagacagtgtttttatcttcagtgtataaaaccgttcggtatacattagtgttgtgaaaatactgaactcgcaactcttcagcttgaacattgcaaaactccttcatttaaacaaaatttgaccaggctgggcacgtgggcttatgcctgtaatcccagcacttcgggaggtcaaggtgggcagattgcttgagcccaggagtttgagaccagcctgggcaacatggcgaaaccccatctgtacaagaaatataaaaattagcagggcatggtgatgcacgcctgtagtcccagctacttgggagcctgcggtgggaggattgattgagtctgggagttggaggctgcagtgaggcgtaattgtgccactgcattctaccctgggcgacagaggagaccccgtctcaaagaacagaaaaagaaaacttggccaatgggaaggagacttttaataactttaaaaaacacttaaattgtttcataagaataaaataattttaaggactgctaggtacattgactttggattttttttctatttttggaacagggcatctatgtacttcaggacaacaaatttcgcctgcttactcagatgtctgcaggaaaacagtatttagaacatgcatctaaggtatttaatggaatagaagttggggtttttgttaatagtaggactacagggaaaagtacagtgctaatcataacaaactattgaattaaaaatatgttttaaggtgttcttttttgtttaaagagttttctatgaaatgagagacatgttacaataacactaaactgtagctaaatagtcatagagtgaccaattaaagaaacactggccgggcgctatggctcacgcctgtaatcccagcactttgggaggccaaggcaggtggattacctgaggtcaagagttcaagaccagcttggccagcatggggaaaccctttctctactaaaaatatgaaaaatagctggacgttctggcgagcgcctgcaatcccagctattcgggaggctgaggcaggagaatcacttgaacccgggaggcagaagttgcagtgagctgagatcgtgctatcattgcactccagcctggggtataagagcaaaactccatctcaaaaaaaaaaaaaaagaaaaaaaagaaacactataactaaatgacagtgaaatgtagatgtatggtagatcactttttttttttttttaagacaaggtcttgctctgtcatctaggctggagtgtagtggtacaatcatggcctatcttgaccttgacccccccgggctcaagtgatcctcccacttcagtcacccaaggaggtaggactgcaggtgtgggccaccatgcctggctaatttttaaaaaaattttttagagatgggatcccacgatgttgcccaggctcgtcttgaactcctgggctcaagtgatcacctcacctcggcctcccagtgtgttgggattacaggtgtgagccactgcatccggcctgattgcctattttctatatttttggggtatccaggctctaattacatttttatggttaatgtgtatattttctctcttttttttttttttcggacagagtgtgagactcactgcaacctctgcctcctgggttcaagtgattctcctgcctcagcctcctgagtagctgggattacaggtgtgcgccaccatgcctggctaattttttgtatctttagtagagacagggtttcaccatgttggcgaggctagtctcaaactcctgacctcgtgatccacccacctcagcctcccaaagtgctcggattacagacgtgattacaaaagccacccaaaatgctgggattacagcctcccaaagtgctgggattacagacgtgattacaaaagccacccaaaatgctgggattacagcctcccaaagtgctgggattataggccatgcctggcatattttctcttttttactaacttcttagtttaatatttctggttctcacttaactttttgggatcttggtttcttcagctgtgaaaagagtaagttggaccaattcagtgatttctaactattttgagttatggacatctttgagaactggaacacctttccccataaatacgcacatatacatggtttttattttcataggggtcacaaattccccgattaagaactcttgggatgaacaatctctaaggcctcttccagcttaaaatttcatgactcagatctagttacttattagtgcccatttatgtatattatttataagataatattttatattattcgtagataatgtagtatgttgaacatcatgcagtatagatgtgggtaatcaaaaattccctgaattgctaatttttcaatccagttcttgtcatgacttttggttttgtagctcagccctattccctttctttgtttctatatgacagggtttctcaacgtccaaactgttgatactttcaaccagataattctttgttgtggcaagctataagtcttgaacaagtcaagattcttggttgtaaataggggaaagaaattctgcttgtaagctaacaaaattgataagctcaaagaataggcaataaccaggggaggttaaggcagccagtaagatagccaagtcactctgcagactgtatctacttagaatcctgcaggcagcagggactgtagacacaaactacctttactgcctccagaactaattctgatcagtttctggcttgtttttgtcactgagtctagattcacagtcctggactggagtacttaattggctgagcttaagtcttaagtcctacgtccatgctttagtttccagggagctgggaaatatatcaatatttttcagtaatttgaacagttcttcaaaatcctttttttaaacaggaatgacttactgatgataaatcatgtaatgttgtatttatcaatagctttactattttagtaaatccttactatttttaatgattttttttccttttagtatttagcatttacgtgtggcttaatcagaggtggcttatcaaacttgggaataaaaagtattgtaacagctgaagtgtcttcaatgcctgcttgtaagttgaattcgcctttcttacaaatgttttagtaatttgttttcaggtctgtttttttttttaatttaactgagaggaaatttaaaatgctgaaactttcattttagttttatcaatgtaacactttagtgtagtaatatgtagcatactacattcattttcagtaatttttgaataatggactaaaatccaaatttataagacaatttaagggatgatttttaacttttctaaagttattcaaactgtaacttttttaaagatattcttctgaatatctcctgcagtgttttaagatagcaaatttccctagaacattgaaaatgctattttttttttttttttttttttttgagacggagtctcgctctgttgcccaggctggagtgcagtggcacaatctcggctcactgcaagctccacctcccgggttcacgccattctcctgcctcaacctcccgagtagctgggactacagttgcctgccaccacgcccagctaattttttgtatttttagtagagatgggtttcaccgtgttagccaggatggtctccatctcctgaccttgtgatccgtctgcctcggcctcccaaagtgctgggattacaggcatgaaccaccgcgcccggcccgaaaatgctatttttaaacaattgtttaggatatgtctattatatcaagctaagtaaaaccaaatattcttttatcactaaatgtctccctaaagatcttttcaccagagctaccaaccaagaaaaaatggacttgagctttattgtatttcttttcaatttacaatgatcattagccatgaaatactgtacccaaatgtaggattcataaagagaaacaaaagtgcttactcaacaaaccatataatcatcccataaaaatagaattgactggccgggtgtggtgcctcacacctgtaagctcagcactttgggaggccgaggtgggcgtatcatgaggtcaggagtttgagaccagcctggccaataaggtgaaaccctgtctctactaaaaatacaaaaattagctgggcgtggtgacagacgcctgtagtcccagctactcaggaggctgaggcaggagaatcacttgaacccaggaggtggaggttgcagtgagcagagatcgtgccactgcactccagcctgggcaacagagcaagactccatctcaaaaaaaaagaaaaaatagaattgactttattgaatattatgaagaatgcgaaaaagtttttgacatagcagatttcttgactgaaactatttcctatatggaacagaaaattgatgtttagacttgttttctttgtatctaaaatcaaagaattatttgtatttttttttttaggcaaatttcaggtgatgatacagaagctgtagaacatactgaaatgcaaggcttcaacagtgtaaagagataaattattcatgtaaaagtatttcaagtagtgatgatttaattacattgttcgatgtttgtacaggagtaagcatgtatttttatcaatttaacacagatcaaaggagatgaagggacattctgccatgacatacacttaaccaaaactattcaaaatgaaaaccggatttcaaataaccagacaccaagatgcagggcccttattttaaacctttttatttggttagagtgatatgtatttagccatagatggagaaacaaagctcagggtttgttgaattagcatgagagaaaattatgtaccaacagaattatttgtgagaagaatgaacaaattttgataaagtatgaatttgttttattttaaaaagcaaacatactaaattttttttattttattgcttataatttattaagaatgtttacacctgtataaggatttcatatatacattgtatgtgtgtatatataaatacatatatgactgcctaaattgtttataaatttaatttttctttaataggtttcattccttcagagctccattaatgtaatcaaaatgaaatatagattagtttaaatgtgaattcagtgactctagggccaaagaatattaggtatgtttggaaagaatttttgtatttattcctgttacagttttgactttcaacttctctccccgtgcatggaagtcctggtaaaggatctaacatctttattcccttctttcctcttccagctgagcagagttggataattgaattagtcattctgacattctttggaccatatcatcttagtggtttggggtcagtgctcatctgatatatctttcttaccacctcttctacttactttctcttacttaaattatctggcataagcagttatctccagcttttgttagaatcttgcatgttgattactaaaactatactttgtttcccatttatttattacccttttgcatgtatttgtgtgacagggaactctgcagcagggggtgactgacacaccaaacaagatgtttcactgggtactctgccatagaaatggcagattaagaagattgactataccaaacattatattaaaaacacaaaataaaaactataaaaatgtactttaggacattaaagaaaactcaagttagaagcataccattttcctttcatggaagggtacagtattacaaagataatttgtttaacttgatttattaaattctagttatgtgccctataatgatgtttcagtcagtgacagacctcatatatggcagtggttccataagattacaatactgtatttttactgtaccttctttatgtttagatatgcaagtacttaccattgtgttacagtgtcctacagtattcactacaataatatgctgtacaggtttgtagcctaggagcaataggccatagcttaggtgtatagtagatcataccatctaggtttgtgtaagtacactctgtgattgtacaattttaaaatctcctaatgatgatgcatttctcagaatgtatcccctttgctaagcaatgcatgactgcaatcctaattctcacatgttttggggaaaaaattttaattttgaaaaaatttaggaaagttcctaccaaatatacatgtataaagtttattaaaagtcataatgacccaggaatagctaatgacacagaagtagatcaaaatagaacacaatagagaacttcaaaataaaacaggtgtgagaattgtgtgtgtgaaaaagctgggttcaaataagttggtttgttagacattcatatgcctacccatcagccatttcgttctcccttccttgctgacaaagccccattttttttttctttttttttggcctaaaactctgtatggctgccttgtgctatagaatagggtgcttccctagcctagagagggtgagtgttgattagattctgtgccaatcatggtaattggcttacttgatcatttgatggaatctaggctaacgagacaaaggaagtctgaaggctttgaataagaaattttctgttgctcttaacaattgatacaagttagggatttgccagcatccctcttctgcttctcagtgaagatatgtgatatggatgtttgaagctaatctgcaacagccttctgatggccatgaaaggacaagtatggagatgaaagctatcacactgagaatagtgggatgtagatagaaagcacctgaattgtgcttctgaattaaccaatccaggaactgctttacctttggactttttgttatgtgagatattctttatattgttccatttgctttgggtatatgtatattgttacttgtagccaaaaagaaacctctcttagtagaaacaaagggagagttaggttattcaaaaattagtatgggacaattgaatatgcctttttctgcgggagtaggtggggagaaacttaaaggttcacttgtaaaacaataaagtactaaagaaaatgtgata

SEQ ID NO: 14598 - DNA, 3229 bp, Homo sapiens
cgcccccgcccagcggccggatcgcatctcagctggttggctttggttagagctcccgtcagactttagttcggccctaggatttggtagccccgaagtgtgggctctctccagtaccagactcatttcagtaccagcctttgggaagtcgtgtgaatacctcggtctcttagccacagggatagaatggcggcctgacggagccgcggcgccggcgaagtcgctgaggcgcgagctggaacccccagaccagctcaaacgggagccaaaactcgaagcttggaagaattagcaggaaatggcggatgaggcgttgtttttgcttctccataacgagatggtgtctggagtgtacaagtccgcggagcagggggaggtggaaaacggacgatgtattactaagctggaaaacatggggtttcgagtgggacaaggattgatagaaaggtttacaaaagatactgcaaggttcaaggatgagttagatatcatgaagttcatttgtaaagatttttggactacggtattcaagaaacaaatcgacaatctaaggacaaatcatcagtatttagcatttacgtgtggcttaatcagaggtggcttatcaaacttgggaataaaaagtattgtaacagctgaagtgtcttcaatgcctgcttgcaaatttcaggtgatgatacagaagctgtagaacatactgaaatgcaaggcttcaacagtgtaaagagataaattattcatgtaaaagtatttcaagtagtgatgatttaattacattgttcgatgtttgtacaggagtaagcatgtatttttatcaatttaacacagatcaaaggagatgaagggacattctgccatgacatacacttaaccaaaactattcaaaatgaaaaccggatttcaaataaccagacaccaagatgcagggcccttattttaaacctttttatttggttagagtgatatgtatttagccatagatggagaaacaaagctcagggtttgttgaattagcatgagagaaaattatgtaccaacagaattatttgtgagaagaatgaacaaattttgataaagtatgaatttgttttattttaaaaagcaaacatactaaattttttttattttattgcttataatttattaagaatgtttacacctgtataaggatttcatatatacattgtatgtgtgtatatataaatacatatatgactgcctaaattgtttataaatttaatttttctttaataggtttcattccttcagagctccattaatgtaatcaaaatgaaatatagattagtttaaatgtgaattcagtgactctagggccaaagaatattaggtatgtttggaaagaatttttgtatttattcctgttacagttttgactttcaacttctctccccgtgcatggaagtcctggtaaaggatctaacatctttattcccttctttcctcttccagctgagcagagttggataattgaattagtcattctgacattctttggaccatatcatcttagtggtttggggtcagtgctcatctgatatatctttcttaccacctcttctacttactttctcttacttaaattatctggcataagcagttatctccagcttttgttagaatcttgcatgttgattactaaaactatactttgtttcccatttatttattacccttttgcatgtatttgtgtgacagggaactctgcagcagggggtgactgacacaccaaacaagatgtttcactgggtactctgccatagaaatggcagattaagaagattgactataccaaacattatattaaaaacacaaaataaaaactataaaaatgtactttaggacattaaagaaaactcaagttagaagcataccattttcctttcatggaagggtacagtattacaaagataatttgtttaacttgatttattaaattctagttatgtgccctataatgatgtttcagtcagtgacagacctcatatatggcagtggttccataagattacaatactgtatttttactgtaccttctttatgtttagatatgcaagtacttaccattgtgttacagtgtcctacagtattcactacaataatatgctgtacaggtttgtagcctaggagcaataggccatagcttaggtgtatagtagatcataccatctaggtttgtgtaagtacactctgtgattgtacaattttaaaatctcctaatgatgatgcatttctcagaatgtatcccctttgctaagcaatgcatgactgcaatcctaattctcacatgttttggggaaaaaattttaattttgaaaaaatttaggaaagttcctaccaaatatacatgtataaagtttattaaaagtcataatgacccaggaatagctaatgacacagaagtagatcaaaatagaacacaatagagaacttcaaaataaaacaggtgtgagaattgtgtgtgtgaaaaagctgggttcaaataagttggtttgttagacattcatatgcctacccatcagccatttcgttctcccttccttgctgacaaagccccattttttttttctttttttttggcctaaaactctgtatggctgccttgtgctatagaatagggtgcttccctagcctagagagggtgagtgttgattagattctgtgccaatcatggtaattggcttacttgatcatttgatggaatctaggctaacgagacaaaggaagtctgaaggctttgaataagaaattttctgttgctcttaacaattgatacaagttagggatttgccagcatccctcttctgcttctcagtgaagatatgtgatatggatgtttgaagctaatctgcaacagccttctgatggccatgaaaggacaagtatggagatgaaagctatcacactgagaatagtgggatgtagatagaaagcacctgaattgtgcttctgaattaaccaatccaggaactgctttacctttggactttttgttatgtgagatattctttatattgttccatttgctttgggtatatgtatattgttacttgtagccaaaaagaaacctctcttagtagaaacaaagggagagttaggttattcaaaaattagtatgggacaattgaatatgcctttttctgcgggagtaggtggggagaaacttaaaggttcacttgtaaaacaataaagtactaaagaaaatgtgata

SEQ ID NO: 14599 - DNA, 22722 bp, Homo sapiens; identical to SEQ ID NO: 1285

SEQ ID NO: 14600 - DNA, 4533 bp, Homo sapiens
gctctgcccccgacatcgtggtgagaggggaaccttcctcatatctgggcgctggcctctccgggcttgggagagaggaactcagtgatcatagagctggccgaatgccggggtagaggggaccggaagttgtttttttcgcccccgcccagcggccggatcgcatctcagctggttggctttggttagagctcccgtcagactttagttcggccctaggatttggtagccccgaagtgtgggctctctccagtaccagactcatttcagtaccagcctttgggaagtcgtgtgaatacctcggtctcttagccacagggatagaatggcggcctgacggagccgcggcgccggcgaagtcgctgaggcgcgagctggaacccccagaccagctcaaacgggagccaaaactcgaagcttggaagaattagcaggaaatggcggatgaggcgttgtttttgcttctccataacgagatggtgtctggagtgtacaagtccgcggagcagggggaggtggaaaacggacgatgtattactaagctggaaaacatggggtttcgagtgggacaaggattgatagaaaggtgagcaggttggatttgaaaattttcttgcaggtaggttataaacaaaggtgatctatttcaaaagattgcataaaacttgggatattttaattttaattcctgaatgttattctctttacttcaaaaattaaaatttctttttagatccaatgccatttaactcatttattcaaattttattttaatgtttaaagaaaatatatattttatatattttagactttcttcctgaagctattttagactttattcctgaagctattgaagcaactatctaaaatcttactgcattttcaacttaagatctgctaggttctttaacctgcatagaatttttaagtacataggtttgaaataactatagtctatgtttatgcgtgtaattatctttgaacttataaatcagttctttttagtatttctttctcactacctgaatagttaaactcggagtatattttatataacaatgtcatgataatgctcagctctttgttcttttgtggttttttgatgtgctagaatgcattgcacctgaaattttggctataatgttagactaatttgaggcctcataatttatataacataatgtgaatccattgagataggatcatgttacctggtgcttatgactttattagtgttaataaatgttcagccaggtgtggtggctcatgcctgtaatcccagcactttgtgaggccaaggtgggagaatctcttgagctcaggagtttgagaccagccagggtaacaaagtggaaccctgtctctacaaagatatacagattagctgagcatggtgacatgtgcctgtggtctcagctgctagggaggctgaggtgggaggatagcttgagcctgggagggaggtagacgttgcaatgagccgagattatgctattgcactctaacctgggcgacagagccagaatctgtctcaaaaaaaaaattaaaattaaaaaacccaataaatgttcagtgctgttctggcatttggaaattagttaataattagtccctcttgctttttttggaggagaaatactgtattacttctagttgatctttttaggtttacaaaagatactgcaaggttcaaggatgagttagatatcatgaagttcatttgtaaagatttttggactacggtattcaagaaacaaatcgacaatctaaggacaaatcatcagggcatctatgtacttcaggacaacaaatttcgcctgcttactcagatgtctgcaggaaaacagtatttagaacatgcatctaagtatttagcatttacgtgtggcttaatcagaggtggcttatcaaacttgggaataaaaagtattgtaacagctgaagtgtcttcaatgcctgcttgcaaatttcaggtgatgatacagaagctgtagaacatactgaaatgcaaggcttcaacagtgtaaagagataaattattcatgtaaaagtatttcaagtagtgatgatttaattacattgttcgatgtttgtacaggagtaagcatgtatttttatcaatttaacacagatcaaaggagatgaagggacattctgccatgacatacacttaaccaaaactattcaaaatgaaaaccggatttcaaataaccagacaccaagatgcagggcccttattttaaacctttttatttggttagagtgatatgtatttagccatagatggagaaacaaagctcagggtttgttgaattagcatgagagaaaattatgtaccaacagaattatttgtgagaagaatgaacaaattttgataaagtatgaatttgttttattttaaaaagcaaacatactaaattttttttattttattgcttataatttattaagaatgtttacacctgtataaggatttcatatatacattgtatgtgtgtatatataaatacatatatgactgcctaaattgtttataaatttaatttttctttaataggtttcattccttcagagctccattaatgtaatcaaaatgaaatatagattagtttaaatgtgaattcagtgactctagggccaaagaatattaggtatgtttggaaagaatttttgtatttattcctgttacagttttgactttcaacttctctccccgtgcatggaagtcctggtaaaggatctaacatctttattcccttctttcctcttccagctgagcagagttggataattgaattagtcattctgacattctttggaccatatcatcttagtggtttggggtcagtgctcatctgatatatctttcttaccacctcttctacttactttctcttacttaaattatctggcataagcagttatctccagcttttgttagaatcttgcatgttgattactaaaactatactttgtttcccatttatttattacccttttgcatgtatttgtgtgacagggaactctgcagcagggggtgactgacacaccaaacaagatgtttcactgggtactctgccatagaaatggcagattaagaagattgactataccaaacattatattaaaaacacaaaataaaaactataaaaatgtactttaggacattaaagaaaactcaagttagaagcataccattttcctttcatggaagggtacagtattacaaagataatttgtttaacttgatttattaaattctagttatgtgccctataatgatgtttcagtcagtgacagacctcatatatggcagtggttccataagattacaatactgtatttttactgtaccttctttatgtttagatatgcaagtacttaccattgtgttacagtgtcctacagtattcactacaataatatgctgtacaggtttgtagcctaggagcaataggccatagcttaggtgtatagtagatcataccatctaggtttgtgtaagtacactctgtgattgtacaattttaaaatctcctaatgatgatgcatttctcagaatgtatcccctttgctaagcaatgcatgactgcaatcctaattctcacatgttttggggaaaaaattttaattttgaaaaaatttaggaaagttcctaccaaatatacatgtataaagtttattaaaagtcataatgacccaggaatagctaatgacacagaagtagatcaaaatagaacacaatagagaacttcaaaataaaacaggtgtgagaattgtgtgtgtgaaaaagctgggttcaaataagttggtttgttagacattcatatgcctacccatcagccatttcgttctcccttccttgctgacaaagccccattttttttttctttttttttggcctaaaactctgtatggctgccttgtgctatagaatagggtgcttccctagcctagagagggtgagtgttgattagattctgtgccaatcatggtaattggcttacttgatcatttgatggaatctaggctaacgagacaaaggaagtctgaaggctttgaataagaaattttctgttgctcttaacaattgatacaagttagggatttgccagcatccctcttctgcttctcagtgaagatatgtgatatggatgtttgaagctaatctgcaacagccttctgatggccatgaaaggacaagtatggagatgaaagctatcacactgagaatagtgggatgtagatagaaagcacctgaattgtgcttctgaattaaccaatccaggaactgctttacctttggactttttgttatgtgagatattctttatattgttccatttgctttgggtatatgtatattgttacttgtagccaaaaagaaacctctcttagtagaaacaaagggagagttaggttattcaaaaattagtatgggacaattgaatatgcctttttctgcgggagtaggtggggagaaacttaaaggttcacttgtaaaacaataaagtactaaagaaaatgtgataa

SEQ ID NO: 14601 - DNA, 18533 bp, Homo sapiens
tttagttcggccctaggatttggtagccccgaagtgtgggctctctccagtaccagactcatttcagtaccagcctttgggaagtcgtgtgaatacctcggtctcttagccacagggatagaatggcggcctgacggagccgcggcgccggcgaagtcgctgaggcgcgagctggaacccccagaccagctcaaacgggagccaaaactcgaagcttggaagaattagcaggaaatggcggatgaggcgttgtttttgcttctccataacgagatggtgtctggagtgtacaagtccgcggagcagggggaggtggtgagtgctgccacacaaccttgaggtccttttgcggtgacacaccttgtttcccctcagtgctttccttcaacccctgtcccatcgccacccgacgcctcccgaggtgtacacaaaatggtccacctccaggtgtcctaaaccctagaacctgtcagttgtctcctttgaaccgtcatctttcatcgttttctctttcgtatcttcttctatttgattctcttttgtctattcccgtacgtttgtcttgcacgccacagattttggtacttttagtgttgtccctgccattatttacgagagggttaactgcagagcctacttagttttgctggcacttccagcacttgagccatgcactggacagacctgtgccaacctgagaagcctgtccctccttcctcattcctaatgctcagtacaactccacacaacttgagacctgaagcctaatgaaggttgagtttgcaaaggaaagtttgcaggcgttaggataattagggaacataatttaaattaattatttcagaaagtatttatttagtgcccttatgtcagagcgatttctaggtgccagggatatagtagtgaatgaaacaatggccccatccttgtagagatttttttttaatctaatttaatccgaaatgtgatagtatgtagcggttacttctaatatgtgggagtccttattcaatcattgtgggcctgtcactgctgacactgctagataaattaaataaaataatactcctgcctcacagtatttagggaatagtgatttaatgaatagttaacactgagtattggctggtagaatcatggagttgtaacggattttagaaatactccaaagtcatgctcaagtcaggagccctttctttaatgctattgataaaaaatgagtggagagtggggataggaaatgtatcctaggcaaagataaagtggtagaggtatgaaagagtggtggatttaaatacacttaagcatttctttggactagactgaatagagagtgagaagaattgagaggtgaagttagaaagctttgtgtaattaaagaattcggatcttttcgagggaatatttttaaggaagggaatgatgtggaccatttgcattttagaaaagtaatccagtgtttgggctagagagggaagatccttgtagggggaaaatcctttattacgggagtcactgcaggaggagatgaagatctggattaagacagggatagtgagaaaaggagataacagatttgaaagttagaaagtggaattctgtaggccttgtttaaggatgggagtgggagttgaaaattatcgtcaggttttcagcttgagcagctgggttggatggtggtactattaatcagaaaaggaaataaaggagaagaaaaaaataaggaggtaagataatgagttatttcggggcaggttgaacttttgaggtgcctgtatgacatccaaaaaaaggtactgccagtttgcacaagaaggataggcaggatacatttggaaggttattggaaatgaagcgaattctattcttattcaaatgacccatctataatagagatttttttcaagtcacaaacttctgactttattattgacctcaaggtttactgtttgtgcaaagctagccttccttttccctctagaacagttaacacaccccttttacttttttgtcataacccccgatccccccaaaccacttgcgtattcagttctcttcattctcccctcccttcttacctttcctcttctctctctctctttttttttttttttagatggagttttgttcttgtctcccaggctggagtgcagtggtgtgatctcagctcactgcagcctccgcctcttgggttcaagcgattctcctgcttcagcctcctgagtatctggaattacaggtgccggccaccatgcctgactaatttttttgtatttttagtagagacggagtttcaccctgttgaccaggctgttcttgaacttctgacctcaggtgatctgcccgccttggcctcccaaagtgctgggattacaagcgtaagccactgcgcctggcccttttctgactcttgtctagaataatattttttcttctttttaaaatatcttttttttttcccgtgggttaatcctaaataaaatgaacagagctgttctactcaggcctgataattttaagagatggactaacatacaagagaaaggaagttcatagttttgaatcatttaagctaaaaataactttctttttctactgcagtgtatttatgatgggggggaaaattgaaagtacataataagcaaaaattatataaataacagttatgtggtagtcttcataatcagaacccatactgaaatacgggtatataagggttcacattagtgtccatactttgagtgtgcttgaaatttttcatcatgaaaaatgtaaaagatacataatcctgtcatccagaggtgatttttagagatttttttcagacataaaaagatctgtaaaaactatgttgtttatgtctgaaaagacctataaaatccatttctcgctgacaggattatgtgtctttttttttgtttttgttatggaaagtttttttaaatgaaataaagttttataaattttcagtatagcaaaataaacttccataagacttgaggtgagataaaagaaagaaacagtgttctaaccctccaaatcaaggtttttcaaactatgcttaaagaggaattctcttaaaatggactaattgggcatttctcaatttatggtgaatggattttgaaaggctaatggataaaatgttctcaagttgaatttttcttaaaaatttggtgcctactcaaaagtgcatgaacaagtagcaaaattaagtagtagggcttaattcaaaagctcatgtgatcataggatttgaaagtgtctgcatataagcatattgtaactgcccagtgggttcttcttccccactgcccaggtagagctgatctatcaagacaggagaattgcaataaggagtttatgtagagctgctaaatgggagagcagagttttattattgctcaaatcagcctccccaaacatgcagagtctagggtttatcaaggatagtttggtaggctgggggctggggaatgggtgctcctggttggttggggatgcagttacagaggtgggggccagaggaccagttggagtcatccgaaatgcaaaagtctgaaaagacatctcaaaaggccttttttaggttctacaatagtgatattatttacaggagtaattggggaagttacaaatctgtgacttccagaataatgtctgattatcatttaactacctacattttagcagaattcagacccctctcataagcctaaccttatagtctttcattagttttgcaaaggtgatttagtttcgggaagggctattatcattcttgctttaagcttacactataaactaaatttctcccaaagttagcttgggctgcatccagaaatgaccaagggcagcttggaggttaaaggcaagatggagttgattaggtgagatctcttttacagtcatgattttcttactgttacaatctttgcaaaggtggtttcaatagttcctgctaataaatatgttcctaggtgattctacagagagcagattattccaaaaagagcatcatgatttacagacacttattctagctgaacttgtttttttgttttttttttttttaagagacaagtctctgggttagtgtggtggctcacacctgtaaatcccagcactttggaaggctgaggtgggagaattacttgagcccaggagttggagaccaacctgggcaacatagtgaaacagtgtctctatttaaataaaaaaaaaaagaggctggacacggtggctcaggcctgtaatcctagcactttgggaggccaaggcaggcaggtcacaaggacaggagttccaggccagcctggccaacatggtgaaactccgtctctactaaaaatacaaaaaatagctgggtgtggtggtgcacgcatgtagtcccagctactcgggaggctgaggcagaagaatcacttgaacccaggaggcggaggttgcattgagccgagattgtgtcactgcactccaacctgggtgacagagcaagactcagtctcaaaaaaaaacagagagagagagagagagacaatgtcttgctctgtcatgcaggctgaaatgcagtgttgggactttggctcactgcagccttgacctcctgggcttaagtgatcctcccacatcagcctctcgaatagctagggctatgggcatgctaccatgtccagctaattaaaaaaatttttttttgtagaaacagagtcttgctatgttgctcaggctggtctcagactcctagtctcaagtgaccctcctgcctcagcctcctacggtgctgggattataggcatgagcactgcgcctggcctcatcctaagcatgtttgagaagtgtggagaatagcagaaaaactgaagatagtgatacgtacagtaatagatgtatgtacagaattttacgacagcatagggcctaaggaagtttcagggaagccatctgggagaatgtaatacttgagcagaatttaaagaatgtgaatgccaggcgcggtggctcacgcttgtaacccagcactttgggaggccgaggcgggcggatcacaaggtcaggagatcgagaccgtcctggctaacatggtgaaaccccatctctactaaaaatacaaaaaattagccgggcgtggtggcggtcgcctgtagtcccagctactcaggaggctgaggcaggagaatggcgtgaacctgggaggcagagcttgcagtgagccgagatcacgccactacactccagcctgggcaactgagcgagactccgtctcaaaaaaaaaaaaaaaagaatgtgaagtctagggaatagcacataaaaaggcagggagacagaagagaacatggcactctggagttgctgcagaaatttcagagtggtaaaagggaaggatgtttgtgaatttggttaactagccaggagtctttaaggaaaggacataccatgatgccatgctaaggagtttggactttattttttgtttgtttgttggtttgttttgagacaggatctcactctgttgcccggtctagagtgcagtggctagatattggctcactgaaacctctgcctcctgcactcaagccatcctcctacctcagcctcccaagtagctgggactataggtgcatgccaccatgttcacctaatttttgtaatttttttaaagatgaggtttcactatgttgcccaggctgccctcgaactcctaagctcaagcaatccttggcctcccaatgtactgggatttacaggcatgagtcactacatcaggcctggactttattttgaagaaaggggagcaggtgctgaaattccagtagagaataacatgattttttttttagacagagtttcactgttattgcccaggctggaatgcaatggggtgaccttggctcactgcaacctccgcctcctgggttcaagcaattctcctgcctcagcctcccgagtagctgggattacaggcatgcgccaccatgcccagctaatgttttatgtttttagtagagatggggtttttccgtgtcggtaaagctggtctcgaactcctgacctcaggtaatccgcctgcctcggcctcccaaaatgctaggaggcgtgagccatcatgcccggccgagaataacatgattttttttagaaatttactttagtagaagttacactaccagaaatatagaagatgacacaaagtaggaaaaaatgagacaagaccagttggaaagctatagctaaaaaccaggagagaaatgataaggctttacttaagaagtaagggtagagagagacgatgaattttgaaaagcttgtaaaagataggctccaccggactacagtgtatggggggttgggagcacaggggtgaagaaaatggaagttttctggttggagtaactaggtgaatggtggtgccattaatgaagttaggaaattttggaggcagagcaggctgaagacattaataaaatgaatatcatttgaatatgcatacttcgaaggtcctgtgggaccactagatgtctatgcccaataaagtctgtactagaaacgcagatttaatagtcacagcaccataagcagagtgcatggttccttagaagaaagtttagcaaataataagccctatggtttccttagtgggagacaaacagccttcagaatatacaaaaatccctgcctttttggagctttattttagcagagaggggaacaaggggcacatgggcaatataaaatagtaaaatgtatggtatattaaatggtgaaagaagttctgtggagacagattaagcaaggaagtgggactgagtatcaaaatcaatttttagaaggtttgttaaagctgattagcggccccatacccagagtttctgattaagtaaattgggagtgggactagagaatttgcaagttcccatgtgatgctgatgttgctggtcttttttttttttttttttctggtgatgaagtctcgccctgtcacccagactggagtgcagtggcatgatctcggctcgctgcaatctctgcctcctgggttcaagcgtttctcctgcctcagcctcttgagtagctgggactacaggtatgtgccaccatgcccggctaattttttgtatttttagtagagatgaggtttcactgtgttagccaggatgatctcgatctcctgacttcgtgatccgcccacctcagccttccaaatgctgggattacagatgtgagccaccacacccagccaacacatttttaaaatcactaggatagagagttgccaaaggggtatgatgttgcacttttaaagaagatggttaaaatgggcctaagatggtgacatgagagtagactcaaaggaagtgagggagttggttgtgtgactatctggaggaagagttgatgcaaaagcccctggaatgtgcctggcatgtttaagggacggggcagagtgcatctgcagaaggttgaagccagagaggtatggggtctggattgtagaggacagtccatcagtcatccataggatttggatgtgttcagcatagaggtactatttcaagccttaagattgaatgagattgtcaaagaaagagcaaagcaatctcatgatttaaggcaaagtgtgataatcagctaagacactgagaactgggaagcctggatgattctgagacattttgaagcaaggaacaatagaacttagagcagaaagcaaatgactcagggaaaaacatcaaaggtgataccaggttttataacctaggagagaagaatgattgaaattgggataaaagggagacgaggagtaattaggaagaggatttgatttctgaaaatcaattataagcagtagttccctgtttatcctgttgccttgtgccaggtgcagtggctcacacctgtagtcccacagctttgggaggccaagccaggaggatatcttgaggtcaggactttgagaccagcctgggtaacagagtgagatcccatctcttaaaaaaaaaaaaaatagccaggcatggtgatgtgcctgtagtcctagctacttgggagactgaggtgggaggattgcttgaacccaggaatttaaagcttcaatgaaccatgatctcgccagtgcactgcagcctgggcgacagagcaagacttgtcaaataaataagtaaatagcagtttggtcttttgttggaggaacgtctattcttagcttggacactgcggtttttccttgggcagcagaagcaatgtggcgattgaagaagtgacctaaaactttgatgttaggtagaagcagatggcccaagccaagacaagtgcttgtaaatccactggtgggagcccctcctcctaacagcaggttattaacgctgccagaaaaaaagtgtcccctctaccggtctggtgaagaaacctcatcgctacgggcctgggactgtggcacttctagagattctcgttaccagaaattgacctagcttctcatctggaagctgcctttctagaggttggtgagagagatcacccaggatttcaaaaccaactttaggtttcagagcacagtcattggggtgctgcaggaggctagtgaagtgtacctggaggctagtgaagtgtacctggtgggttggtttgaagatgctaatttgtgtgccatctacggtaagagagttggctctcatgcccaaagacatccagttggctcgccagacacggagtgagcgagcttaagtgaaggcagattttaaggcattttatatgaattctgtaaaatactttggtttaatttgtgactttttggggagaaattatttataatatgttgcatttgtgcttaagtcattccgtcttttgggatgaatgtgaaaagtgactgttcatagacctcagtgacgtaagcactgttgctcaggagtgacaagttgctaatacgcagaagggatgggtgacattttttcattctcatgacgcatgtttctgtaagttaatgacttgttaggtagctattaaggaactagagttgataaataaatgtgtataggttccttttgcaatataactggttattacttgatccaagtgtttaacatttggagctaagtctgaccatacattactgtgatagaatgtgggccttttcaagggtgaagatacaagccttaaccacagtataacttgcagtttccttaaacaaacaaagaaataaaaacctagcatggagtacattatgtgcatttataatagctattttaaatattgtagtgtcaacattcaaaaattaattcttttacattcgcaaatggtggggagtcttgtcattaaggtgtgtataacttagaatccacttggttttctcctaactggactgcatttgttttcatagtagtaaaatgttatgtgtattacaccttgcataagtcctcattctactacgtgttaactaaccctctagatgataatgcagatgctaactgtgggattttatttataagaactctagaataaataccagttattcctaccaacatcggctgttactaatattctgaagtagttagtgcaacttttcattgtgttgtggttggtctcctaagtaggttggatttttctcctcttctaagagaaaacaatagtgaaattattttctttctcttttctctctgtttctgtctctttctctctctctttctcccttcccttcccttccctcccctcccctcccctcttcttttcttttctttctcttctcttctcttttctttctttcatggggtcccttgctcaacctgttgcccaggctggagtgcaatgacatgatcatggctcagtgcagcctcaacttcctggactcaagcaatccacctgcatcagcctccaaaatggcacatgctaccatgcccagctattttatttttacttttagtacagatgtggtcttgctatgttgcccaggctggtcttgagccattgagctcaagtgatcctcctgctttggcctcctaaagtgctgggattacaggcatgagccaccgtgtcttgaggggtttgtttctattaaaagacttggtgtcagggaggagcacaaagctttaacccattgaacctctgacagttaagatggtgttgggttaggttacatctggttactatcctgggaaaatcacttctatagagatggccttccaagtggttttaaaatgtatctttctgtctgggcgcggtggctcacgcctgtaatccctgcactttgggaggccaaggcaggtggattgcttgaggtcaggagtttgagaccagcatggccaacattttgtatttttgtattttctctactaaaaatacaaaaattaaccaggcatggtggtgggtgcttataattccagctacttaggaacctgaggcaggagaatcacttgaaccctgtagatggaggttgcagtgagccgagatggccccactgtactgcagcctggatgacagagcgagactccatctcaaaataaattaaaaaaatgtatccttctattgaagtttttaggttaatcatgtatatgttgactaaattatgaattaacttgtttatcaaaaaaaaagtaaaaagtaaagtaagtaaaagtaaagtaaaataaataaaatcaaccttataattcactttttcttaaactgtttcagggaaaaaagtataaatgtttacattaatatttttaaccaatcttgtaaaacaatttctgaatactaacatcctagcattctaaaagtatttaaaactattgttttttaaaataggaaaacggacgatgtattactaagctggaaaacatggggtttcgagtgggacaaggattgatagaaaggtgagcaggttggatttgaaaattttcttgcaggtaggttataaacaaaggtgatctatttcaaaagattgcataaaacttgggatattttaattttaattcctgaatgttattctctttacttcaaaaattaaaatttctttttagatccaatgccatttaactcatttattcaaattttattttaatgtttaaagaaaatatatattttatatattttagactttcttcctgaagctattttagactttattcctgaagctattgaagcaactatctaaaatcttactgcattttcaacttaagatctgctaggttctttaacctgcatagaatttttaagtacataggtttgaaataactatagtctatgtttatgcgtgtaattatctttgaacttataaatcagttctttttagtatttctttctcactacctgaatagttaaactcggagtatattttatataacaatgtcatgataatgctcagctctttgttcttttgtggttttttgatgtgctagaatgcattgcacctgaaattttggctataatgttagactaatttgaggcctcataatttatataacataatgtgaatccattgagataggatcatgttacctggtgcttatgactttattagtgttaataaatgttcagccaggtgtggtggctcatgcctgtaatcccagcactttgtgaggccaaggtgggagaatctcttgagctcaggagtttgagaccagccagggtaacaaagtggaaccctgtctctacaaagatatacagattagctgagcatggtgacatgtgcctgtggtctcagctgctagggaggctgaggtgggaggatagcttgagcctgggagggaggtagacgttgcaatgagccgagattatgctattgcactctaacctgggcgacagagccagaatctgtctcaaaaaaaaaattaaaattaaaaaacccaataaatgttcagtgctgttctggcatttggaaattagttaataattagtccctcttgctttttttggaggagaaatactgtattacttctagttgatctttttaggtttacaaaagatactgcaaggttcaaggatgagttagatatcatgaagttcatttgtaaagatttttggactacggtattcaagaaacaaatcgacaatctaaggacaaatcatcaggtaattaaattaattaaggcctatattttaaagtcctttaacttgatataaatatcgtattttagtgacttatttaaaacctaaaataatttctggttaactttggaatatgtttatgttattaatgagttattagtttttttcttctaatagtgtgaactgagtaaagacaaagggacagttatcagtaatgatagctgttcctttcacccaattatatgctatgttaagttttttaaagtagcataagtcaggatgagaatagcttttactatttggttccttagttactgttaattagtggtaataatatgcagaaccacaaatatatcacctttatgtctttagagtcatttcttttttttgaagaagaagaatttggattattttaattatttttatatacagaaaactcaacagtgtatgtttaacccagtttggtgtcaagttctttagcctttgccttttcctgcttgacaattcaagccacagacttgagacccaggacattgcctccccagtgacagtggatttcgttttgtctgtcgtaattggttctgatagcttccaccagctgaacctaagctccattgtcctctgagttaatctgtgtaaaggcgacagtggtgcgggtcttcttgtggattagacatcccagtcttgccttccccttgataatgcggtaagggacccccattttatgacacaaggcaggcaggaagacagccacctcgatgggatccacatagtgtgcagtcaccaccagctgagccttcttgttctcctccaaggtggagatggtgttaactcctgctcggaggacaagtggtctcttagtggggacatcccctttgcctgcagctttcttttcagcccgggccaatagcctctgcttattttcttgctttgtctttggtctgtacttgtgggccagcttaagcagctaagtagctatttggcggtgcagggcctgggtgaactggttaattgtaggaggcactttcagctgcttacagaggatggctttgtgccactgcaacctgatatagcggggccatttcacaaagtgagtgaggtccatattgggtggatgtcctgtccaatgccagaattcttaggccttttctcaaacaggggattcaccactttctttctttcttttttttttttttttttttgagatggagtcttgctgtgttgcccaggctagagtgcaatggtgcgatctcggctcaccacaacctccgcctcctgggttcaagccattctgcctcaggctcccaggtagctgggactacaggcatgtgccaccactccggctaatttttgtatttttagtagaggtggggtttcaccatgctggccaggctggtctcgaactcctgacctcaagtgatccgcttgtctcggcctcccaatgtgctgggagtacagacgtgagccaccacgcccaaccaggattcaccactttcttggcctcctgtttcttcatgacaccaagggccagagccacctccttcctcttggcctttccttttggcatcttgggtggcaggaagagattctttatagtcatttctaaagtctaatttatagagcattttactcttaaataactcctggattattactgctgtcatattttctactcttaaaagattttcttactacaaaattaatagattacatagaaaactatgtatttattaaaattttaaaagggagacagagtctcgctttgttgcccagactagtcttgagctcctggactcaagtaattctttggcctcagcctcttgcatagctgggattataggcatgcaccaccactcccagcttcattagattttattttatgaacttcaaggaaatacttagagtagatttggaattttgattaagtaaaaaattaaatgtatctggtactctcaataggataattcatttatttatttatttttaattagagacagtgtctcactatgttttccagactggtctcaaactcttgggctcaatggatcctcccgccttggcctcccagagttctgggattacaggtgtgagccactgtgcctggcctggaattcattttgtaccaactttagcttggaattactggaaatgctaataggaagaaatgactatgatttttttactctctagacatgatttactaatatatatcagctggctggacatggtggctcatgcttagaattgcagcattttgggaggctgaggcagaaggattgcttgagctcaggagttggagaccagcctgagcaacatacttagaacctatttctacaaaaaacttgaaaaaaatttcaccaggcatattggtatgtgcctgaggtttcagctacatgggaggagttcaaggatacagtgaaatactacacttttgcctggataacagcaaaattctgtctcttaaaaaaataaagctgggcgcggtggctcacccctgtaatcccagcactttgggaggccgaggtgggcagatcacctgaggtcaggagttcgagaccagcctggccaacgtggtgaaaccctgtctctactaaaaatacaaaaattagccaggcatattggcgcacgcttatagtcccagccactcaggaggctgaggaaggagaattgcttgaacccgggaggcagaggttgcagtgagcctagatcacaccactgcactccagcctgggcgacagagcaagactctgtctcaaataaacaaataaatccgggtgcggtggctcacgcctataatcccagcacttcaggaggccaaggcgggtggatcacctgaggttgggagttcaagaccagccctgccaacatggagaaaccccgtctctactaaaaatacaaaattagctgggcgtagtggcgcatgcctgtaatcccagctacttgggaggctgaggcaggagaatcacttgaacccaggaggcggaggttgtggtgagctgagatcgagccattgcactccagcctgggcaacaagagtgaaactctgtctcaaaaaaataaataaataaaaataaaaattaggtcgggtgtggtgatcatacatgtaatttcagcactttgggaggctgaggcaggaggattacttgagccctggagttccagaccagcctaggcaacatagggagaccccctttctacaaaaaattaataaaactagccgggtgtggtggcatgtgtctgtggtcccagctactcggaaggctgaggcaagagaattgctaaacacccaggtgtttgagggtgcagtgagctgtgattgcaccaccacactccagcctagacaacagagtgagagctcatgtctaaataaataactatacaaacaaacagcttatttcatgtggacatgtattaatgattccatcgtactagactatgagtttttaaggatagggactatgtctcagacagtgtttttatcttcagtgtataaaaccgttcggtatacattagtgttgtgaaaatactgaactcgcaactcttcagcttgaacattgcaaaactccttcatttaaacaaaatttgaccaggctgggcacgtgggcttatgcctgtaatcccagcacttcgggaggtcaaggtgggcagattgcttgagcccaggagtttgagaccagcctgggcaacatggcgaaaccccatctgtacaagaaatataaaaattagcagggcatggtgatgcacgcctgtagtcccagctacttgggagcctgcggtgggaggattgattgagtctgggagttggaggctgcagtgaggcgtaattgtgccactgcattctaccctgggcgacagaggagaccccgtctcaaagaacagaaaaagaaaacttggccaatgggaaggagacttttaataactttaaaaaacacttaaattgtttcataagaataaaataattttaaggactgctaggtacattgactttggattttttttctatttttggaacagggcatctatgtacttcaggacaacaaatttcgcctgcttactcagatgtctgcaggaaaacagtatttagaacatgcatctaaggtatttaatggaatagaagttggggtttttgttaatagtaggactacagggaaaagtacagtgctaatcataacaaactattgaattaaaaatatgttttaaggtgttcttttttgtttaaagagttttctatgaaatgagagacatgttacaataacactaaactgtagctaaatagtcatagagtgaccaattaaagaaacactggccgggcgctatggctcacgcctgtaatcccagcactttgggaggccaaggcaggtggattacctgaggtcaagagttcaagaccagcttggccagcatggggaaaccctttctctactaaaaatatgaaaaatagctggacgttctggcgagcgcctgcaatcccagctattcgggaggctgaggcaggagaatcacttgaacccgggaggcagaagttgcagtgagctgagatcgtgctatcattgcactccagcctggggtataagagcaaaactccatctcaaaaaaaaaaaaaaagaaaaaaaagaaacactataactaaatgacagtgaaatgtagatgtatggtagatcactttttttttttttttaagacaaggtcttgctctgtcatctaggctggagtgtagtggtacaatcatggcctatcttgaccttgacccccccgggctcaagtgatcctcccacttcagtcacccaaggaggtaggactgcaggtgtgggccaccatgcctggctaatttttaaaaaaattttttagagatgggatcccacgatgttgcccaggctcgtcttgaactcctgggctcaagtgatcacctcacctcggcctcccagtgtgttgggattacaggtgtgagccactgcatccggcctgattgcctattttctatatttttggggtatccaggctctaattacatttttatggttaatgtgtatattttctctcttttttttttttttcggacagagtgtgagactcactgcaacctctgcctcctgggttcaagtgattctcctgcctcagcctcctgagtagctgggattacaggtgtgcgccaccatgcctggctaattttttgtatctttagtagagacagggtttcaccatgttggcgaggctagtctcaaactcctgacctcgtgatccacccacctcagcctcccaaagtgctcggattacagacgtgattacaaaagccacccaaaatgctgggattacagcctcccaaagtgctgggattacagacgtgattacaaaagccacccaaaatgctgggattacagcctcccaaagtgctgggattataggccatgcctggcatattttctcttttttactaacttcttagtttaatatttctggttctcacttaactttttgggatcttggtttcttcagctgtgaaaagagtaagttggaccaattcagtgatttctaactattttgagttatggacatctttgagaactggaacacctttccccataaatacgcacatatacatggtttttattttcataggggtcacaaattccccgattaagaactcttgggatgaacaatctctaaggcctcttccagcttaaaatttcatgactcagatctagttacttattagtgcccatttatgtatattatttataagataatattttatattattcgtagataatgtagtatgttgaacatcatgcagtatagatgtgggtaatcaaaaattccctgaattgctaatttttcaatccagttcttgtcatgacttttggttttgtagctcagccctattccctttctttgtttctatatgacagggtttctcaacgtccaaactgttgatactttcaaccagataattctttgttgtggcaagctataagtcttgaacaagtcaagattcttggttgtaaataggggaaagaaattctgcttgtaagctaacaaaattgataagctcaaagaataggcaataaccaggggaggttaaggcagccagtaagatagccaagtcactctgcagactgtatctacttagaatcctgcaggcagcagggactgtagacacaaactacctttactgcctccagaactaattctgatcagtttctggcttgtttttgtcactgagtctagattcacagtcctggactggagtacttaattggctgagcttaagtcttaagtcctacgtccatgctttagtttccagggagctgggaaatatatcaatatttttcagtaatttgaacagttcttcaaaatcctttttttaaacaggaatgacttactgatgataaatcatgtaatgttgtatttatcaatagctttactattttagtaaatccttactatttttaatgattttttttccttttagtatttagcatttacgtgtggcttaatcagaggtggcttatcaa

SEQ ID NO: 14602 - DNA, 541 bp, Homo sapiens
tttagttcggccctaggatttggtagccccgaagtgtgggctctctccagtaccagactcatttcagtaccagcctttgggaagtcgtgtgaatacctcggtctcttagccacagggatagaatggcggcctgacggagccgcggcgccggcgaagtcgctgaggcgcgagctggaacccccagaccagctcaaacgggagccaaaactcgaagcttggaagaattagcaggaaatggcggatgaggcgttgtttttgcttctccataacgagatggtgtctggagtgtacaagtccgcggagcagggggaggaaaacggacgatgtattactaagctggaaaacatggggtttcgagtgggacaaggattgatagaaaggtttacaaaagatactgcaaggttcaaggatgagttagatatcatgaagttcatttgtaaagatttttggactacggtattcaagaaacaaatcgacaatctaaggacaaatcatcagtatttagcatttacgtgtggcttaatcagaggtggcttatcaa

SEQ ID NO: 14603 - DNA, 20236 bp, Homo sapiens
ctttggttagagctcccgtcagactttagttcggccctaggatttggtagccccgaagtgtgggctctctccagtaccagactcatttcagtaccagcctttgggaagtcgtgtgaatacctcggtctcttagccacagggatagaatggcggcctgacggagccgcggcgccggcgaagtcgctgaggcgcgagctggaacccccagaccagctcaaacgggagccaaaactcgaagcttggaagaattagcaggaaatggcggatgaggcgttgtttttgcttctccataacgagatggtgtctggagtgtacaagtccgcggagcagggggaggtggtgagtgctgccacacaaccttgaggtccttttgcggtgacacaccttgtttcccctcagtgctttccttcaacccctgtcccatcgccacccgacgcctcccgaggtgtacacaaaatggtccacctccaggtgtcctaaaccctagaacctgtcagttgtctcctttgaaccgtcatctttcatcgttttctctttcgtatcttcttctatttgattctcttttgtctattcccgtacgtttgtcttgcacgccacagattttggtacttttagtgttgtccctgccattatttacgagagggttaactgcagagcctacttagttttgctggcacttccagcacttgagccatgcactggacagacctgtgccaacctgagaagcctgtccctccttcctcattcctaatgctcagtacaactccacacaacttgagacctgaagcctaatgaaggttgagtttgcaaaggaaagtttgcaggcgttaggataattagggaacataatttaaattaattatttcagaaagtatttatttagtgcccttatgtcagagcgatttctaggtgccagggatatagtagtgaatgaaacaatggccccatccttgtagagatttttttttaatctaatttaatccgaaatgtgatagtatgtagcggttacttctaatatgtgggagtccttattcaatcattgtgggcctgtcactgctgacactgctagataaattaaataaaataatactcctgcctcacagtatttagggaatagtgatttaatgaatagttaacactgagtattggctggtagaatcatggagttgtaacggattttagaaatactccaaagtcatgctcaagtcaggagccctttctttaatgctattgataaaaaatgagtggagagtggggataggaaatgtatcctaggcaaagataaagtggtagaggtatgaaagagtggtggatttaaatacacttaagcatttctttggactagactgaatagagagtgagaagaattgagaggtgaagttagaaagctttgtgtaattaaagaattcggatcttttcgagggaatatttttaaggaagggaatgatgtggaccatttgcattttagaaaagtaatccagtgtttgggctagagagggaagatccttgtagggggaaaatcctttattacgggagtcactgcaggaggagatgaagatctggattaagacagggatagtgagaaaaggagataacagatttgaaagttagaaagtggaattctgtaggccttgtttaaggatgggagtgggagttgaaaattatcgtcaggttttcagcttgagcagctgggttggatggtggtactattaatcagaaaaggaaataaaggagaagaaaaaaataaggaggtaagataatgagttatttcggggcaggttgaacttttgaggtgcctgtatgacatccaaaaaaaggtactgccagtttgcacaagaaggataggcaggatacatttggaaggttattggaaatgaagcgaattctattcttattcaaatgacccatctataatagagatttttttcaagtcacaaacttctgactttattattgacctcaaggtttactgtttgtgcaaagctagccttccttttccctctagaacagttaacacaccccttttacttttttgtcataacccccgatccccccaaaccacttgcgtattcagttctcttcattctcccctcccttcttacctttcctcttctctctctctctttttttttttttttagatggagttttgttcttgtctcccaggctggagtgcagtggtgtgatctcagctcactgcagcctccgcctcttgggttcaagcgattctcctgcttcagcctcctgagtatctggaattacaggtgccggccaccatgcctgactaatttttttgtatttttagtagagacggagtttcaccctgttgaccaggctgttcttgaacttctgacctcaggtgatctgcccgccttggcctcccaaagtgctgggattacaagcgtaagccactgcgcctggcccttttctgactcttgtctagaataatattttttcttctttttaaaatatcttttttttttcccgtgggttaatcctaaataaaatgaacagagctgttctactcaggcctgataattttaagagatggactaacatacaagagaaaggaagttcatagttttgaatcatttaagctaaaaataactttctttttctactgcagtgtatttatgatgggggggaaaattgaaagtacataataagcaaaaattatataaataacagttatgtggtagtcttcataatcagaacccatactgaaatacgggtatataagggttcacattagtgtccatactttgagtgtgcttgaaatttttcatcatgaaaaatgtaaaagatacataatcctgtcatccagaggtgatttttagagatttttttcagacataaaaagatctgtaaaaactatgttgtttatgtctgaaaagacctataaaatccatttctcgctgacaggattatgtgtctttttttttgtttttgttatggaaagtttttttaaatgaaataaagttttataaattttcagtatagcaaaataaacttccataagacttgaggtgagataaaagaaagaaacagtgttctaaccctccaaatcaaggtttttcaaactatgcttaaagaggaattctcttaaaatggactaattgggcatttctcaatttatggtgaatggattttgaaaggctaatggataaaatgttctcaagttgaatttttcttaaaaatttggtgcctactcaaaagtgcatgaacaagtagcaaaattaagtagtagggcttaattcaaaagctcatgtgatcataggatttgaaagtgtctgcatataagcatattgtaactgcccagtgggttcttcttccccactgcccaggtagagctgatctatcaagacaggagaattgcaataaggagtttatgtagagctgctaaatgggagagcagagttttattattgctcaaatcagcctccccaaacatgcagagtctagggtttatcaaggatagtttggtaggctgggggctggggaatgggtgctcctggttggttggggatgcagttacagaggtgggggccagaggaccagttggagtcatccgaaatgcaaaagtctgaaaagacatctcaaaaggccttttttaggttctacaatagtgatattatttacaggagtaattggggaagttacaaatctgtgacttccagaataatgtctgattatcatttaactacctacattttagcagaattcagacccctctcataagcctaaccttatagtctttcattagttttgcaaaggtgatttagtttcgggaagggctattatcattcttgctttaagcttacactataaactaaatttctcccaaagttagcttgggctgcatccagaaatgaccaagggcagcttggaggttaaaggcaagatggagttgattaggtgagatctcttttacagtcatgattttcttactgttacaatctttgcaaaggtggtttcaatagttcctgctaataaatatgttcctaggtgattctacagagagcagattattccaaaaagagcatcatgatttacagacacttattctagctgaacttgtttttttgttttttttttttttaagagacaagtctctgggttagtgtggtggctcacacctgtaaatcccagcactttggaaggctgaggtgggagaattacttgagcccaggagttggagaccaacctgggcaacatagtgaaacagtgtctctatttaaataaaaaaaaaaagaggctggacacggtggctcaggcctgtaatcctagcactttgggaggccaaggcaggcaggtcacaaggacaggagttccaggccagcctggccaacatggtgaaactccgtctctactaaaaatacaaaaaatagctgggtgtggtggtgcacgcatgtagtcccagctactcgggaggctgaggcagaagaatcacttgaacccaggaggcggaggttgcattgagccgagattgtgtcactgcactccaacctgggtgacagagcaagactcagtctcaaaaaaaaacagagagagagagagagagacaatgtcttgctctgtcatgcaggctgaaatgcagtgttgggactttggctcactgcagccttgacctcctgggcttaagtgatcctcccacatcagcctctcgaatagctagggctatgggcatgctaccatgtccagctaattaaaaaaatttttttttgtagaaacagagtcttgctatgttgctcaggctggtctcagactcctagtctcaagtgaccctcctgcctcagcctcctacggtgctgggattataggcatgagcactgcgcctggcctcatcctaagcatgtttgagaagtgtggagaatagcagaaaaactgaagatagtgatacgtacagtaatagatgtatgtacagaattttacgacagcatagggcctaaggaagtttcagggaagccatctgggagaatgtaatacttgagcagaatttaaagaatgtgaatgccaggcgcggtggctcacgcttgtaacccagcactttgggaggccgaggcgggcggatcacaaggtcaggagatcgagaccgtcctggctaacatggtgaaaccccatctctactaaaaatacaaaaaattagccgggcgtggtggcggtcgcctgtagtcccagctactcaggaggctgaggcaggagaatggcgtgaacctgggaggcagagcttgcagtgagccgagatcacgccactacactccagcctgggcaactgagcgagactccgtctcaaaaaaaaaaaaaaaagaatgtgaagtctagggaatagcacataaaaaggcagggagacagaagagaacatggcactctggagttgctgcagaaatttcagagtggtaaaagggaaggatgtttgtgaatttggttaactagccaggagtctttaaggaaaggacataccatgatgccatgctaaggagtttggactttattttttgtttgtttgttggtttgttttgagacaggatctcactctgttgcccggtctagagtgcagtggctagatattggctcactgaaacctctgcctcctgcactcaagccatcctcctacctcagcctcccaagtagctgggactataggtgcatgccaccatgttcacctaatttttgtaatttttttaaagatgaggtttcactatgttgcccaggctgccctcgaactcctaagctcaagcaatccttggcctcccaatgtactgggatttacaggcatgagtcactacatcaggcctggactttattttgaagaaaggggagcaggtgctgaaattccagtagagaataacatgattttttttttagacagagtttcactgttattgcccaggctggaatgcaatggggtgaccttggctcactgcaacctccgcctcctgggttcaagcaattctcctgcctcagcctcccgagtagctgggattacaggcatgcgccaccatgcccagctaatgttttatgtttttagtagagatggggtttttccgtgtcggtaaagctggtctcgaactcctgacctcaggtaatccgcctgcctcggcctcccaaaatgctaggaggcgtgagccatcatgcccggccgagaataacatgattttttttagaaatttactttagtagaagttacactaccagaaatatagaagatgacacaaagtaggaaaaaatgagacaagaccagttggaaagctatagctaaaaaccaggagagaaatgataaggctttacttaagaagtaagggtagagagagacgatgaattttgaaaagcttgtaaaagataggctccaccggactacagtgtatggggggttgggagcacaggggtgaagaaaatggaagttttctggttggagtaactaggtgaatggtggtgccattaatgaagttaggaaattttggaggcagagcaggctgaagacattaataaaatgaatatcatttgaatatgcatacttcgaaggtcctgtgggaccactagatgtctatgcccaataaagtctgtactagaaacgcagatttaatagtcacagcaccataagcagagtgcatggttccttagaagaaagtttagcaaataataagccctatggtttccttagtgggagacaaacagccttcagaatatacaaaaatccctgcctttttggagctttattttagcagagaggggaacaaggggcacatgggcaatataaaatagtaaaatgtatggtatattaaatggtgaaagaagttctgtggagacagattaagcaaggaagtgggactgagtatcaaaatcaatttttagaaggtttgttaaagctgattagcggccccatacccagagtttctgattaagtaaattgggagtgggactagagaatttgcaagttcccatgtgatgctgatgttgctggtcttttttttttttttttttctggtgatgaagtctcgccctgtcacccagactggagtgcagtggcatgatctcggctcgctgcaatctctgcctcctgggttcaagcgtttctcctgcctcagcctcttgagtagctgggactacaggtatgtgccaccatgcccggctaattttttgtatttttagtagagatgaggtttcactgtgttagccaggatgatctcgatctcctgacttcgtgatccgcccacctcagccttccaaatgctgggattacagatgtgagccaccacacccagccaacacatttttaaaatcactaggatagagagttgccaaaggggtatgatgttgcacttttaaagaagatggttaaaatgggcctaagatggtgacatgagagtagactcaaaggaagtgagggagttggttgtgtgactatctggaggaagagttgatgcaaaagcccctggaatgtgcctggcatgtttaagggacggggcagagtgcatctgcagaaggttgaagccagagaggtatggggtctggattgtagaggacagtccatcagtcatccataggatttggatgtgttcagcatagaggtactatttcaagccttaagattgaatgagattgtcaaagaaagagcaaagcaatctcatgatttaaggcaaagtgtgataatcagctaagacactgagaactgggaagcctggatgattctgagacattttgaagcaaggaacaatagaacttagagcagaaagcaaatgactcagggaaaaacatcaaaggtgataccaggttttataacctaggagagaagaatgattgaaattgggataaaagggagacgaggagtaattaggaagaggatttgatttctgaaaatcaattataagcagtagttccctgtttatcctgttgccttgtgccaggtgcagtggctcacacctgtagtcccacagctttgggaggccaagccaggaggatatcttgaggtcaggactttgagaccagcctgggtaacagagtgagatcccatctcttaaaaaaaaaaaaaatagccaggcatggtgatgtgcctgtagtcctagctacttgggagactgaggtgggaggattgcttgaacccaggaatttaaagcttcaatgaaccatgatctcgccagtgcactgcagcctgggcgacagagcaagacttgtcaaataaataagtaaatagcagtttggtcttttgttggaggaacgtctattcttagcttggacactgcggtttttccttgggcagcagaagcaatgtggcgattgaagaagtgacctaaaactttgatgttaggtagaagcagatggcccaagccaagacaagtgcttgtaaatccactggtgggagcccctcctcctaacagcaggttattaacgctgccagaaaaaaagtgtcccctctaccggtctggtgaagaaacctcatcgctacgggcctgggactgtggcacttctagagattctcgttaccagaaattgacctagcttctcatctggaagctgcctttctagaggttggtgagagagatcacccaggatttcaaaaccaactttaggtttcagagcacagtcattggggtgctgcaggaggctagtgaagtgtacctggaggctagtgaagtgtacctggtgggttggtttgaagatgctaatttgtgtgccatctacggtaagagagttggctctcatgcccaaagacatccagttggctcgccagacacggagtgagcgagcttaagtgaaggcagattttaaggcattttatatgaattctgtaaaatactttggtttaatttgtgactttttggggagaaattatttataatatgttgcatttgtgcttaagtcattccgtcttttgggatgaatgtgaaaagtgactgttcatagacctcagtgacgtaagcactgttgctcaggagtgacaagttgctaatacgcagaagggatgggtgacattttttcattctcatgacgcatgtttctgtaagttaatgacttgttaggtagctattaaggaactagagttgataaataaatgtgtataggttccttttgcaatataactggttattacttgatccaagtgtttaacatttggagctaagtctgaccatacattactgtgatagaatgtgggccttttcaagggtgaagatacaagccttaaccacagtataacttgcagtttccttaaacaaacaaagaaataaaaacctagcatggagtacattatgtgcatttataatagctattttaaatattgtagtgtcaacattcaaaaattaattcttttacattcgcaaatggtggggagtcttgtcattaaggtgtgtataacttagaatccacttggttttctcctaactggactgcatttgttttcatagtagtaaaatgttatgtgtattacaccttgcataagtcctcattctactacgtgttaactaaccctctagatgataatgcagatgctaactgtgggattttatttataagaactctagaataaataccagttattcctaccaacatcggctgttactaatattctgaagtagttagtgcaacttttcattgtgttgtggttggtctcctaagtaggttggatttttctcctcttctaagagaaaacaatagtgaaattattttctttctcttttctctctgtttctgtctctttctctctctctttctcccttcccttcccttccctcccctcccctcccctcttcttttcttttctttctcttctcttctcttttctttctttcatggggtcccttgctcaacctgttgcccaggctggagtgcaatgacatgatcatggctcagtgcagcctcaacttcctggactcaagcaatccacctgcatcagcctccaaaatggcacatgctaccatgcccagctattttatttttacttttagtacagatgtggtcttgctatgttgcccaggctggtcttgagccattgagctcaagtgatcctcctgctttggcctcctaaagtgctgggattacaggcatgagccaccgtgtcttgaggggtttgtttctattaaaagacttggtgtcagggaggagcacaaagctttaacccattgaacctctgacagttaagatggtgttgggttaggttacatctggttactatcctgggaaaatcacttctatagagatggccttccaagtggttttaaaatgtatctttctgtctgggcgcggtggctcacgcctgtaatccctgcactttgggaggccaaggcaggtggattgcttgaggtcaggagtttgagaccagcatggccaacattttgtatttttgtattttctctactaaaaatacaaaaattaaccaggcatggtggtgggtgcttataattccagctacttaggaacctgaggcaggagaatcacttgaaccctgtagatggaggttgcagtgagccgagatggccccactgtactgcagcctggatgacagagcgagactccatctcaaaataaattaaaaaaatgtatccttctattgaagtttttaggttaatcatgtatatgttgactaaattatgaattaacttgtttatcaaaaaaaaagtaaaaagtaaagtaagtaaaagtaaagtaaaataaataaaatcaaccttataattcactttttcttaaactgtttcagggaaaaaagtataaatgtttacattaatatttttaaccaatcttgtaaaacaatttctgaatactaacatcctagcattctaaaagtatttaaaactattgttttttaaaataggaaaacggacgatgtattactaagctggaaaacatggggtttcgagtgggacaaggattgatagaaaggtgagcaggttggatttgaaaattttcttgcaggtaggttataaacaaaggtgatctatttcaaaagattgcataaaacttgggatattttaattttaattcctgaatgttattctctttacttcaaaaattaaaatttctttttagatccaatgccatttaactcatttattcaaattttattttaatgtttaaagaaaatatatattttatatattttagactttcttcctgaagctattttagactttattcctgaagctattgaagcaactatctaaaatcttactgcattttcaacttaagatctgctaggttctttaacctgcatagaatttttaagtacataggtttgaaataactatagtctatgtttatgcgtgtaattatctttgaacttataaatcagttctttttagtatttctttctcactacctgaatagttaaactcggagtatattttatataacaatgtcatgataatgctcagctctttgttcttttgtggttttttgatgtgctagaatgcattgcacctgaaattttggctataatgttagactaatttgaggcctcataatttatataacataatgtgaatccattgagataggatcatgttacctggtgcttatgactttattagtgttaataaatgttcagccaggtgtggtggctcatgcctgtaatcccagcactttgtgaggccaaggtgggagaatctcttgagctcaggagtttgagaccagccagggtaacaaagtggaaccctgtctctacaaagatatacagattagctgagcatggtgacatgtgcctgtggtctcagctgctagggaggctgaggtgggaggatagcttgagcctgggagggaggtagacgttgcaatgagccgagattatgctattgcactctaacctgggcgacagagccagaatctgtctcaaaaaaaaaattaaaattaaaaaacccaataaatgttcagtgctgttctggcatttggaaattagttaataattagtccctcttgctttttttggaggagaaatactgtattacttctagttgatctttttaggtttacaaaagatactgcaaggttcaaggatgagttagatatcatgaagttcatttgtaaagatttttggactacggtattcaagaaacaaatcgacaatctaaggacaaatcatcaggtaattaaattaattaaggcctatattttaaagtcctttaacttgatataaatatcgtattttagtgacttatttaaaacctaaaataatttctggttaactttggaatatgtttatgttattaatgagttattagtttttttcttctaatagtgtgaactgagtaaagacaaagggacagttatcagtaatgatagctgttcctttcacccaattatatgctatgttaagttttttaaagtagcataagtcaggatgagaatagcttttactatttggttccttagttactgttaattagtggtaataatatgcagaaccacaaatatatcacctttatgtctttagagtcatttcttttttttgaagaagaagaatttggattattttaattatttttatatacagaaaactcaacagtgtatgtttaacccagtttggtgtcaagttctttagcctttgccttttcctgcttgacaattcaagccacagacttgagacccaggacattgcctccccagtgacagtggatttcgttttgtctgtcgtaattggttctgatagcttccaccagctgaacctaagctccattgtcctctgagttaatctgtgtaaaggcgacagtggtgcgggtcttcttgtggattagacatcccagtcttgccttccccttgataatgcggtaagggacccccattttatgacacaaggcaggcaggaagacagccacctcgatgggatccacatagtgtgcagtcaccaccagctgagccttcttgttctcctccaaggtggagatggtgttaactcctgctcggaggacaagtggtctcttagtggggacatcccctttgcctgcagctttcttttcagcccgggccaatagcctctgcttattttcttgctttgtctttggtctgtacttgtgggccagcttaagcagctaagtagctatttggcggtgcagggcctgggtgaactggttaattgtaggaggcactttcagctgcttacagaggatggctttgtgccactgcaacctgatatagcggggccatttcacaaagtgagtgaggtccatattgggtggatgtcctgtccaatgccagaattcttaggccttttctcaaacaggggattcaccactttctttctttcttttttttttttttttttttgagatggagtcttgctgtgttgcccaggctagagtgcaatggtgcgatctcggctcaccacaacctccgcctcctgggttcaagccattctgcctcaggctcccaggtagctgggactacaggcatgtgccaccactccggctaatttttgtatttttagtagaggtggggtttcaccatgctggccaggctggtctcgaactcctgacctcaagtgatccgcttgtctcggcctcccaatgtgctgggagtacagacgtgagccaccacgcccaaccaggattcaccactttcttggcctcctgtttcttcatgacaccaagggccagagccacctccttcctcttggcctttccttttggcatcttgggtggcaggaagagattctttatagtcatttctaaagtctaatttatagagcattttactcttaaataactcctggattattactgctgtcatattttctactcttaaaagattttcttactacaaaattaatagattacatagaaaactatgtatttattaaaattttaaaagggagacagagtctcgctttgttgcccagactagtcttgagctcctggactcaagtaattctttggcctcagcctcttgcatagctgggattataggcatgcaccaccactcccagcttcattagattttattttatgaacttcaaggaaatacttagagtagatttggaattttgattaagtaaaaaattaaatgtatctggtactctcaataggataattcatttatttatttatttttaattagagacagtgtctcactatgttttccagactggtctcaaactcttgggctcaatggatcctcccgccttggcctcccagagttctgggattacaggtgtgagccactgtgcctggcctggaattcattttgtaccaactttagcttggaattactggaaatgctaataggaagaaatgactatgatttttttactctctagacatgatttactaatatatatcagctggctggacatggtggctcatgcttagaattgcagcattttgggaggctgaggcagaaggattgcttgagctcaggagttggagaccagcctgagcaacatacttagaacctatttctacaaaaaacttgaaaaaaatttcaccaggcatattggtatgtgcctgaggtttcagctacatgggaggagttcaaggatacagtgaaatactacacttttgcctggataacagcaaaattctgtctcttaaaaaaataaagctgggcgcggtggctcacccctgtaatcccagcactttgggaggccgaggtgggcagatcacctgaggtcaggagttcgagaccagcctggccaacgtggtgaaaccctgtctctactaaaaatacaaaaattagccaggcatattggcgcacgcttatagtcccagccactcaggaggctgaggaaggagaattgcttgaacccgggaggcagaggttgcagtgagcctagatcacaccactgcactccagcctgggcgacagagcaagactctgtctcaaataaacaaataaatccgggtgcggtggctcacgcctataatcccagcacttcaggaggccaaggcgggtggatcacctgaggttgggagttcaagaccagccctgccaacatggagaaaccccgtctctactaaaaatacaaaattagctgggcgtagtggcgcatgcctgtaatcccagctacttgggaggctgaggcaggagaatcacttgaacccaggaggcggaggttgtggtgagctgagatcgagccattgcactccagcctgggcaacaagagtgaaactctgtctcaaaaaaataaataaataaaaataaaaattaggtcgggtgtggtgatcatacatgtaatttcagcactttgggaggctgaggcaggaggattacttgagccctggagttccagaccagcctaggcaacatagggagaccccctttctacaaaaaattaataaaactagccgggtgtggtggcatgtgtctgtggtcccagctactcggaaggctgaggcaagagaattgctaaacacccaggtgtttgagggtgcagtgagctgtgattgcaccaccacactccagcctagacaacagagtgagagctcatgtctaaataaataactatacaaacaaacagcttatttcatgtggacatgtattaatgattccatcgtactagactatgagtttttaaggatagggactatgtctcagacagtgtttttatcttcagtgtataaaaccgttcggtatacattagtgttgtgaaaatactgaactcgcaactcttcagcttgaacattgcaaaactccttcatttaaacaaaatttgaccaggctgggcacgtgggcttatgcctgtaatcccagcacttcgggaggtcaaggtgggcagattgcttgagcccaggagtttgagaccagcctgggcaacatggcgaaaccccatctgtacaagaaatataaaaattagcagggcatggtgatgcacgcctgtagtcccagctacttgggagcctgcggtgggaggattgattgagtctgggagttggaggctgcagtgaggcgtaattgtgccactgcattctaccctgggcgacagaggagaccccgtctcaaagaacagaaaaagaaaacttggccaatgggaaggagacttttaataactttaaaaaacacttaaattgtttcataagaataaaataattttaaggactgctaggtacattgactttggattttttttctatttttggaacagggcatctatgtacttcaggacaacaaatttcgcctgcttactcagatgtctgcaggaaaacagtatttagaacatgcatctaaggtatttaatggaatagaagttggggtttttgttaatagtaggactacagggaaaagtacagtgctaatcataacaaactattgaattaaaaatatgttttaaggtgttcttttttgtttaaagagttttctatgaaatgagagacatgttacaataacactaaactgtagctaaatagtcatagagtgaccaattaaagaaacactggccgggcgctatggctcacgcctgtaatcccagcactttgggaggccaaggcaggtggattacctgaggtcaagagttcaagaccagcttggccagcatggggaaaccctttctctactaaaaatatgaaaaatagctggacgttctggcgagcgcctgcaatcccagctattcgggaggctgaggcaggagaatcacttgaacccgggaggcagaagttgcagtgagctgagatcgtgctatcattgcactccagcctggggtataagagcaaaactccatctcaaaaaaaaaaaaaaagaaaaaaaagaaacactataactaaatgacagtgaaatgtagatgtatggtagatcactttttttttttttttaagacaaggtcttgctctgtcatctaggctggagtgtagtggtacaatcatggcctatcttgaccttgacccccccgggctcaagtgatcctcccacttcagtcacccaaggaggtaggactgcaggtgtgggccaccatgcctggctaatttttaaaaaaattttttagagatgggatcccacgatgttgcccaggctcgtcttgaactcctgggctcaagtgatcacctcacctcggcctcccagtgtgttgggattacaggtgtgagccactgcatccggcctgattgcctattttctatatttttggggtatccaggctctaattacatttttatggttaatgtgtatattttctctcttttttttttttttcggacagagtgtgagactcactgcaacctctgcctcctgggttcaagtgattctcctgcctcagcctcctgagtagctgggattacaggtgtgcgccaccatgcctggctaattttttgtatctttagtagagacagggtttcaccatgttggcgaggctagtctcaaactcctgacctcgtgatccacccacctcagcctcccaaagtgctcggattacagacgtgattacaaaagccacccaaaatgctgggattacagcctcccaaagtgctgggattacagacgtgattacaaaagccacccaaaatgctgggattacagcctcccaaagtgctgggattataggccatgcctggcatattttctcttttttactaacttcttagtttaatatttctggttctcacttaactttttgggatcttggtttcttcagctgtgaaaagagtaagttggaccaattcagtgatttctaactattttgagttatggacatctttgagaactggaacacctttccccataaatacgcacatatacatggtttttattttcataggggtcacaaattccccgattaagaactcttgggatgaacaatctctaaggcctcttccagcttaaaatttcatgactcagatctagttacttattagtgcccatttatgtatattatttataagataatattttatattattcgtagataatgtagtatgttgaacatcatgcagtatagatgtgggtaatcaaaaattccctgaattgctaatttttcaatccagttcttgtcatgacttttggttttgtagctcagccctattccctttctttgtttctatatgacagggtttctcaacgtccaaactgttgatactttcaaccagataattctttgttgtggcaagctataagtcttgaacaagtcaagattcttggttgtaaataggggaaagaaattctgcttgtaagctaacaaaattgataagctcaaagaataggcaataaccaggggaggttaaggcagccagtaagatagccaagtcactctgcagactgtatctacttagaatcctgcaggcagcagggactgtagacacaaactacctttactgcctccagaactaattctgatcagtttctggcttgtttttgtcactgagtctagattcacagtcctggactggagtacttaattggctgagcttaagtcttaagtcctacgtccatgctttagtttccagggagctgggaaatatatcaatatttttcagtaatttgaacagttcttcaaaatcctttttttaaacaggaatgacttactgatgataaatcatgtaatgttgtatttatcaatagctttactattttagtaaatccttactatttttaatgattttttttccttttagtatttagcatttacgtgtggcttaatcagaggtggcttatcaaacttgggaataaaaagtattgtaacagctgaagtgtcttcaatgcctgcttgtaagttgaattcgcctttcttacaaatgttttagtaatttgttttcaggtctgtttttttttttaatttaactgagaggaaatttaaaatgctgaaactttcattttagttttatcaatgtaacactttagtgtagtaatatgtagcatactacattcattttcagtaatttttgaataatggactaaaatccaaatttataagacaatttaagggatgatttttaacttttctaaagttattcaaactgtaacttttttaaagatattcttctgaatatctcctgcagtgttttaagatagcaaatttccctagaacattgaaaatgctattttttttttttttttttttttttgagacggagtctcgctctgttgcccaggctggagtgcagtggcacaatctcggctcactgcaagctccacctcccgggttcacgccattctcctgcctcaacctcccgagtagctgggactacagttgcctgccaccacgcccagctaattttttgtatttttagtagagatgggtttcaccgtgttagccaggatggtctccatctcctgaccttgtgatccgtctgcctcggcctcccaaagtgctgggattacaggcatgaaccaccgcgcccggcccgaaaatgctatttttaaacaattgtttaggatatgtctattatatcaagctaagtaaaaccaaatattcttttatcactaaatgtctccctaaagatcttttcaccagagctaccaaccaagaaaaaatggacttgagctttattgtatttcttttcaatttacaatgatcattagccatgaaatactgtacccaaatgtaggattcataaagagaaacaaaagtgcttactcaacaaaccatataatcatcccataaaaatagaattgactggccgggtgtggtgcctcacacctgtaagctcagcactttgggaggccgaggtgggcgtatcatgaggtcaggagtttgagaccagcctggccaataaggtgaaaccctgtctctactaaaaatacaaaaattagctgggcgtggtgacagacgcctgtagtcccagctactcaggaggctgaggcaggagaatcacttgaacccaggaggtggaggttgcagtgagcagagatcgtgccactgcactccagcctgggcaacagagcaagactccatctcaaaaaaaaagaaaaaatagaattgactttattgaatattatgaagaatgcgaaaaagtttttgacatagcagatttcttgactgaaactatttcctatatggaacagaaaattgatgtttagacttgttttctttgtatctaaaatcaaagaattatttgtatttttttttttaggcaaatttcaggtgatgatacagaagctgtagaacatactgaaatgcaaggcttcaacagtgtaaagagataaattattcatgtaaaagtatttcaagtagtgatgatttaattacattgttcgatgtttgtacaggagtaagcatgtatttttatcaatttaacacagatcaaaggagatgaagggacattctgccatgacatacacttaaccaaaactattcaaaatgaaaaccggatttcaaataaccagacaccaagatg

SEQ ID NO: 14604 - DNA, 1000 bp, Homo sapiens
ctttggttagagctcccgtcagactttagttcggccctaggatttggtagccccgaagtgtgggctctctccagtaccagactcatttcagtaccagcctttgggaagtcgtgtgaatacctcggtctcttagccacagggatagaatggcggcctgacggagccgcggcgccggcgaagtcgctgaggcgcgagctggaacccccagaccagctcaaacgggagccaaaactcgaagcttggaagaattagcaggaaatggcggatgaggcgttgtttttgcttctccataacgagatggtgtctggagtgtacaagtccgcggagcagggggaggtggaaaacggacgatgtattactaagctggaaaacatggggtttcgagtgggacaaggattgatagaaaggtgagcaggttggatttgaaaattttcttgcaggtttacaaaagatactgcaaggttcaaggatgagttagatatcatgaagttcatttgtaaagatttttggactacggtattcaagaaacaaatcgacaatctaaggacaaatcatcagggcatctatgtacttcaggacaacaaatttcgcctgcttactcagatgtctgcaggaaaacagtatttagaacatgcatctaagtatttagcatttacgtgtggcttaatcagaggtggcttatcaaacttgggaataaaaagtattgtaacagctgaagtgtcttcaatgcctgcttgcaaatttcaggtgatgatacagaagctgtagaacatactgaaatgcaaggcttcaacagtgtaaagagataaattattcatgtaaaagtatttcaagtagtgatgatttaattacattgttcgatgtttgtacaggagtaagcatgtatttttatcaatttaacacagatcaaaggagatgaagggacattctgccatgacatacacttaaccaaaactattcaaaatgaaaaccggatttcaaataaccagacaccaagatg

SEQ ID NO: 14605 - DNA, 18620 bp, Homo sapiens
gaatgccggggtagaggggaccggaagttgtttttttcgcccccgcccagcggccggatcgcatctcagctggttggctttggttagagctcccgtcagactttagttcggccctaggatttggtagccccgaagtgtgggctctctccagtaccagactcatttcagtaccagcctttgggaagtcgtgtgaatacctcggtctcttagccacagggatagaatggcggcctgacggagccgcggcgccggcgaagtcgctgaggcgcgagctggaacccccagaccagctcaaacgggagccaaaactcgaagcttggaagaattagcaggaaatggcggatgaggcgttgtttttgcttctccataacgagatggtgtctggagtgtacaagtccgcggagcagggggaggtggtgagtgctgccacacaaccttgaggtccttttgcggtgacacaccttgtttcccctcagtgctttccttcaacccctgtcccatcgccacccgacgcctcccgaggtgtacacaaaatggtccacctccaggtgtcctaaaccctagaacctgtcagttgtctcctttgaaccgtcatctttcatcgttttctctttcgtatcttcttctatttgattctcttttgtctattcccgtacgtttgtcttgcacgccacagattttggtacttttagtgttgtccctgccattatttacgagagggttaactgcagagcctacttagttttgctggcacttccagcacttgagccatgcactggacagacctgtgccaacctgagaagcctgtccctccttcctcattcctaatgctcagtacaactccacacaacttgagacctgaagcctaatgaaggttgagtttgcaaaggaaagtttgcaggcgttaggataattagggaacataatttaaattaattatttcagaaagtatttatttagtgcccttatgtcagagcgatttctaggtgccagggatatagtagtgaatgaaacaatggccccatccttgtagagatttttttttaatctaatttaatccgaaatgtgatagtatgtagcggttacttctaatatgtgggagtccttattcaatcattgtgggcctgtcactgctgacactgctagataaattaaataaaataatactcctgcctcacagtatttagggaatagtgatttaatgaatagttaacactgagtattggctggtagaatcatggagttgtaacggattttagaaatactccaaagtcatgctcaagtcaggagccctttctttaatgctattgataaaaaatgagtggagagtggggataggaaatgtatcctaggcaaagataaagtggtagaggtatgaaagagtggtggatttaaatacacttaagcatttctttggactagactgaatagagagtgagaagaattgagaggtgaagttagaaagctttgtgtaattaaagaattcggatcttttcgagggaatatttttaaggaagggaatgatgtggaccatttgcattttagaaaagtaatccagtgtttgggctagagagggaagatccttgtagggggaaaatcctttattacgggagtcactgcaggaggagatgaagatctggattaagacagggatagtgagaaaaggagataacagatttgaaagttagaaagtggaattctgtaggccttgtttaaggatgggagtgggagttgaaaattatcgtcaggttttcagcttgagcagctgggttggatggtggtactattaatcagaaaaggaaataaaggagaagaaaaaaataaggaggtaagataatgagttatttcggggcaggttgaacttttgaggtgcctgtatgacatccaaaaaaaggtactgccagtttgcacaagaaggataggcaggatacatttggaaggttattggaaatgaagcgaattctattcttattcaaatgacccatctataatagagatttttttcaagtcacaaacttctgactttattattgacctcaaggtttactgtttgtgcaaagctagccttccttttccctctagaacagttaacacaccccttttacttttttgtcataacccccgatccccccaaaccacttgcgtattcagttctcttcattctcccctcccttcttacctttcctcttctctctctctctttttttttttttttagatggagttttgttcttgtctcccaggctggagtgcagtggtgtgatctcagctcactgcagcctccgcctcttgggttcaagcgattctcctgcttcagcctcctgagtatctggaattacaggtgccggccaccatgcctgactaatttttttgtatttttagtagagacggagtttcaccctgttgaccaggctgttcttgaacttctgacctcaggtgatctgcccgccttggcctcccaaagtgctgggattacaagcgtaagccactgcgcctggcccttttctgactcttgtctagaataatattttttcttctttttaaaatatcttttttttttcccgtgggttaatcctaaataaaatgaacagagctgttctactcaggcctgataattttaagagatggactaacatacaagagaaaggaagttcatagttttgaatcatttaagctaaaaataactttctttttctactgcagtgtatttatgatgggggggaaaattgaaagtacataataagcaaaaattatataaataacagttatgtggtagtcttcataatcagaacccatactgaaatacgggtatataagggttcacattagtgtccatactttgagtgtgcttgaaatttttcatcatgaaaaatgtaaaagatacataatcctgtcatccagaggtgatttttagagatttttttcagacataaaaagatctgtaaaaactatgttgtttatgtctgaaaagacctataaaatccatttctcgctgacaggattatgtgtctttttttttgtttttgttatggaaagtttttttaaatgaaataaagttttataaattttcagtatagcaaaataaacttccataagacttgaggtgagataaaagaaagaaacagtgttctaaccctccaaatcaaggtttttcaaactatgcttaaagaggaattctcttaaaatggactaattgggcatttctcaatttatggtgaatggattttgaaaggctaatggataaaatgttctcaagttgaatttttcttaaaaatttggtgcctactcaaaagtgcatgaacaagtagcaaaattaagtagtagggcttaattcaaaagctcatgtgatcataggatttgaaagtgtctgcatataagcatattgtaactgcccagtgggttcttcttccccactgcccaggtagagctgatctatcaagacaggagaattgcaataaggagtttatgtagagctgctaaatgggagagcagagttttattattgctcaaatcagcctccccaaacatgcagagtctagggtttatcaaggatagtttggtaggctgggggctggggaatgggtgctcctggttggttggggatgcagttacagaggtgggggccagaggaccagttggagtcatccgaaatgcaaaagtctgaaaagacatctcaaaaggccttttttaggttctacaatagtgatattatttacaggagtaattggggaagttacaaatctgtgacttccagaataatgtctgattatcatttaactacctacattttagcagaattcagacccctctcataagcctaaccttatagtctttcattagttttgcaaaggtgatttagtttcgggaagggctattatcattcttgctttaagcttacactataaactaaatttctcccaaagttagcttgggctgcatccagaaatgaccaagggcagcttggaggttaaaggcaagatggagttgattaggtgagatctcttttacagtcatgattttcttactgttacaatctttgcaaaggtggtttcaatagttcctgctaataaatatgttcctaggtgattctacagagagcagattattccaaaaagagcatcatgatttacagacacttattctagctgaacttgtttttttgttttttttttttttaagagacaagtctctgggttagtgtggtggctcacacctgtaaatcccagcactttggaaggctgaggtgggagaattacttgagcccaggagttggagaccaacctgggcaacatagtgaaacagtgtctctatttaaataaaaaaaaaaagaggctggacacggtggctcaggcctgtaatcctagcactttgggaggccaaggcaggcaggtcacaaggacaggagttccaggccagcctggccaacatggtgaaactccgtctctactaaaaatacaaaaaatagctgggtgtggtggtgcacgcatgtagtcccagctactcgggaggctgaggcagaagaatcacttgaacccaggaggcggaggttgcattgagccgagattgtgtcactgcactccaacctgggtgacagagcaagactcagtctcaaaaaaaaacagagagagagagagagagacaatgtcttgctctgtcatgcaggctgaaatgcagtgttgggactttggctcactgcagccttgacctcctgggcttaagtgatcctcccacatcagcctctcgaatagctagggctatgggcatgctaccatgtccagctaattaaaaaaatttttttttgtagaaacagagtcttgctatgttgctcaggctggtctcagactcctagtctcaagtgaccctcctgcctcagcctcctacggtgctgggattataggcatgagcactgcgcctggcctcatcctaagcatgtttgagaagtgtggagaatagcagaaaaactgaagatagtgatacgtacagtaatagatgtatgtacagaattttacgacagcatagggcctaaggaagtttcagggaagccatctgggagaatgtaatacttgagcagaatttaaagaatgtgaatgccaggcgcggtggctcacgcttgtaacccagcactttgggaggccgaggcgggcggatcacaaggtcaggagatcgagaccgtcctggctaacatggtgaaaccccatctctactaaaaatacaaaaaattagccgggcgtggtggcggtcgcctgtagtcccagctactcaggaggctgaggcaggagaatggcgtgaacctgggaggcagagcttgcagtgagccgagatcacgccactacactccagcctgggcaactgagcgagactccgtctcaaaaaaaaaaaaaaaagaatgtgaagtctagggaatagcacataaaaaggcagggagacagaagagaacatggcactctggagttgctgcagaaatttcagagtggtaaaagggaaggatgtttgtgaatttggttaactagccaggagtctttaaggaaaggacataccatgatgccatgctaaggagtttggactttattttttgtttgtttgttggtttgttttgagacaggatctcactctgttgcccggtctagagtgcagtggctagatattggctcactgaaacctctgcctcctgcactcaagccatcctcctacctcagcctcccaagtagctgggactataggtgcatgccaccatgttcacctaatttttgtaatttttttaaagatgaggtttcactatgttgcccaggctgccctcgaactcctaagctcaagcaatccttggcctcccaatgtactgggatttacaggcatgagtcactacatcaggcctggactttattttgaagaaaggggagcaggtgctgaaattccagtagagaataacatgattttttttttagacagagtttcactgttattgcccaggctggaatgcaatggggtgaccttggctcactgcaacctccgcctcctgggttcaagcaattctcctgcctcagcctcccgagtagctgggattacaggcatgcgccaccatgcccagctaatgttttatgtttttagtagagatggggtttttccgtgtcggtaaagctggtctcgaactcctgacctcaggtaatccgcctgcctcggcctcccaaaatgctaggaggcgtgagccatcatgcccggccgagaataacatgattttttttagaaatttactttagtagaagttacactaccagaaatatagaagatgacacaaagtaggaaaaaatgagacaagaccagttggaaagctatagctaaaaaccaggagagaaatgataaggctttacttaagaagtaagggtagagagagacgatgaattttgaaaagcttgtaaaagataggctccaccggactacagtgtatggggggttgggagcacaggggtgaagaaaatggaagttttctggttggagtaactaggtgaatggtggtgccattaatgaagttaggaaattttggaggcagagcaggctgaagacattaataaaatgaatatcatttgaatatgcatacttcgaaggtcctgtgggaccactagatgtctatgcccaataaagtctgtactagaaacgcagatttaatagtcacagcaccataagcagagtgcatggttccttagaagaaagtttagcaaataataagccctatggtttccttagtgggagacaaacagccttcagaatatacaaaaatccctgcctttttggagctttattttagcagagaggggaacaaggggcacatgggcaatataaaatagtaaaatgtatggtatattaaatggtgaaagaagttctgtggagacagattaagcaaggaagtgggactgagtatcaaaatcaatttttagaaggtttgttaaagctgattagcggccccatacccagagtttctgattaagtaaattgggagtgggactagagaatttgcaagttcccatgtgatgctgatgttgctggtcttttttttttttttttttctggtgatgaagtctcgccctgtcacccagactggagtgcagtggcatgatctcggctcgctgcaatctctgcctcctgggttcaagcgtttctcctgcctcagcctcttgagtagctgggactacaggtatgtgccaccatgcccggctaattttttgtatttttagtagagatgaggtttcactgtgttagccaggatgatctcgatctcctgacttcgtgatccgcccacctcagccttccaaatgctgggattacagatgtgagccaccacacccagccaacacatttttaaaatcactaggatagagagttgccaaaggggtatgatgttgcacttttaaagaagatggttaaaatgggcctaagatggtgacatgagagtagactcaaaggaagtgagggagttggttgtgtgactatctggaggaagagttgatgcaaaagcccctggaatgtgcctggcatgtttaagggacggggcagagtgcatctgcagaaggttgaagccagagaggtatggggtctggattgtagaggacagtccatcagtcatccataggatttggatgtgttcagcatagaggtactatttcaagccttaagattgaatgagattgtcaaagaaagagcaaagcaatctcatgatttaaggcaaagtgtgataatcagctaagacactgagaactgggaagcctggatgattctgagacattttgaagcaaggaacaatagaacttagagcagaaagcaaatgactcagggaaaaacatcaaaggtgataccaggttttataacctaggagagaagaatgattgaaattgggataaaagggagacgaggagtaattaggaagaggatttgatttctgaaaatcaattataagcagtagttccctgtttatcctgttgccttgtgccaggtgcagtggctcacacctgtagtcccacagctttgggaggccaagccaggaggatatcttgaggtcaggactttgagaccagcctgggtaacagagtgagatcccatctcttaaaaaaaaaaaaaatagccaggcatggtgatgtgcctgtagtcctagctacttgggagactgaggtgggaggattgcttgaacccaggaatttaaagcttcaatgaaccatgatctcgccagtgcactgcagcctgggcgacagagcaagacttgtcaaataaataagtaaatagcagtttggtcttttgttggaggaacgtctattcttagcttggacactgcggtttttccttgggcagcagaagcaatgtggcgattgaagaagtgacctaaaactttgatgttaggtagaagcagatggcccaagccaagacaagtgcttgtaaatccactggtgggagcccctcctcctaacagcaggttattaacgctgccagaaaaaaagtgtcccctctaccggtctggtgaagaaacctcatcgctacgggcctgggactgtggcacttctagagattctcgttaccagaaattgacctagcttctcatctggaagctgcctttctagaggttggtgagagagatcacccaggatttcaaaaccaactttaggtttcagagcacagtcattggggtgctgcaggaggctagtgaagtgtacctggaggctagtgaagtgtacctggtgggttggtttgaagatgctaatttgtgtgccatctacggtaagagagttggctctcatgcccaaagacatccagttggctcgccagacacggagtgagcgagcttaagtgaaggcagattttaaggcattttatatgaattctgtaaaatactttggtttaatttgtgactttttggggagaaattatttataatatgttgcatttgtgcttaagtcattccgtcttttgggatgaatgtgaaaagtgactgttcatagacctcagtgacgtaagcactgttgctcaggagtgacaagttgctaatacgcagaagggatgggtgacattttttcattctcatgacgcatgtttctgtaagttaatgacttgttaggtagctattaaggaactagagttgataaataaatgtgtataggttccttttgcaatataactggttattacttgatccaagtgtttaacatttggagctaagtctgaccatacattactgtgatagaatgtgggccttttcaagggtgaagatacaagccttaaccacagtataacttgcagtttccttaaacaaacaaagaaataaaaacctagcatggagtacattatgtgcatttataatagctattttaaatattgtagtgtcaacattcaaaaattaattcttttacattcgcaaatggtggggagtcttgtcattaaggtgtgtataacttagaatccacttggttttctcctaactggactgcatttgttttcatagtagtaaaatgttatgtgtattacaccttgcataagtcctcattctactacgtgttaactaaccctctagatgataatgcagatgctaactgtgggattttatttataagaactctagaataaataccagttattcctaccaacatcggctgttactaatattctgaagtagttagtgcaacttttcattgtgttgtggttggtctcctaagtaggttggatttttctcctcttctaagagaaaacaatagtgaaattattttctttctcttttctctctgtttctgtctctttctctctctctttctcccttcccttcccttccctcccctcccctcccctcttcttttcttttctttctcttctcttctcttttctttctttcatggggtcccttgctcaacctgttgcccaggctggagtgcaatgacatgatcatggctcagtgcagcctcaacttcctggactcaagcaatccacctgcatcagcctccaaaatggcacatgctaccatgcccagctattttatttttacttttagtacagatgtggtcttgctatgttgcccaggctggtcttgagccattgagctcaagtgatcctcctgctttggcctcctaaagtgctgggattacaggcatgagccaccgtgtcttgaggggtttgtttctattaaaagacttggtgtcagggaggagcacaaagctttaacccattgaacctctgacagttaagatggtgttgggttaggttacatctggttactatcctgggaaaatcacttctatagagatggccttccaagtggttttaaaatgtatctttctgtctgggcgcggtggctcacgcctgtaatccctgcactttgggaggccaaggcaggtggattgcttgaggtcaggagtttgagaccagcatggccaacattttgtatttttgtattttctctactaaaaatacaaaaattaaccaggcatggtggtgggtgcttataattccagctacttaggaacctgaggcaggagaatcacttgaaccctgtagatggaggttgcagtgagccgagatggccccactgtactgcagcctggatgacagagcgagactccatctcaaaataaattaaaaaaatgtatccttctattgaagtttttaggttaatcatgtatatgttgactaaattatgaattaacttgtttatcaaaaaaaaagtaaaaagtaaagtaagtaaaagtaaagtaaaataaataaaatcaaccttataattcactttttcttaaactgtttcagggaaaaaagtataaatgtttacattaatatttttaaccaatcttgtaaaacaatttctgaatactaacatcctagcattctaaaagtatttaaaactattgttttttaaaataggaaaacggacgatgtattactaagctggaaaacatggggtttcgagtgggacaaggattgatagaaaggtgagcaggttggatttgaaaattttcttgcaggtaggttataaacaaaggtgatctatttcaaaagattgcataaaacttgggatattttaattttaattcctgaatgttattctctttacttcaaaaattaaaatttctttttagatccaatgccatttaactcatttattcaaattttattttaatgtttaaagaaaatatatattttatatattttagactttcttcctgaagctattttagactttattcctgaagctattgaagcaactatctaaaatcttactgcattttcaacttaagatctgctaggttctttaacctgcatagaatttttaagtacataggtttgaaataactatagtctatgtttatgcgtgtaattatctttgaacttataaatcagttctttttagtatttctttctcactacctgaatagttaaactcggagtatattttatataacaatgtcatgataatgctcagctctttgttcttttgtggttttttgatgtgctagaatgcattgcacctgaaattttggctataatgttagactaatttgaggcctcataatttatataacataatgtgaatccattgagataggatcatgttacctggtgcttatgactttattagtgttaataaatgttcagccaggtgtggtggctcatgcctgtaatcccagcactttgtgaggccaaggtgggagaatctcttgagctcaggagtttgagaccagccagggtaacaaagtggaaccctgtctctacaaagatatacagattagctgagcatggtgacatgtgcctgtggtctcagctgctagggaggctgaggtgggaggatagcttgagcctgggagggaggtagacgttgcaatgagccgagattatgctattgcactctaacctgggcgacagagccagaatctgtctcaaaaaaaaaattaaaattaaaaaacccaataaatgttcagtgctgttctggcatttggaaattagttaataattagtccctcttgctttttttggaggagaaatactgtattacttctagttgatctttttaggtttacaaaagatactgcaaggttcaaggatgagttagatatcatgaagttcatttgtaaagatttttggactacggtattcaagaaacaaatcgacaatctaaggacaaatcatcaggtaattaaattaattaaggcctatattttaaagtcctttaacttgatataaatatcgtattttagtgacttatttaaaacctaaaataatttctggttaactttggaatatgtttatgttattaatgagttattagtttttttcttctaatagtgtgaactgagtaaagacaaagggacagttatcagtaatgatagctgttcctttcacccaattatatgctatgttaagttttttaaagtagcataagtcaggatgagaatagcttttactatttggttccttagttactgttaattagtggtaataatatgcagaaccacaaatatatcacctttatgtctttagagtcatttcttttttttgaagaagaagaatttggattattttaattatttttatatacagaaaactcaacagtgtatgtttaacccagtttggtgtcaagttctttagcctttgccttttcctgcttgacaattcaagccacagacttgagacccaggacattgcctccccagtgacagtggatttcgttttgtctgtcgtaattggttctgatagcttccaccagctgaacctaagctccattgtcctctgagttaatctgtgtaaaggcgacagtggtgcgggtcttcttgtggattagacatcccagtcttgccttccccttgataatgcggtaagggacccccattttatgacacaaggcaggcaggaagacagccacctcgatgggatccacatagtgtgcagtcaccaccagctgagccttcttgttctcctccaaggtggagatggtgttaactcctgctcggaggacaagtggtctcttagtggggacatcccctttgcctgcagctttcttttcagcccgggccaatagcctctgcttattttcttgctttgtctttggtctgtacttgtgggccagcttaagcagctaagtagctatttggcggtgcagggcctgggtgaactggttaattgtaggaggcactttcagctgcttacagaggatggctttgtgccactgcaacctgatatagcggggccatttcacaaagtgagtgaggtccatattgggtggatgtcctgtccaatgccagaattcttaggccttttctcaaacaggggattcaccactttctttctttcttttttttttttttttttttgagatggagtcttgctgtgttgcccaggctagagtgcaatggtgcgatctcggctcaccacaacctccgcctcctgggttcaagccattctgcctcaggctcccaggtagctgggactacaggcatgtgccaccactccggctaatttttgtatttttagtagaggtggggtttcaccatgctggccaggctggtctcgaactcctgacctcaagtgatccgcttgtctcggcctcccaatgtgctgggagtacagacgtgagccaccacgcccaaccaggattcaccactttcttggcctcctgtttcttcatgacaccaagggccagagccacctccttcctcttggcctttccttttggcatcttgggtggcaggaagagattctttatagtcatttctaaagtctaatttatagagcattttactcttaaataactcctggattattactgctgtcatattttctactcttaaaagattttcttactacaaaattaatagattacatagaaaactatgtatttattaaaattttaaaagggagacagagtctcgctttgttgcccagactagtcttgagctcctggactcaagtaattctttggcctcagcctcttgcatagctgggattataggcatgcaccaccactcccagcttcattagattttattttatgaacttcaaggaaatacttagagtagatttggaattttgattaagtaaaaaattaaatgtatctggtactctcaataggataattcatttatttatttatttttaattagagacagtgtctcactatgttttccagactggtctcaaactcttgggctcaatggatcctcccgccttggcctcccagagttctgggattacaggtgtgagccactgtgcctggcctggaattcattttgtaccaactttagcttggaattactggaaatgctaataggaagaaatgactatgatttttttactctctagacatgatttactaatatatatcagctggctggacatggtggctcatgcttagaattgcagcattttgggaggctgaggcagaaggattgcttgagctcaggagttggagaccagcctgagcaacatacttagaacctatttctacaaaaaacttgaaaaaaatttcaccaggcatattggtatgtgcctgaggtttcagctacatgggaggagttcaaggatacagtgaaatactacacttttgcctggataacagcaaaattctgtctcttaaaaaaataaagctgggcgcggtggctcacccctgtaatcccagcactttgggaggccgaggtgggcagatcacctgaggtcaggagttcgagaccagcctggccaacgtggtgaaaccctgtctctactaaaaatacaaaaattagccaggcatattggcgcacgcttatagtcccagccactcaggaggctgaggaaggagaattgcttgaacccgggaggcagaggttgcagtgagcctagatcacaccactgcactccagcctgggcgacagagcaagactctgtctcaaataaacaaataaatccgggtgcggtggctcacgcctataatcccagcacttcaggaggccaaggcgggtggatcacctgaggttgggagttcaagaccagccctgccaacatggagaaaccccgtctctactaaaaatacaaaattagctgggcgtagtggcgcatgcctgtaatcccagctacttgggaggctgaggcaggagaatcacttgaacccaggaggcggaggttgtggtgagctgagatcgagccattgcactccagcctgggcaacaagagtgaaactctgtctcaaaaaaataaataaataaaaataaaaattaggtcgggtgtggtgatcatacatgtaatttcagcactttgggaggctgaggcaggaggattacttgagccctggagttccagaccagcctaggcaacatagggagaccccctttctacaaaaaattaataaaactagccgggtgtggtggcatgtgtctgtggtcccagctactcggaaggctgaggcaagagaattgctaaacacccaggtgtttgagggtgcagtgagctgtgattgcaccaccacactccagcctagacaacagagtgagagctcatgtctaaataaataactatacaaacaaacagcttatttcatgtggacatgtattaatgattccatcgtactagactatgagtttttaaggatagggactatgtctcagacagtgtttttatcttcagtgtataaaaccgttcggtatacattagtgttgtgaaaatactgaactcgcaactcttcagcttgaacattgcaaaactccttcatttaaacaaaatttgaccaggctgggcacgtgggcttatgcctgtaatcccagcacttcgggaggtcaaggtgggcagattgcttgagcccaggagtttgagaccagcctgggcaacatggcgaaaccccatctgtacaagaaatataaaaattagcagggcatggtgatgcacgcctgtagtcccagctacttgggagcctgcggtgggaggattgattgagtctgggagttggaggctgcagtgaggcgtaattgtgccactgcattctaccctgggcgacagaggagaccccgtctcaaagaacagaaaaagaaaacttggccaatgggaaggagacttttaataactttaaaaaacacttaaattgtttcataagaataaaataattttaaggactgctaggtacattgactttggattttttttctatttttggaacagggcatctatgtacttcaggacaacaaatttcgcctgcttactcagatgtctgcaggaaaacagtatttagaacatgcatctaaggtatttaatggaatagaagttggggtttttgttaatagtaggactacagggaaaagtacagtgctaatcataacaaactattgaattaaaaatatgttttaaggtgttcttttttgtttaaagagttttctatgaaatgagagacatgttacaataacactaaactgtagctaaatagtcatagagtgaccaattaaagaaacactggccgggcgctatggctcacgcctgtaatcccagcactttgggaggccaaggcaggtggattacctgaggtcaagagttcaagaccagcttggccagcatggggaaaccctttctctactaaaaatatgaaaaatagctggacgttctggcgagcgcctgcaatcccagctattcgggaggctgaggcaggagaatcacttgaacccgggaggcagaagttgcagtgagctgagatcgtgctatcattgcactccagcctggggtataagagcaaaactccatctcaaaaaaaaaaaaaaagaaaaaaaagaaacactataactaaatgacagtgaaatgtagatgtatggtagatcactttttttttttttttaagacaaggtcttgctctgtcatctaggctggagtgtagtggtacaatcatggcctatcttgaccttgacccccccgggctcaagtgatcctcccacttcagtcacccaaggaggtaggactgcaggtgtgggccaccatgcctggctaatttttaaaaaaattttttagagatgggatcccacgatgttgcccaggctcgtcttgaactcctgggctcaagtgatcacctcacctcggcctcccagtgtgttgggattacaggtgtgagccactgcatccggcctgattgcctattttctatatttttggggtatccaggctctaattacatttttatggttaatgtgtatattttctctcttttttttttttttcggacagagtgtgagactcactgcaacctctgcctcctgggttcaagtgattctcctgcctcagcctcctgagtagctgggattacaggtgtgcgccaccatgcctggctaattttttgtatctttagtagagacagggtttcaccatgttggcgaggctagtctcaaactcctgacctcgtgatccacccacctcagcctcccaaagtgctcggattacagacgtgattacaaaagccacccaaaatgctgggattacagcctcccaaagtgctgggattacagacgtgattacaaaagccacccaaaatgctgggattacagcctcccaaagtgctgggattataggccatgcctggcatattttctcttttttactaacttcttagtttaatatttctggttctcacttaactttttgggatcttggtttcttcagctgtgaaaagagtaagttggaccaattcagtgatttctaactattttgagttatggacatctttgagaactggaacacctttccccataaatacgcacatatacatggtttttattttcataggggtcacaaattccccgattaagaactcttgggatgaacaatctctaaggcctcttccagcttaaaatttcatgactcagatctagttacttattagtgcccatttatgtatattatttataagataatattttatattattcgtagataatgtagtatgttgaacatcatgcagtatagatgtgggtaatcaaaaattccctgaattgctaatttttcaatccagttcttgtcatgacttttggttttgtagctcagccctattccctttctttgtttctatatgacagggtttctcaacgtccaaactgttgatactttcaaccagataattctttgttgtggcaagctataagtcttgaacaagtcaagattcttggttgtaaataggggaaagaaattctgcttgtaagctaacaaaattgataagctcaaagaataggcaataaccaggggaggttaaggcagccagtaagatagccaagtcactctgcagactgtatctacttagaatcctgcaggcagcagggactgtagacacaaactacctttactgcctccagaactaattctgatcagtttctggcttgtttttgtcactgagtctagattcacagtcctggactggagtacttaattggctgagcttaagtcttaagtcctacgtccatgctttagtttccagggagctgggaaatatatcaatatttttcagtaatttgaacagttcttcaaaatcctttttttaaacaggaatgacttactgatgataaatcatgtaatgttgtatttatcaatagctttactattttagtaaatccttactatttttaatgattttttttccttttagtatttagcatttacgtgtggcttaatcag

SEQ ID NO: 14606 - DNA, 664 bp, Homo sapiens
gaatgccggggtagaggggaccggaagttgtttttttcgcccccgcccagcggccggatcgcatctcagctggttggctttggttagagctcccgtcagactttagttcggccctaggatttggtagccccgaagtgtgggctctctccagtaccagactcatttcagtaccagcctttgggaagtcgtgtgaatacctcggtctcttagccacagggatagaatggcggcctgacggagccgcggcgccggcgaagtcgctgaggcgcgagctggaacccccagaccagctcaaacgggagccaaaactcgaagcttggaagaattagcaggaaatggcggatgaggcgttgtttttgcttctccataacgagatggtgtctggagtgtacaagtccgcggagcagggggaggtggaaaacggacgatgtattactaagctggaaaacatggggtttcgagtgggacaaggattgatagaaaggtgagcaggttggatttgaaaattttcttgcaggtttacaaaagatactgcaaggttcaaggatgagttagatatcatgaagttcatttgtaaagatttttggactacggtattcaagaaacaaatcgacaatctaaggacaaatcatcagtatttagcatttacgtgtggcttaatcag

SEQ ID NO: 14607 - DNA, 20325 bp, Homo sapiens
ggatttggtagccccgaagtgtgggctctctccagtaccagactcatttcagtaccagcctttgggaagtcgtgtgaatacctcggtctcttagccacagggatagaatggcggcctgacggagccgcggcgccggcgaagtcgctgaggcgcgagctggaacccccagaccagctcaaacgggagccaaaactcgaagcttggaagaattagcaggaaatggcggatgaggcgttgtttttgcttctccataacgagatggtgtctggagtgtacaagtccgcggagcagggggaggtggtgagtgctgccacacaaccttgaggtccttttgcggtgacacaccttgtttcccctcagtgctttccttcaacccctgtcccatcgccacccgacgcctcccgaggtgtacacaaaatggtccacctccaggtgtcctaaaccctagaacctgtcagttgtctcctttgaaccgtcatctttcatcgttttctctttcgtatcttcttctatttgattctcttttgtctattcccgtacgtttgtcttgcacgccacagattttggtacttttagtgttgtccctgccattatttacgagagggttaactgcagagcctacttagttttgctggcacttccagcacttgagccatgcactggacagacctgtgccaacctgagaagcctgtccctccttcctcattcctaatgctcagtacaactccacacaacttgagacctgaagcctaatgaaggttgagtttgcaaaggaaagtttgcaggcgttaggataattagggaacataatttaaattaattatttcagaaagtatttatttagtgcccttatgtcagagcgatttctaggtgccagggatatagtagtgaatgaaacaatggccccatccttgtagagatttttttttaatctaatttaatccgaaatgtgatagtatgtagcggttacttctaatatgtgggagtccttattcaatcattgtgggcctgtcactgctgacactgctagataaattaaataaaataatactcctgcctcacagtatttagggaatagtgatttaatgaatagttaacactgagtattggctggtagaatcatggagttgtaacggattttagaaatactccaaagtcatgctcaagtcaggagccctttctttaatgctattgataaaaaatgagtggagagtggggataggaaatgtatcctaggcaaagataaagtggtagaggtatgaaagagtggtggatttaaatacacttaagcatttctttggactagactgaatagagagtgagaagaattgagaggtgaagttagaaagctttgtgtaattaaagaattcggatcttttcgagggaatatttttaaggaagggaatgatgtggaccatttgcattttagaaaagtaatccagtgtttgggctagagagggaagatccttgtagggggaaaatcctttattacgggagtcactgcaggaggagatgaagatctggattaagacagggatagtgagaaaaggagataacagatttgaaagttagaaagtggaattctgtaggccttgtttaaggatgggagtgggagttgaaaattatcgtcaggttttcagcttgagcagctgggttggatggtggtactattaatcagaaaaggaaataaaggagaagaaaaaaataaggaggtaagataatgagttatttcggggcaggttgaacttttgaggtgcctgtatgacatccaaaaaaaggtactgccagtttgcacaagaaggataggcaggatacatttggaaggttattggaaatgaagcgaattctattcttattcaaatgacccatctataatagagatttttttcaagtcacaaacttctgactttattattgacctcaaggtttactgtttgtgcaaagctagccttccttttccctctagaacagttaacacaccccttttacttttttgtcataacccccgatccccccaaaccacttgcgtattcagttctcttcattctcccctcccttcttacctttcctcttctctctctctctttttttttttttttagatggagttttgttcttgtctcccaggctggagtgcagtggtgtgatctcagctcactgcagcctccgcctcttgggttcaagcgattctcctgcttcagcctcctgagtatctggaattacaggtgccggccaccatgcctgactaatttttttgtatttttagtagagacggagtttcaccctgttgaccaggctgttcttgaacttctgacctcaggtgatctgcccgccttggcctcccaaagtgctgggattacaagcgtaagccactgcgcctggcccttttctgactcttgtctagaataatattttttcttctttttaaaatatcttttttttttcccgtgggttaatcctaaataaaatgaacagagctgttctactcaggcctgataattttaagagatggactaacatacaagagaaaggaagttcatagttttgaatcatttaagctaaaaataactttctttttctactgcagtgtatttatgatgggggggaaaattgaaagtacataataagcaaaaattatataaataacagttatgtggtagtcttcataatcagaacccatactgaaatacgggtatataagggttcacattagtgtccatactttgagtgtgcttgaaatttttcatcatgaaaaatgtaaaagatacataatcctgtcatccagaggtgatttttagagatttttttcagacataaaaagatctgtaaaaactatgttgtttatgtctgaaaagacctataaaatccatttctcgctgacaggattatgtgtctttttttttgtttttgttatggaaagtttttttaaatgaaataaagttttataaattttcagtatagcaaaataaacttccataagacttgaggtgagataaaagaaagaaacagtgttctaaccctccaaatcaaggtttttcaaactatgcttaaagaggaattctcttaaaatggactaattgggcatttctcaatttatggtgaatggattttgaaaggctaatggataaaatgttctcaagttgaatttttcttaaaaatttggtgcctactcaaaagtgcatgaacaagtagcaaaattaagtagtagggcttaattcaaaagctcatgtgatcataggatttgaaagtgtctgcatataagcatattgtaactgcccagtgggttcttcttccccactgcccaggtagagctgatctatcaagacaggagaattgcaataaggagtttatgtagagctgctaaatgggagagcagagttttattattgctcaaatcagcctccccaaacatgcagagtctagggtttatcaaggatagtttggtaggctgggggctggggaatgggtgctcctggttggttggggatgcagttacagaggtgggggccagaggaccagttggagtcatccgaaatgcaaaagtctgaaaagacatctcaaaaggccttttttaggttctacaatagtgatattatttacaggagtaattggggaagttacaaatctgtgacttccagaataatgtctgattatcatttaactacctacattttagcagaattcagacccctctcataagcctaaccttatagtctttcattagttttgcaaaggtgatttagtttcgggaagggctattatcattcttgctttaagcttacactataaactaaatttctcccaaagttagcttgggctgcatccagaaatgaccaagggcagcttggaggttaaaggcaagatggagttgattaggtgagatctcttttacagtcatgattttcttactgttacaatctttgcaaaggtggtttcaatagttcctgctaataaatatgttcctaggtgattctacagagagcagattattccaaaaagagcatcatgatttacagacacttattctagctgaacttgtttttttgttttttttttttttaagagacaagtctctgggttagtgtggtggctcacacctgtaaatcccagcactttggaaggctgaggtgggagaattacttgagcccaggagttggagaccaacctgggcaacatagtgaaacagtgtctctatttaaataaaaaaaaaaagaggctggacacggtggctcaggcctgtaatcctagcactttgggaggccaaggcaggcaggtcacaaggacaggagttccaggccagcctggccaacatggtgaaactccgtctctactaaaaatacaaaaaatagctgggtgtggtggtgcacgcatgtagtcccagctactcgggaggctgaggcagaagaatcacttgaacccaggaggcggaggttgcattgagccgagattgtgtcactgcactccaacctgggtgacagagcaagactcagtctcaaaaaaaaacagagagagagagagagagacaatgtcttgctctgtcatgcaggctgaaatgcagtgttgggactttggctcactgcagccttgacctcctgggcttaagtgatcctcccacatcagcctctcgaatagctagggctatgggcatgctaccatgtccagctaattaaaaaaatttttttttgtagaaacagagtcttgctatgttgctcaggctggtctcagactcctagtctcaagtgaccctcctgcctcagcctcctacggtgctgggattataggcatgagcactgcgcctggcctcatcctaagcatgtttgagaagtgtggagaatagcagaaaaactgaagatagtgatacgtacagtaatagatgtatgtacagaattttacgacagcatagggcctaaggaagtttcagggaagccatctgggagaatgtaatacttgagcagaatttaaagaatgtgaatgccaggcgcggtggctcacgcttgtaacccagcactttgggaggccgaggcgggcggatcacaaggtcaggagatcgagaccgtcctggctaacatggtgaaaccccatctctactaaaaatacaaaaaattagccgggcgtggtggcggtcgcctgtagtcccagctactcaggaggctgaggcaggagaatggcgtgaacctgggaggcagagcttgcagtgagccgagatcacgccactacactccagcctgggcaactgagcgagactccgtctcaaaaaaaaaaaaaaaagaatgtgaagtctagggaatagcacataaaaaggcagggagacagaagagaacatggcactctggagttgctgcagaaatttcagagtggtaaaagggaaggatgtttgtgaatttggttaactagccaggagtctttaaggaaaggacataccatgatgccatgctaaggagtttggactttattttttgtttgtttgttggtttgttttgagacaggatctcactctgttgcccggtctagagtgcagtggctagatattggctcactgaaacctctgcctcctgcactcaagccatcctcctacctcagcctcccaagtagctgggactataggtgcatgccaccatgttcacctaatttttgtaatttttttaaagatgaggtttcactatgttgcccaggctgccctcgaactcctaagctcaagcaatccttggcctcccaatgtactgggatttacaggcatgagtcactacatcaggcctggactttattttgaagaaaggggagcaggtgctgaaattccagtagagaataacatgattttttttttagacagagtttcactgttattgcccaggctggaatgcaatggggtgaccttggctcactgcaacctccgcctcctgggttcaagcaattctcctgcctcagcctcccgagtagctgggattacaggcatgcgccaccatgcccagctaatgttttatgtttttagtagagatggggtttttccgtgtcggtaaagctggtctcgaactcctgacctcaggtaatccgcctgcctcggcctcccaaaatgctaggaggcgtgagccatcatgcccggccgagaataacatgattttttttagaaatttactttagtagaagttacactaccagaaatatagaagatgacacaaagtaggaaaaaatgagacaagaccagttggaaagctatagctaaaaaccaggagagaaatgataaggctttacttaagaagtaagggtagagagagacgatgaattttgaaaagcttgtaaaagataggctccaccggactacagtgtatggggggttgggagcacaggggtgaagaaaatggaagttttctggttggagtaactaggtgaatggtggtgccattaatgaagttaggaaattttggaggcagagcaggctgaagacattaataaaatgaatatcatttgaatatgcatacttcgaaggtcctgtgggaccactagatgtctatgcccaataaagtctgtactagaaacgcagatttaatagtcacagcaccataagcagagtgcatggttccttagaagaaagtttagcaaataataagccctatggtttccttagtgggagacaaacagccttcagaatatacaaaaatccctgcctttttggagctttattttagcagagaggggaacaaggggcacatgggcaatataaaatagtaaaatgtatggtatattaaatggtgaaagaagttctgtggagacagattaagcaaggaagtgggactgagtatcaaaatcaatttttagaaggtttgttaaagctgattagcggccccatacccagagtttctgattaagtaaattgggagtgggactagagaatttgcaagttcccatgtgatgctgatgttgctggtcttttttttttttttttttctggtgatgaagtctcgccctgtcacccagactggagtgcagtggcatgatctcggctcgctgcaatctctgcctcctgggttcaagcgtttctcctgcctcagcctcttgagtagctgggactacaggtatgtgccaccatgcccggctaattttttgtatttttagtagagatgaggtttcactgtgttagccaggatgatctcgatctcctgacttcgtgatccgcccacctcagccttccaaatgctgggattacagatgtgagccaccacacccagccaacacatttttaaaatcactaggatagagagttgccaaaggggtatgatgttgcacttttaaagaagatggttaaaatgggcctaagatggtgacatgagagtagactcaaaggaagtgagggagttggttgtgtgactatctggaggaagagttgatgcaaaagcccctggaatgtgcctggcatgtttaagggacggggcagagtgcatctgcagaaggttgaagccagagaggtatggggtctggattgtagaggacagtccatcagtcatccataggatttggatgtgttcagcatagaggtactatttcaagccttaagattgaatgagattgtcaaagaaagagcaaagcaatctcatgatttaaggcaaagtgtgataatcagctaagacactgagaactgggaagcctggatgattctgagacattttgaagcaaggaacaatagaacttagagcagaaagcaaatgactcagggaaaaacatcaaaggtgataccaggttttataacctaggagagaagaatgattgaaattgggataaaagggagacgaggagtaattaggaagaggatttgatttctgaaaatcaattataagcagtagttccctgtttatcctgttgccttgtgccaggtgcagtggctcacacctgtagtcccacagctttgggaggccaagccaggaggatatcttgaggtcaggactttgagaccagcctgggtaacagagtgagatcccatctcttaaaaaaaaaaaaaatagccaggcatggtgatgtgcctgtagtcctagctacttgggagactgaggtgggaggattgcttgaacccaggaatttaaagcttcaatgaaccatgatctcgccagtgcactgcagcctgggcgacagagcaagacttgtcaaataaataagtaaatagcagtttggtcttttgttggaggaacgtctattcttagcttggacactgcggtttttccttgggcagcagaagcaatgtggcgattgaagaagtgacctaaaactttgatgttaggtagaagcagatggcccaagccaagacaagtgcttgtaaatccactggtgggagcccctcctcctaacagcaggttattaacgctgccagaaaaaaagtgtcccctctaccggtctggtgaagaaacctcatcgctacgggcctgggactgtggcacttctagagattctcgttaccagaaattgacctagcttctcatctggaagctgcctttctagaggttggtgagagagatcacccaggatttcaaaaccaactttaggtttcagagcacagtcattggggtgctgcaggaggctagtgaagtgtacctggaggctagtgaagtgtacctggtgggttggtttgaagatgctaatttgtgtgccatctacggtaagagagttggctctcatgcccaaagacatccagttggctcgccagacacggagtgagcgagcttaagtgaaggcagattttaaggcattttatatgaattctgtaaaatactttggtttaatttgtgactttttggggagaaattatttataatatgttgcatttgtgcttaagtcattccgtcttttgggatgaatgtgaaaagtgactgttcatagacctcagtgacgtaagcactgttgctcaggagtgacaagttgctaatacgcagaagggatgggtgacattttttcattctcatgacgcatgtttctgtaagttaatgacttgttaggtagctattaaggaactagagttgataaataaatgtgtataggttccttttgcaatataactggttattacttgatccaagtgtttaacatttggagctaagtctgaccatacattactgtgatagaatgtgggccttttcaagggtgaagatacaagccttaaccacagtataacttgcagtttccttaaacaaacaaagaaataaaaacctagcatggagtacattatgtgcatttataatagctattttaaatattgtagtgtcaacattcaaaaattaattcttttacattcgcaaatggtggggagtcttgtcattaaggtgtgtataacttagaatccacttggttttctcctaactggactgcatttgttttcatagtagtaaaatgttatgtgtattacaccttgcataagtcctcattctactacgtgttaactaaccctctagatgataatgcagatgctaactgtgggattttatttataagaactctagaataaataccagttattcctaccaacatcggctgttactaatattctgaagtagttagtgcaacttttcattgtgttgtggttggtctcctaagtaggttggatttttctcctcttctaagagaaaacaatagtgaaattattttctttctcttttctctctgtttctgtctctttctctctctctttctcccttcccttcccttccctcccctcccctcccctcttcttttcttttctttctcttctcttctcttttctttctttcatggggtcccttgctcaacctgttgcccaggctggagtgcaatgacatgatcatggctcagtgcagcctcaacttcctggactcaagcaatccacctgcatcagcctccaaaatggcacatgctaccatgcccagctattttatttttacttttagtacagatgtggtcttgctatgttgcccaggctggtcttgagccattgagctcaagtgatcctcctgctttggcctcctaaagtgctgggattacaggcatgagccaccgtgtcttgaggggtttgtttctattaaaagacttggtgtcagggaggagcacaaagctttaacccattgaacctctgacagttaagatggtgttgggttaggttacatctggttactatcctgggaaaatcacttctatagagatggccttccaagtggttttaaaatgtatctttctgtctgggcgcggtggctcacgcctgtaatccctgcactttgggaggccaaggcaggtggattgcttgaggtcaggagtttgagaccagcatggccaacattttgtatttttgtattttctctactaaaaatacaaaaattaaccaggcatggtggtgggtgcttataattccagctacttaggaacctgaggcaggagaatcacttgaaccctgtagatggaggttgcagtgagccgagatggccccactgtactgcagcctggatgacagagcgagactccatctcaaaataaattaaaaaaatgtatccttctattgaagtttttaggttaatcatgtatatgttgactaaattatgaattaacttgtttatcaaaaaaaaagtaaaaagtaaagtaagtaaaagtaaagtaaaataaataaaatcaaccttataattcactttttcttaaactgtttcagggaaaaaagtataaatgtttacattaatatttttaaccaatcttgtaaaacaatttctgaatactaacatcctagcattctaaaagtatttaaaactattgttttttaaaataggaaaacggacgatgtattactaagctggaaaacatggggtttcgagtgggacaaggattgatagaaaggtgagcaggttggatttgaaaattttcttgcaggtaggttataaacaaaggtgatctatttcaaaagattgcataaaacttgggatattttaattttaattcctgaatgttattctctttacttcaaaaattaaaatttctttttagatccaatgccatttaactcatttattcaaattttattttaatgtttaaagaaaatatatattttatatattttagactttcttcctgaagctattttagactttattcctgaagctattgaagcaactatctaaaatcttactgcattttcaacttaagatctgctaggttctttaacctgcatagaatttttaagtacataggtttgaaataactatagtctatgtttatgcgtgtaattatctttgaacttataaatcagttctttttagtatttctttctcactacctgaatagttaaactcggagtatattttatataacaatgtcatgataatgctcagctctttgttcttttgtggttttttgatgtgctagaatgcattgcacctgaaattttggctataatgttagactaatttgaggcctcataatttatataacataatgtgaatccattgagataggatcatgttacctggtgcttatgactttattagtgttaataaatgttcagccaggtgtggtggctcatgcctgtaatcccagcactttgtgaggccaaggtgggagaatctcttgagctcaggagtttgagaccagccagggtaacaaagtggaaccctgtctctacaaagatatacagattagctgagcatggtgacatgtgcctgtggtctcagctgctagggaggctgaggtgggaggatagcttgagcctgggagggaggtagacgttgcaatgagccgagattatgctattgcactctaacctgggcgacagagccagaatctgtctcaaaaaaaaaattaaaattaaaaaacccaataaatgttcagtgctgttctggcatttggaaattagttaataattagtccctcttgctttttttggaggagaaatactgtattacttctagttgatctttttaggtttacaaaagatactgcaaggttcaaggatgagttagatatcatgaagttcatttgtaaagatttttggactacggtattcaagaaacaaatcgacaatctaaggacaaatcatcaggtaattaaattaattaaggcctatattttaaagtcctttaacttgatataaatatcgtattttagtgacttatttaaaacctaaaataatttctggttaactttggaatatgtttatgttattaatgagttattagtttttttcttctaatagtgtgaactgagtaaagacaaagggacagttatcagtaatgatagctgttcctttcacccaattatatgctatgttaagttttttaaagtagcataagtcaggatgagaatagcttttactatttggttccttagttactgttaattagtggtaataatatgcagaaccacaaatatatcacctttatgtctttagagtcatttcttttttttgaagaagaagaatttggattattttaattatttttatatacagaaaactcaacagtgtatgtttaacccagtttggtgtcaagttctttagcctttgccttttcctgcttgacaattcaagccacagacttgagacccaggacattgcctccccagtgacagtggatttcgttttgtctgtcgtaattggttctgatagcttccaccagctgaacctaagctccattgtcctctgagttaatctgtgtaaaggcgacagtggtgcgggtcttcttgtggattagacatcccagtcttgccttccccttgataatgcggtaagggacccccattttatgacacaaggcaggcaggaagacagccacctcgatgggatccacatagtgtgcagtcaccaccagctgagccttcttgttctcctccaaggtggagatggtgttaactcctgctcggaggacaagtggtctcttagtggggacatcccctttgcctgcagctttcttttcagcccgggccaatagcctctgcttattttcttgctttgtctttggtctgtacttgtgggccagcttaagcagctaagtagctatttggcggtgcagggcctgggtgaactggttaattgtaggaggcactttcagctgcttacagaggatggctttgtgccactgcaacctgatatagcggggccatttcacaaagtgagtgaggtccatattgggtggatgtcctgtccaatgccagaattcttaggccttttctcaaacaggggattcaccactttctttctttcttttttttttttttttttttgagatggagtcttgctgtgttgcccaggctagagtgcaatggtgcgatctcggctcaccacaacctccgcctcctgggttcaagccattctgcctcaggctcccaggtagctgggactacaggcatgtgccaccactccggctaatttttgtatttttagtagaggtggggtttcaccatgctggccaggctggtctcgaactcctgacctcaagtgatccgcttgtctcggcctcccaatgtgctgggagtacagacgtgagccaccacgcccaaccaggattcaccactttcttggcctcctgtttcttcatgacaccaagggccagagccacctccttcctcttggcctttccttttggcatcttgggtggcaggaagagattctttatagtcatttctaaagtctaatttatagagcattttactcttaaataactcctggattattactgctgtcatattttctactcttaaaagattttcttactacaaaattaatagattacatagaaaactatgtatttattaaaattttaaaagggagacagagtctcgctttgttgcccagactagtcttgagctcctggactcaagtaattctttggcctcagcctcttgcatagctgggattataggcatgcaccaccactcccagcttcattagattttattttatgaacttcaaggaaatacttagagtagatttggaattttgattaagtaaaaaattaaatgtatctggtactctcaataggataattcatttatttatttatttttaattagagacagtgtctcactatgttttccagactggtctcaaactcttgggctcaatggatcctcccgccttggcctcccagagttctgggattacaggtgtgagccactgtgcctggcctggaattcattttgtaccaactttagcttggaattactggaaatgctaataggaagaaatgactatgatttttttactctctagacatgatttactaatatatatcagctggctggacatggtggctcatgcttagaattgcagcattttgggaggctgaggcagaaggattgcttgagctcaggagttggagaccagcctgagcaacatacttagaacctatttctacaaaaaacttgaaaaaaatttcaccaggcatattggtatgtgcctgaggtttcagctacatgggaggagttcaaggatacagtgaaatactacacttttgcctggataacagcaaaattctgtctcttaaaaaaataaagctgggcgcggtggctcacccctgtaatcccagcactttgggaggccgaggtgggcagatcacctgaggtcaggagttcgagaccagcctggccaacgtggtgaaaccctgtctctactaaaaatacaaaaattagccaggcatattggcgcacgcttatagtcccagccactcaggaggctgaggaaggagaattgcttgaacccgggaggcagaggttgcagtgagcctagatcacaccactgcactccagcctgggcgacagagcaagactctgtctcaaataaacaaataaatccgggtgcggtggctcacgcctataatcccagcacttcaggaggccaaggcgggtggatcacctgaggttgggagttcaagaccagccctgccaacatggagaaaccccgtctctactaaaaatacaaaattagctgggcgtagtggcgcatgcctgtaatcccagctacttgggaggctgaggcaggagaatcacttgaacccaggaggcggaggttgtggtgagctgagatcgagccattgcactccagcctgggcaacaagagtgaaactctgtctcaaaaaaataaataaataaaaataaaaattaggtcgggtgtggtgatcatacatgtaatttcagcactttgggaggctgaggcaggaggattacttgagccctggagttccagaccagcctaggcaacatagggagaccccctttctacaaaaaattaataaaactagccgggtgtggtggcatgtgtctgtggtcccagctactcggaaggctgaggcaagagaattgctaaacacccaggtgtttgagggtgcagtgagctgtgattgcaccaccacactccagcctagacaacagagtgagagctcatgtctaaataaataactatacaaacaaacagcttatttcatgtggacatgtattaatgattccatcgtactagactatgagtttttaaggatagggactatgtctcagacagtgtttttatcttcagtgtataaaaccgttcggtatacattagtgttgtgaaaatactgaactcgcaactcttcagcttgaacattgcaaaactccttcatttaaacaaaatttgaccaggctgggcacgtgggcttatgcctgtaatcccagcacttcgggaggtcaaggtgggcagattgcttgagcccaggagtttgagaccagcctgggcaacatggcgaaaccccatctgtacaagaaatataaaaattagcagggcatggtgatgcacgcctgtagtcccagctacttgggagcctgcggtgggaggattgattgagtctgggagttggaggctgcagtgaggcgtaattgtgccactgcattctaccctgggcgacagaggagaccccgtctcaaagaacagaaaaagaaaacttggccaatgggaaggagacttttaataactttaaaaaacacttaaattgtttcataagaataaaataattttaaggactgctaggtacattgactttggattttttttctatttttggaacagggcatctatgtacttcaggacaacaaatttcgcctgcttactcagatgtctgcaggaaaacagtatttagaacatgcatctaaggtatttaatggaatagaagttggggtttttgttaatagtaggactacagggaaaagtacagtgctaatcataacaaactattgaattaaaaatatgttttaaggtgttcttttttgtttaaagagttttctatgaaatgagagacatgttacaataacactaaactgtagctaaatagtcatagagtgaccaattaaagaaacactggccgggcgctatggctcacgcctgtaatcccagcactttgggaggccaaggcaggtggattacctgaggtcaagagttcaagaccagcttggccagcatggggaaaccctttctctactaaaaatatgaaaaatagctggacgttctggcgagcgcctgcaatcccagctattcgggaggctgaggcaggagaatcacttgaacccgggaggcagaagttgcagtgagctgagatcgtgctatcattgcactccagcctggggtataagagcaaaactccatctcaaaaaaaaaaaaaaagaaaaaaaagaaacactataactaaatgacagtgaaatgtagatgtatggtagatcactttttttttttttttaagacaaggtcttgctctgtcatctaggctggagtgtagtggtacaatcatggcctatcttgaccttgacccccccgggctcaagtgatcctcccacttcagtcacccaaggaggtaggactgcaggtgtgggccaccatgcctggctaatttttaaaaaaattttttagagatgggatcccacgatgttgcccaggctcgtcttgaactcctgggctcaagtgatcacctcacctcggcctcccagtgtgttgggattacaggtgtgagccactgcatccggcctgattgcctattttctatatttttggggtatccaggctctaattacatttttatggttaatgtgtatattttctctcttttttttttttttcggacagagtgtgagactcactgcaacctctgcctcctgggttcaagtgattctcctgcctcagcctcctgagtagctgggattacaggtgtgcgccaccatgcctggctaattttttgtatctttagtagagacagggtttcaccatgttggcgaggctagtctcaaactcctgacctcgtgatccacccacctcagcctcccaaagtgctcggattacagacgtgattacaaaagccacccaaaatgctgggattacagcctcccaaagtgctgggattacagacgtgattacaaaagccacccaaaatgctgggattacagcctcccaaagtgctgggattataggccatgcctggcatattttctcttttttactaacttcttagtttaatatttctggttctcacttaactttttgggatcttggtttcttcagctgtgaaaagagtaagttggaccaattcagtgatttctaactattttgagttatggacatctttgagaactggaacacctttccccataaatacgcacatatacatggtttttattttcataggggtcacaaattccccgattaagaactcttgggatgaacaatctctaaggcctcttccagcttaaaatttcatgactcagatctagttacttattagtgcccatttatgtatattatttataagataatattttatattattcgtagataatgtagtatgttgaacatcatgcagtatagatgtgggtaatcaaaaattccctgaattgctaatttttcaatccagttcttgtcatgacttttggttttgtagctcagccctattccctttctttgtttctatatgacagggtttctcaacgtccaaactgttgatactttcaaccagataattctttgttgtggcaagctataagtcttgaacaagtcaagattcttggttgtaaataggggaaagaaattctgcttgtaagctaacaaaattgataagctcaaagaataggcaataaccaggggaggttaaggcagccagtaagatagccaagtcactctgcagactgtatctacttagaatcctgcaggcagcagggactgtagacacaaactacctttactgcctccagaactaattctgatcagtttctggcttgtttttgtcactgagtctagattcacagtcctggactggagtacttaattggctgagcttaagtcttaagtcctacgtccatgctttagtttccagggagctgggaaatatatcaatatttttcagtaatttgaacagttcttcaaaatcctttttttaaacaggaatgacttactgatgataaatcatgtaatgttgtatttatcaatagctttactattttagtaaatccttactatttttaatgattttttttccttttagtatttagcatttacgtgtggcttaatcagaggtggcttatcaaacttgggaataaaaagtattgtaacagctgaagtgtcttcaatgcctgcttgtaagttgaattcgcctttcttacaaatgttttagtaatttgttttcaggtctgtttttttttttaatttaactgagaggaaatttaaaatgctgaaactttcattttagttttatcaatgtaacactttagtgtagtaatatgtagcatactacattcattttcagtaatttttgaataatggactaaaatccaaatttataagacaatttaagggatgatttttaacttttctaaagttattcaaactgtaacttttttaaagatattcttctgaatatctcctgcagtgttttaagatagcaaatttccctagaacattgaaaatgctattttttttttttttttttttttttgagacggagtctcgctctgttgcccaggctggagtgcagtggcacaatctcggctcactgcaagctccacctcccgggttcacgccattctcctgcctcaacctcccgagtagctgggactacagttgcctgccaccacgcccagctaattttttgtatttttagtagagatgggtttcaccgtgttagccaggatggtctccatctcctgaccttgtgatccgtctgcctcggcctcccaaagtgctgggattacaggcatgaaccaccgcgcccggcccgaaaatgctatttttaaacaattgtttaggatatgtctattatatcaagctaagtaaaaccaaatattcttttatcactaaatgtctccctaaagatcttttcaccagagctaccaaccaagaaaaaatggacttgagctttattgtatttcttttcaatttacaatgatcattagccatgaaatactgtacccaaatgtaggattcataaagagaaacaaaagtgcttactcaacaaaccatataatcatcccataaaaatagaattgactggccgggtgtggtgcctcacacctgtaagctcagcactttgggaggccgaggtgggcgtatcatgaggtcaggagtttgagaccagcctggccaataaggtgaaaccctgtctctactaaaaatacaaaaattagctgggcgtggtgacagacgcctgtagtcccagctactcaggaggctgaggcaggagaatcacttgaacccaggaggtggaggttgcagtgagcagagatcgtgccactgcactccagcctgggcaacagagcaagactccatctcaaaaaaaaagaaaaaatagaattgactttattgaatattatgaagaatgcgaaaaagtttttgacatagcagatttcttgactgaaactatttcctatatggaacagaaaattgatgtttagacttgttttctttgtatctaaaatcaaagaattatttgtatttttttttttaggcaaatttcaggtgatgatacagaagctgtagaacatactgaaatgcaaggcttcaacagtgtaaagagataaattattcatgtaaaagtatttcaagtagtgatgatttaattacattgttcgatgtttgtacaggagtaagcatgtatttttatcaatttaacacagatcaaaggagatgaagggacattctgccatgacatacacttaaccaaaactattcaaaatgaaaaccggatttcaaataaccagacaccaagatgcagggcccttattttaaacctttttatttggttagagtgatatgtatttagccatagatggagaaacaaagctcagggtttgttgaattagcatgagagaaaattatgtaccaacagaattatttgtg

SEQ ID NO: 14608 - DNA, 870 bp, Homo sapiens
ggatttggtagccccgaagtgtgggctctctccagtaccagactcatttcagtaccagcctttgggaagtcgtgtgaatacctcggtctcttagccacagggatagaatggcggcctgacggagccgcggcgccggcgaagtcgctgaggcgcgagctggaacccccagaccagctcaaacgggagccaaaactcgaagcttggaagaattagcaggaaatggcggatgaggcgttgtttttgcttctccataacgagatggtgtctggagtgtacaagtccgcggagcagggggaggtgggcatctatgtacttcaggacaacaaatttcgcctgcttactcagatgtctgcaggaaaacagtatttagaacatgcatctaagtatttagcatttacgtgtggcttaatcagaggtggcttatcaaacttgggaataaaaagtattgtaacagctgaagtgtcttcaatgcctgcttgcaaatttcaggtgatgatacagaagctgtagaacatactgaaatgcaaggcttcaacagtgtaaagagataaattattcatgtaaaagtatttcaagtagtgatgatttaattacattgttcgatgtttgtacaggagtaagcatgtatttttatcaatttaacacagatcaaaggagatgaagggacattctgccatgacatacacttaaccaaaactattcaaaatgaaaaccggatttcaaataaccagacaccaagatgcagggcccttattttaaacctttttatttggttagagtgatatgtatttagccatagatggagaaacaaagctcagggtttgttgaattagcatgagagaaaattatgtaccaacagaattatttgtg

SEQ ID NO: 14609 - DNA, 2013 bp, Homo sapiens
gcagctcagctggttccggctggggaagatggcggtggctggggcggtgtccggggagccgctggtgcactggtgcacccagcagttgcggaagactttcggcctggatgtcagcgaggagatcattcagtacgttttgtcaattgagagtgctgaagagatacgagaatatgttactgatctcctccagggaaatgaaggcaaaaaaggtcaattcatagaagaacttataaccaaatggcaaaagaatgatcaggagttgatttcggatcctttgcagcagtgcttcaaaaaagatgaaattttagatgggcagaaatcaggcgaccatctaaagcggggtaggaagaaagggagaaacagacaggaagttcctgcatttactgaacctgacacgactgcagaggttaaaacaccttttgatttggccaaggcacaagagaacagcaactccgtaaagaagaagacaaagtttgtcaatttatacacaagagagggacaggacaggcttgcagtcctgctccctggtcgtcacccttgtgattgcctgggccagaagcacaagctcatcaataactgtctgatctgtgggcgcattgtctgtgaacaagaaggctcaggcccttgcttattctgtggcactctggtgtgtactcatgaggaacaagatattttacagcgtgactcaaacaagagccagaaactgctaaagaaactcatgtcaggagtggagaattctggaaaggtggacatctctaccaaggaccttcttcctcatcaagaattgcgaattaagtctggtctggagaaggctatcaagcataaagacaaactgttagagtttgacagaactagtattcgaaggacccaagtcattgatgatgagtcagattactttgccagtgattctaaccaatggttgtccaaacttgagcgggaaaccttgcagaagcgagaggaggagctgagagaacttcgacacgcctctcgactttctaagaaggtcaccattgactttgcaggaaggaagatcctggaagaagaaaattcactagcagagtatcatagcagactagatgagacaatacaggccattgccaatggaaccttgaaccagccactgaccaaattggatagatcttctgaagagcctttgggagttctggtaaatcccaacatgtaccagtcccctccccagtgggttgaccacacaggtgcagcctcacagaagaaggctttccgttcttcaggatttggactagagttcaactcatttcagcaccagttgcgaatccaggatcaagaatttcaggaaggctttgatggtggctggtgcctctctgtacatcagccctgggcttctctgcttgtcagagggattaaaagggtggagggcagatcctggtacaccccccacagaggacgactttggatagcagccacagctaaaaaaccctcccctcaagaagtctcagaactccaggctacatatcgtcttcttcgtgggaaagatgtggaatttcctaatgactatccgtcaggttgtcttctgggctgtgtggacctaattgactgcttgtcccagaagcaatttaaggagcagtttccagacatcagtcaagagtctgattctccatttgttttcatctgcaaaaatcctcaggaaatggttgtgaagtttcctattaaaggaaatccaaaaatctggaaattggattccaagatccatcaaggagcaaagaaggggttaatgaagcagaataaagctgtctgacccaggagaaaaggaactatacagcatagtggagttttgtgtactaaaattgctatctactggtcctttggaattgaagtagtagaaacctaaaggcttggcgtcaggcttgaatatctcagaacttaaactcttaccaaaatctgtatatttttcttaaggagtgggattcctactttatgtaatggggtcgaaatctttgaacacattatttataaaaacctgtttaaaaattctaa

SEQ ID NO: 14610 - DNA, 9900 bp, Homo sapiens
gcagctcagctggttccggctggggaagatggcggtggctggggcggtgtccggggagccgctggtgcactggtgcacccagcagttgcggaagactttcggcctggatgtcagcgaggagatcattcagtgagaacagttcgggtccaagcggggaaggagctctgggatgtgcactgcctgagcgaaccgggaagcggggaggactgaaaagttaagagagaaatgtgataaaggggctgcagtctgtagtctgtaggcgtcgaattttggcctccacctttgtagtttagtttctggaatagggtgtccggctccacagtctgccggtcgggcttttttcctgggaagacgcccaatctgtaataattagaaatgcaaggctgtcccaggagccagtttcctttctagagagaaggggcaggtcaaactgtatttcctaactttgaaccccttactcttttatttatttattattattgttgttattattgagacggagtctctgtcgcccaggctggcgtgcggtggcgcgatcttggctcactgcaacctccgccttccgggttcaggtgattcacctgcctgagcctcccaagtagctgggattacaggcacgcaccaccacacccggctaatttttaaaaatttttagtagagtcagtgtttcaccatgttggccaggctagtctccagctcctgatctcaagtgatccgcccgcctcgacctcccaaagtgctgggattacaggcatgagccaccgcacccagatatactctgaacattttagtcggcccaatctgagttgtgtcagtagagccaacagggtcagctgtgtcaataggacctagaatttaagtggaagcagcgtggtagagtacaaatagcttctgactctggagtctcaggttctatattctgttgtcgtttacctgttttagaacccaggacaacttaatttttctctctgtaccctggtttcttcatttataagattaatcattagtagagcttatcatgctttatgactcctatgaaatggagatggtgtacatgacttaatatctactttcaactgattgaagaacatttgttgcgctgctgttacacgccaggtgctggggtaacaaagacaagacagttgggttccccttcgttgatgagtgctgaggttggggaaatgaaggggcttgttggagcacaaaataaaggattctcattaagatttgaaaaactcggaaggtttattggaaaggataactttcacccgagaactaaggaatagacagaggtggcggtccaaagtgttcaggcaggggagaaaactacaaaaatgggacttgatcgaagaactgaaagtgttccttcatttgattccttggtcactgatgttgaaacctaaattgctgttctagggcttttgtaggaagtaagatgagtttctgagtttcggagaaaatagacttttggcaaggagacagttcaagtaggttattttaatggatttttttgaggccctaggagatggctcaagcccttattcccagcactttgggaggtagaggtgggaggattgcttgagactgggagttggagaccaccctgggcaacatagtgagaccctgtctctacagaaataaaaaaagtaaacaacaagataaaggattttttttaacactagaatagacaacaaaacaaaacagcgaaatcttatggtttggctttacccttgcttgaacgcagtcagattaagtatttagtagttttcaaacattttttaaagcagtggaatgctatcaaatgaaataatgaaactttgcaatatataaaacagaaaagtgttttttacgaatataagttcaaaattttcacttttttttttttttttttttgagacagattctgttgcccaggctggagtgcagtggtgcgatctcagctcgctgcaacctccgcctcccacgttcaagcgattctctttcctcagcccgagcagctgggattacaggcgcgcaccaccatgcctggctaatttttgtattcttactagagatggggtttcaccatgttgaccagggtggtctcgaactcctgacctcagatgatccaaccgcctcagcctcccaaagtgctgggattacaggcatgagccaccacgcctggcccaattttcacatatttattgtaaatatgtgtaatatattaaatatcaaatatattaaatattaaatatatcaaatattatattaaatatattaaatattaaatatatcaaatattatattaaatatattaaatatgtgtattatattaaatacagtattaaaaaaaaaagattgaggtggccaggcgcagtggttcatgtgtgtaatctaagcactttgggaggccgaggcagatggatcatttgaggtcaggaatttcagaccagcctggccaacatggcgaaacccccactctactaaaaatacaaaacttagtcgggtgtggtggagcgtgcaggtcatctcagttactcggaaggctgaggcaggagaatcccttgaaccgcggggcagaggttgcagtgagctgataccgcaccactgcactccatcctgggtgacagagtgagacctcgtctcaaaaaaaaaaaggaaaaaagaaagattgaggctatttttgataaattaacaatttgaaatagggtaagaatgatagatgtagtcttctcagtctagaatccagttgtattttgtttggattacacagtatcaagaaaatgcgttctcaggccaggcgtggtggctcacgcctgtaatcctagcactttaggaggccaaggcaggtggaccacctgaggtcaggagttcgagaccagcctggccaacatggtgaaaccccgtctctactaaaaatacaaaaaaaaattagccaggtatggtgacgggcacctgtaatcccagctactcgggaggctgaggcaggagaatcgcttgaacccaggaggcagaggttgcagtgagccaatatctcaccactgcactccagcctgggcgacagagcgagactccgtctcaaaaaaaaaaaaaaattatattccgcctgggaaggaggtcagtgcccgtcggcatgtattacgctaagatactatttgaagcatttgttaggtattcactagtattccacaacaggctattatgccatgatgaaagcatttgctgtgccttgcctggcatttaattgagaattacccaggtgtatgtactacagtaatgtactaacttgaacaattttatatgagtggactgaatttttgaaatagcacagagctattaacttttttttttttcttttttgagacggagtctcactctgtcgcccaggctggagtgcagtggcaggatctcggctcactgcaacctccacctcccaggttcaagcaattctcctgcctcagcctccccagtagcttggactacaggcgcgtgacaccatgcccagctaatttttgtatttttagtggagatgggattccaccaggttggccaggatggtctcggtctcctgacctcgtggtctgcccgcctcagcctcccaaagtgctgggattacaggtgtgagccactgcacccggccttaactttctaattagtgatacatttataagacataaatagctatccacagagttaacaaaataaactttggtccacaatctggatgagttcatattattttgataagatttggtatataacatatttggatgaatgttgttctttattataccttgttaagtagttaaaatgacatttattcaaatggttctgaaactctcttccctggttgtttgaaaaatactccagggttggccaggtgcagtggctcaacctgtaatcccagcactttgggaggctgaggtgggttgatcacttgaggtcaggagttcaagaccagcctgcccaacatggcaaaaccttgtctctactaaaaattcaaaaaattagccgggcgcagtggtgcacgcctgcaatcccagctactcaggaggctgaggcaggagaatttcttgaacctaggagccagaggttgcagtgagccaagatagcaccactgcactccagcctgggtgacagagtgagactctgtctcaaaaaaaaaaaaaaaaaaaaaaaagccaggtgcagcggctcagcctgtaattccagcactttggaaggctgaggcgggcaaatcacttgaggtcaggacttcgagaccagcctggccaacatagtgaaaccccgtctctactaaaaaaaagcaaaaacaaaacaaaacaaaacaaaaattagccgggtgtggttgtgcacgcctgtaatcccagctactcaggaggctgaggtaggagaatcgcttgaacctgggagatggagtttgcagtgagctgagatcgcaccactgcactccagcctgggagactaaatgagactctgtctgaaaaaacaaaaaaaccctccagggttaaatgatcccttgggattccttacagttttgcaagtctttgatagcagttaatcttttggtggggactggtaagtttggggatcaagatgattaaaatgtgtaagtcctgaaaaaccattgtcttttctaatccatagtaattagaagatgcctgtttttggggggtgtgtgtatgtgtgtgtgtatttttagtagagacggtttcaccatgttggccaagctggtctctaactcctgacctcaggtgatccacccgcctcagcctcccaaagtgctgggagccatcatgccccaccgtttttgcttgtttgagacagagtctcattctgttgctcaggctggaatgtagtggtgcaatcatggctctgcagccttcacctctgagactcaaaggatccttccacctcagcctcccaagtagctaggactacaggaacatgcctccatgcctggctaattttaatttttcttctagagacaaggtctccctatgttgcccaggctggtctcaaactcctgggcccaagtgatcctccagcttcagcctcccaaattgttgggattacaggcatgggctcccgaacccagacagaatattctcttagtgaggcccaaaggcacaaatttgtttacctctagagcataattctgcaattccaccattacactgtgaaaagaatgcagtacatacgataccaatcataggacaatttcataatttttaaaaagttaaaggatatagcactatggtaataatttttcttgcattccatatcattgtgtctgaattacagtttctgtgctgttttcagtgtcttgtatgttaattttttttttttttttttttgagaggaagtctcacttgcccaggctggagtgcagtggcacgatctcagctcactgcaagctctgtctcctgggttcacaccattctcctgcctcagcctcccgagtagctgggactacaggcgcctgctaccatacccgcctaatttttttttgttttttttttttagtagagacagggtttcaccgtgttagccaggatggtctcgatctcctgacctggtgatccgcccgcctcggcctcccaaagtgctgggattacaggtgtgagccaccgcgcccggccgcttatgtgttaatttataagtaatttttatcacttctttctcttgtaatgataagatgttcactgtagaaaactaaaaaaatcagaaaaggataaaaaagtaaactaaaattaccataatactacaacccagaaataagcactgtttctttctcttttttcccatatatattataatgtaatacattttaaaaacgtatttattgtaggaaaaaagaaaataaaaataaaactacctttaattccatcactcactagtaatcgttttggtgtataacgttgtttttttcctacacataagtgtatgtatgtatacattcataccagttaggatcgtatcgtatttctagcacctagcatagtacttggctcaaagtaaacactctaatagattaatgaatggtttttactacctagatctctgttaagattactgagaaacagtgtaagttagtcttgtttcaacaacttatatctttgcctcctgaggtacgttttgtcaattgagagtgctgaagagatacgagaatatgttactgatctcctccagggaaatgaaggcaaaaaaggtcaattcatagaagaacttataaccaaatggcaaaagaatgatcaggagttgatttcggatcctttgcagcagtgcttcaaaaaagatggtaagttaatgtaattatgcaaatgttgaaatattggtaagtgggcaggcttaaagaattattattattatttttttttttgccatcttgtgtttcttcacagctaacttaaacagagtcatatgtatacatatttttagttcggttctactcaatccgtaatgaatattgctctagttctttttcaacttagaaaatatcacaaaaaggccgggcgtggtggctcacgcctgtaatcccagcactttgggaggctgaggtgggcggatcacgtggtcaggagatcgagaccatcgtggctaacacggtgaaaccccatctctactaaaaatacaaaaagttagccaggcatggaggcaggcgcctgtagtcccagctactcaggaggctgaggcaggagaatggcgtgaacctgggaggtggagcttgcagtgagctgagatagcaccactgcactccagcctgggcgacagagcgagactccatctcaaaaaaaaaaaaaaaaaaggaaaatatcacaaaaaaatgtgtgtttacagacacaaatgtggcttcagaataatttgaaaaatttatacataaagaaacatttttcagtcgtgcatacctggatgtaagtaaagtgttgattgactatagtatgaatagcatttagagataactgcttaaatagtacaaaagataagcaccaaactaaataatctaagttattatgcaatctacaatatcagaattttgtttgttttgagacatggtctcactttcattgcccaggctggagtgatgtggcttgatcctagctcactgcagcctctgcttcctgggctcagatgattctcccacctcagcctcctgagtagctgggactacaggcgtgtgttaccacacctggctaatttttgtatttttttctagagatagggtctcactctgttgtccagggtgctctcaaactccttggttcaaacggtccacctgtctcggcctctcaaagtgctgggattatgcatgtgagccactaagcctgattttagaatatcagattttaatttaacttcttagtcccagccacttgtttgacttctttttcattgactgcactcttggaaatgatgatttaaatttaattctggtttgacaggaaaagataattaaaaatcttcctgatgatatcttgactctaaatattaagcatcaccttagtttattagctatattagttcaccaggaatcctcttatcaatctgtgtgtgtgtgtatttttttttttctatctttaaagaaattttagatgggcagaaatcaggcgaccatctaaagcggggtaggaagaaagggagaaacagacaggaagttcctgcatttactgaacctgacacgactgcagaggttaaaacaccttttgatttggccaaggtgagtgcttatagattgaagctttttctgactattggagaagaggaagtgactaatacatttcagagagcaaagtgtacaaattggtctagaatggcaatttttcaacaaatgcatgaattttaggtagaaaaagttacatatactcctttctatatggtagattttttgtttggcaacctgattagtattataaagacatctttgcttttttttttttttttccccaagacagagtcttgctctgtttccagtctggagtgcagtggtgcgatctctgctcattgcaacctccgcttcctgggttcaagtgattctcctgcatcagtctcccgaatagctgggactacaggcatgcgccaccatacccagctaattttcttttttttttttttgagacagagtctcgctctgtcgcccaggctggaatgcagtggtgtaatctcagctcaccacaacctctgcctcctgggttcaagcgattctcctgcctcagcctcccaagtagctgggactgcatgcgcacactgccacgcccagctaatttttcgtattttagtagagatggggtttcaccgagttgcccaagctggtcttgagctgctgagctcaggcaatccacccaccttggcctcccaaagtgctaggattacaggcgtgagccaccgcgcccagccctgtttttgaactttaaattaatggagctaaatagtgtgtactcttgtatctagctgcttttttttttttttttttttttttttttgagacggagtcttgctctgtcacccaggctggagtgcagtggcgcaatcttggcccactgcaacctctgcctccctggttcaaacgattctcctgcctcagtctcccaagtagctgtgattacaggcacacatgctaccacacccagctaatttttgtatttttagtagagatggggtttcaccatgttggccaggctggtcttgaactcctgacctcaagcaatctgcctgccttggcttctcaaagtgctgggattacaggcatgagcaactgtgcccagccagtgtctagcttctttcaatttatgagattcatctctactctgggcagctatactttctcattctcattgctacacagaattgtattaagtgaacacatcacaatttatccattctattatttggatagtttccaattccaatgcaacagtgaacattcttgtatgtatttttggtgaacatatttacacatttctgtttagtatatatctaggagttgaattgctgtgtcatagaacatgcatatgttcaacttcagttgatatgagtttgcagtcctgccagcagtgtatgagaggtctaattcttttgtatctttgctaacacttcatattttctctttttcagtttagccattctggttggtatttagtggtattgcattttgttttcgtttttgcattattttgacgactaatgaaattgagcactttttcatatgcctgttagtcattaggatatcttttgttatgaagttcttattaggttttttttgccctttttttgtttgagataggatctcgctctgttgcccagtggcgtcaactcgactaactgcaacctccaccttctgtttttctattgtattatctgtccttttcttagtggtttctgattaagtcaactttatatttatttttcctattttattgatggcccatatttccaaatctgtgaatatcatctgcttttagaggcattcttgtttcttatgatctccaatttagctgtgcttaaagatgtcatataaacagatttaactgctacatttaccctccactagctatagtaatgggctgaaagctactagcagaaaagacaaggtaattatcagctagtttttctagagtataacctttcctcagaaccttgattataactaatttgtatttcttcctttcactgccttctttcttggttcttggatagtatataagttgttactgaacagaacggagcattttctcccttgactttttacattgtcattaattatttgatgttattttgatgtctttgtacgataggcacaagagaacagcaactccgtaaagaagaagacaaagtttgtcaatttatacacaagagagggacaggacaggcttgcagtcctgctccctggtcgtcacccttgtgattgcctgggccagaagcaca

SEQ ID NO: 14611 - DNA, 586 bp, Homo sapiens
gcagctcagctggttccggctggggaagatggcggtggctggggcggtgtccggggagccgctggtgcactggtgcacccagcagttgcggaagactttcggcctggatgtcagcgaggagatcattcagtgagaacagttcgggtccaagcggggaaggagctctgggatgtgcactgcctgagcgaaccgggaagcggggaggactgaaaaggaaatgaaggcaaaaaaggtcaattcatagaagaacttataaccaaatggcaaaagaatgatcaggagttgatttcggatcctttgcagcagtgcttcaaaaaagatgaaattttagatgggcagaaatcaggcgaccatctaaagcggggtaggaagaaagggagaaacagacaggaagttcctgcatttactgaacctgacacgactgcagaggttaaaacaccttttgatttggccaaggcacaagagaacagcaactccgtaaagaagaagacaaagtttgtcaatttatacacaagagagggacaggacaggcttgcagtcctgctccctggtcgtcacccttgtgattgcctgggccagaagcaca

SEQ ID NO: 14612 - DNA, 26872 bp, Homo sapiens
ctcagaactccaggctacatatcgtcttcttcgtgggaaaggtaacagccgcatattctcctttcaattttactttatggagagaagtcattgacgttcatcttctttcacttccttctttctttggctttttctttgttaaaagagacttttaatctttgtatatgtttgtttgtttagtggtaaatcattgacagcgttcaaagcattaatctgtcaaaacagtgcaaataaaaatatcaatttccaacacaagaaatcaactagtcttaatttttttatctgagaaaatcatcttctttactctaaaggtaaaatgactagtgtaaactctgagatccttacattgggaagaacaaccacaaataggaattttcattgagagtggcctaaatagacacctactattggatttgtacaaatcaaagttgattgatttaagcaacgtattttgggaatcaccccaagaatactaactttggatccttaaaaagacttctgacctttgggcatcctgtttttcctttgtgttatccagctcatacagttgttttgagggtagaataaaaggacaactacacaaccatctttaaaggtttttaagaaacaaggcttaaagaatcactaggaataaaaagttcatgcttccttaaaagcacttttcttttttatttttttttgagacagagtctcgttctgtaaccagactggagtgcagtggcgccatttctcctcactgcaacttccgccttccaggttcaagtgattctcctgcctcagccttccgagtagctgggaccacaggcgcatgccaccacacccagctaattttttgtatttttagtagagacagggtttcaccatgttggccaggctggtcttgaactcctgacctcaagtgatctgcctgccttggcctccaaaagtgctggggttataggtgtgagctactgagcccggcctaaaagcacacttctattcctattgatatggactggcttgttttaaagacattcattcttatggttttaaccacattttgatgttttttttttcttgtcacctgtaactgccttactttgcttccaaaactcatcactgccaaactccaatctgatccaatggcgtatagtagaatcgatttgtattaggatgaatttgtggggtccttgaactttgatggtatgagggcaaaggaaaaattttctagcttaacatgtggatagtggactaagccagccactcactagatttttttgctaaaatgcaaacagttgtgccaagtaaatttcactgttttccttatgtctacaaatagataatggaaaaagttattaatgtttgttcagaattgaaaacagattcctgagttccaagatcacaaagaaggaaatttattcaatatttttgttattcctgattcagatgtggaatttcctaatgactatccgtcaggttgtcttctgggctgtgtggacctaattgactgcttgtcccagaagcaatttaaggagcaggtgagtaaagaatactttttttttttagagacagggtttcgccatgttggccaggctggtcttgaaagcactttaagaggctgggcctcttaaaagtgctgggattataggcatgagccaccacacccagcctggtgcatataaatatctgtataaaaagctgtttccaggccgggcgctggtggctcaggcctgtaatcccaacactttgggaggccgaggcaggtggatcacaaggtcaggagatcaagaccatcctggctaacacagtgaaaccccatctctactaaaaatacaaaaaattagccgggtgtggtggcacgtgcctgtagtcccagctgctccaaaggctgaggcaggagaatagcttgaacccgggagatggaggttgcattgagctgaggtcctgccactgcactccagcctgggcaaccgagtgagattccttctgggggaaaaaaaaaagctattgccacaatgcagctagcaagtatatagggtcttcatcccttaccaaaaccttgcttcttttgaagaaacccttgattatcccttgaattattttgattggggggtgggaatactaggatctgttattgctaattctggagcttttggtccaggctattgaactcatgataggcaaatgtatttgactctgattgccaggactgtgccatatttgggaggaggtatgtgtatttatgtatgaatgtacatatgtatgaatgtacatatgtatgcatttatatattttaatttttatcactaaagattgaactgacaggtcgggcgcagtggcttacacctgcagtcccagcactttgggaagccaaagcgggtggatcactttaagtcaggagtttgagaccaacctggccaacatggtgaaaccccgcttctactaaaaatacaaaaattagcctggtatggtggcgcatgcctgtaatcccagctactcaggaggctgaggcaggagaattgcttgaacctaggaggcagaggttgcagtgagctgagatcgtgccactgcactccagcctgggcgacagagtgagactctgtctcaaaaaaaaaaaaaaaaaaaagatgggcatggtggctcacgcctgtaatcccagtgctttgggaggccaaggcgggcagatcatgaggtcaggagatcaagactatcctggctaacacggtcaaaccccatctctataaaaatacaaaaaaaattgctgggtgtgatggcacgcgcttatagtcccaactattcgggaggctgaggcaggagaatttcctgaacccagaaggcagaggttgcagtaagccgagatcatgccactgcgctccagcctgggcaacagagcaaggctctgtctcaaaaaaaagaaaaaaaaaagattgaactgatgtaactaaagtacatttttgagcagcagagggagccgaaatactttaacttaattagaaaattcctgaaatgtaagacctttatgtttagacacagaactagcagaaatccaaaacaggaaaagtccatccttgaagcacaaacagtcttacctatcagtatggttttcctgttctttgaacagttgctttagataatagggcttccaccagtgtgctgaagaaaaagagcttcagtttcatttttcccagcaaattctctttttcagacttacttacctttcattactgttattactgtctactgttttcctttactgttcccagccattttaccctctctattctttactctttatttattttttttggaaactgggtctcactctgtcgtccaggctggagtgccaatcttggctcactgcaacctctgcctcctgggcttaagtgatcctcccacctcagcctcccagtagctgggactacaggcaccacaccaccatgcccagctaatttttgtatttttagtagagacaagatttcaccatgttggcgaagctggtcttgaactcctggcctcaagtgatccacctgcctcagcttcccgaagtgctttgattataggtgtgagccactgtggccagcctactgactgattttaactaacacttgttatccctctagatttatgtctttcatttccttgtgagttacctcctctgcctcctctgattatgtgtgtgagtacaatgcatgcattttggtgtgaattttgagttctagcgttttgttcttcccttagtatctgatccagacctaggcaaaaccatagacacatggaggctatcccccacactcttgtgcctgcactatccctctgagctttttgcccatttttttcaatgtctactttcttcctcccccctctttttttttcccccagtctagaagtaatattataaaaataccttacactggtgtaggctttacagttttagagattcacagtcgttaacagcttagtataacatactgcattatgttttcttcctgggatatgtatttgcgttctaaaagagaacccaggagcatctggcaatgtggatgatggtttttggcaagcggccttgctttattttctcatctattgatcaagcaaactaccacctgatacaaggtcaaatgatttcaatctctagatagccaatcttctttgtgccacaaatttgtgtagagaagggtaggaaactataatcctgatctatggaatactatgaaggttacaggaattagaaatctaattaaaacaagtcttgttgatttctgaaggatacctctttttcatgatacttctcctttaacttatattgtatctcatttcctgaggttgctttgaacagcatgtagaagtgcaggaatcctcccatatgtttccagctagaggtgctggcaactctctttatgaatgtctctgatatataacattaaaatataacagaagccactaggcttcatcagacatgggaatcccatacccattttccctatggttggcttttctgtaactttttcccactgtttcttttttcttttttttgagacggagtctcactctgttgcccaggctggaatgcagtggtgcaatcttggctcactgcaacctctgcctctcaggatcaagcgattctcttgcctcaccctcctgagtagctgggattacaggcacataccaccacacctggccatttttttttgtatttttagtagaagcagggtttcaccatgttggtcaggctggtctcgaactcctgacatcaggtgatacacccgcattgacctcccaaagtgctgggattacaggtgtgagccactgtgcctggcctccactgtttcttttctgtgtttaagggtagcatatgaatttatttagaattgatgttagccctatttttatcttatttattgagtaaagagtttatcagttttaaaagttgtagcttttgggttgggcgtggtggctcatgcctataatcccagcactttgggaggccgaggcgggtggatcacttgaggctaggagttcgagaccagcctggccaacatggtgaaaccccgtctctactaaaaaactacaaaaattagccaggcgtggtggcaggagcctgtaatctcagcttctggggaggctgaggcaggagaattgcttgaacctgggaggcagaggttgcagtgagccgagattgtgccactgcactccagcctgagtgacaagagcaaaattctgtctcaaaaaaaataaaataaaaataaaaaaagaaatgtagttgtctaatctattataccagcctcattcttgttttctgaatgaatgagttgagagtttaggaataatggctcttgactagcatttaccaaactattccatggcataggtgttctctgaaacacaaatttgggaaatacctttggattaaacagatctgtttactgtagaacatctcagagcccttaatatgctagtgtggattatgactctctatgaggtggatataacatgcagtgttctcaaaactttgagcataaattaatcccccacccaaacatgcactacctatttacatactacagaactggtatcatggtatttacagtttaggagtgttagtctaagtatgcttgatttttctgtattctcataggtcaactcactgagagagaaccatctaggaagtagtttcctaactgtgacctgtgccttcccttcagtatctccatattcatttatcacccagttgaattgcattttctttgaaaactaatgtggatctagtaatttttacttcaactgaaactaacttcctgtgtgacttggaccacattttgcctttacatgctgttcctttttcttttccccccaaaattcagtaatttacttctgacctcacattcttggcctttctttgataagttaaaatacactaaaccctcactatttttggcatagtgtgatcatttagtcctcttaaaaaaagaaaatcgaaaaggttttgttagtggttgttttaaaatcaagtgcactacactgttaaatggctttaaaaatatgtgctttctcctgagccatgaactagtcttcctttttatcttctaagattagtatggccaacatgactaatttgtgccagaaaaaattcctctagatcctcaaccctcctgagtaatggcagaggatcagcctagagaaggtagaagtgatatagaaaaggctatgggttcaactcagggtaaaaaggtagatgagagccatctcgttaaagcttctcctgtgattcccctggaaggagcccatgctgtttgccagcattttatctgccagcagcagatgtaagctctcaaaaacagcagggaggatgttgactgcaacaatgcatcaaggctgtggtttgtaacctcaatagtaaggcagttaaaactttttttttttaacaaagacattttgattgccaaatccataaccattagcagctgtggtttgaacagttctctagacctaacaagttttcaaacaaaaagttgagttggtggcttttgtttctacgtgtctgtgttgtgtttgtgctatttatatccctgccttcaatagaaaatctgatttgtctgaaatctccaaggtcattgattattctatttcttctgaactgaatccattcctttcctgccagcttactgaccctttagtctatttgatcttacagcttttacaatagccaagaccctatcttcaaggaattatgctgaagcagttatactgctgggtgcctgtttccaataattgacggcagtagacttgtagtcttccaatagggaagagaatattacttcttcctttttctagaaaagtatcttcaggatctaggagaatttgctggaagaaaagtaagcaatttttaaaactttaaaaaaaaaagagtatccaagcaacatagatcttcaggaagattccaagtatcacttcgtttgtggaaatcatcagcttctatcaccaatgaattgtctgtgagtctgagagatgagaaattagaaaatgaaggatttaatagtcagtattcaaaccaggcactggaattcaaaatgcagtccacaaattctcttttaaaatatgtgaaaatgtcctgtctgttgtactgagaaaatctgccaatatatagacctcaaaatattccgataacagccctcacgatgagggctgttatctgagactcaacaagaagaaaaattgttatgttactaacaactagcttaaccctggacaattcattaaaatcacagctcacttgagtgagatatagggaatgtagttttggaattctcttgaagactggaacattgacaggctgggcacggtggctcacgcctgtaatcccagcactttgggaggcggaggctggtggatcatgaggtcaggagttcaagaccagcctggccaacatggtgaaaccctgtctctactaaaaatacaaaaaaaaattagctgggtgtggtagtgggtgcccgtaatcccagctacttgggaggctgaggcaggagaatcacttgaacccgggaggcagaggttgcagtgagcagagattgcaccactgcactccagcctgggcaacagcgtgagactccatctcaaattaaaaaaaaaaacaaaactggaacattgactagagtttctagatcaaaacagactgtctttagggttatttgcagtctgggtattaagtacccacttaaatggtttcagaaaccatttatattatatatatatatatattttttttatccaaagagcattgtgttttcttttttttttttttttttttttttgagacggagtcgtactctgtcgtccagggtggtggagtgcagtggagtgatcttggctcactgcaacctctgcctcctaggttcgagcaattctcctgcctcagcctcctgagtagctgggattgcaggtacgcaccaccacgcccggctaatttttgtatttttagtagagacagggtttcaccatgttggccaggctagtcttgaactcttgacctcgtgatccgcctgcctcggcctcccaaagtgctgggattacaggcatgagccaccatgcctggctgagcattatgttttctgttgtacttatcctgaagagagatgggaaatattaccacttttccatgtatttagtgttttggttttcatctgaaaataaacatgaaattcttaagattttcatatatatttattcattaataaatacttgagccaggcgcagtggtttacgcctgtaatcccaccgctttgggagaccgatgcaggcggatcactcaaggtcaggctcttgagaccagcttgaccagcttggtgaccatctctactaaaaatacaaaaattagctgggcatggtggcgcacccctgtaatcccagctacttgggtcactgaggcaggagaatcacttgatcctgggaggcagaggttacggtgagccgagattgcgccactgcactccagcctgggtgacagagcaagactctgtctgaaaaataaataaataaatacagccgggcgtggtgactcacacctttaatcccagcagcttgggaggccaagatgggcggatcacaaggtcaggagatcaagactatcctggctaacatggtgaaaccccttctctactaaaaatacaaaaaattagctgggcgtcgtggcatgcgcctgtaatcccagctactcgggaggctgaggcaggagaatctcttgaacccgggaggtggaggttgtagtgagccaagattgcgccactgtactccagcctgggcaacagagcaagactccatctcaaaaataaataaaaataaataaataaataaataaataaacacttgagagcctattataaatcaggcactgttctaaacactaagagaaacaaaaggatgaatcaactgtagattctgtcctcagatgtttgaaagacttctaggtagatatgtatataaaccaaatataaaataaaaagtgaacctaactgtcttaaaagaagtaaagactgtctctgagaaaaataaaggagggaaagcttgcttctagctgggaaggatcccaaaagactttatttaaaaagatggttttgaattagctttgaaggatagtaatgaaatctatcactttttgatcagttattatgtgccacattcatcatgctattttctaatccttataataattccaagcagggtgtcatttcccctcctttagggatgaaatatcatccctaaagtgtcaagagagttcaaataacttgtgtaatgtccagggtgaggagttcgagaccagcctggtcaacataatgaaacctcatctctactaaaaatacaaaaaaaattagccaggcgtggtgatgtgcacctgtaatcccagccacttgggaggctgaggcaggagaatcacatgaacccaggaggcagaggctgcagtcagctgagatcgcaccattgcactccagcccaggcaacagtgcgagactccatctcaaaaaataaataaaaaataacttatgtaatgtcagttaatggtagagttatgattttgctgttcaagtgtttctactgagatggtagaaaagcatattacaaggatgaggagtaatgggagcaaaggcacagaggtgaagttatcggcctctatggagaataatggcaaaccagttcattgaaagaagagtgtgagtatagagcaagcttgtccaagctgtggcccgtgggatgcatgtggtccaggacggctttgaatgagaccaaacacaaatttgtaaactttcttaaaacatgagattttttgtgtgtgatttttttttttaaagctcatcagttatcgttagtgtattttatgtgtggcccaggacaattcttccagcgtggcccagagaagccaaaagattgaatacccctggtatagaggaataagcagcaaacaaaaaatgaaatggggagtctctctgaaactaatctgcttctgggactgcccaattaaaaaaaaattaaaaagggctgggcacagtggctcacacctgtaatcccagcactttggaaggccgaggcaggtggatcacctgaggttaggagttcgagaccagccagaccaacatggaaaaaccccgtctctactagaaatataaaattagctgggcgtggtggcgcatgcctgtaatcccagctactcaggaggctgaggcaggagaatcacttcaacccaggaggcagaggctgcagtgagtcgagattgtgccattgcactccagcctgggcaacaagagtgaaactccgtctcaagaaaaaaaaaaaaaaaatgaaaaggtaggtttgttcagatgatagatagttttgaatgataggcattcaaatctatcaaatgatagacatatcagttgtgggatgggaaagagtgttttgaagtttttttgaggcattaacatgatctgaggcttgcttgagggaaaactaatttggcagaaatgtggaagatggagtggagatattctgaagatgggaagaccagtgagaagacagttgtagtccaggatagagatgtttgaaaaatatgttctaggataatgccaatgaaatgaggcaagacaggaacaatgatgcaaggggctttatgtaggtagaatcaattactggatatgatgccttcattttacctttaagtaaaccaaggcttagagaaagtggtctatttgatctagaaagaatatgctgtagtgtcgctatctacttggaatctgttcaggactccttggtttgtcatctagtctaccatgtaaaccaagtggcaacttatcttctaatttaagatattattggccaggcatggtggctcacgcctgtaatcccagcactttgggtggctcaggtgggcaggtcacttgagcccaggagttcgagatgagcctgggcaacctggtgaaaccccgtctctacaaaaaatacaaaaattagctgggcatggtggcatgcacctgtaaacccaactactaaggaggccgaggtgggaggatcccttgagccggggaggcaagggttgcagtgagcagattgcatcagtgcactccagcctgagtgacagagtgagaccccatctcaaaaaaaaaaaaaaaaaaaaaaaagatgccgggtgcagtggctcacgcctgtaatcccagcactttgggaggccatggcgggcagatcacgaggtcaggagttcaagaccagcctggtcaatgtgatgaaaccccatctctgctaaaaaaaatacaaaaaaaatctgccgggcgtggtggcatgtgcctgtaatcccagctactcggaagggtgaggcaggagaatccttggaacctgggtggcggaggttgcagtgagccgagatcgcgccactgcattccaacctgggcgacagagtgagactctgtctcaaaaaaaaaaaaaaaaatattattattgcttaggatattatataatcatacattcattaagtatttattaactatctgtcatgtgccaggcactgtgttaaatactaaggatccagagttttaacaacattattccatcccctctagatctttaagtatactagatgaaactgagacaagaaaacccaaccataataactatcacatgaatagtggaatacactaaggaagggacccaactgttaactttgcatggctggaagtgggatgggagggggagtgtaaaggaagcttcttaaaaaaaaaaaaaaaaaaaaagacaagtcctgcagaagcaatgcttcctggaataccataatggtagattgaaaaaaaaaaaaaacctgaagaaagtaaaatttatattttcttcaataaaccattctacatcatgtcaccatgcccttgtccactaggacagctcctgctcatcctttaaaacatctcaggctgggcggggtggctcacacctgtaatcccagcattttgggaggccgacgcatttggatcacctgaggtcaggagttcgagaccagcctgaccaacatgatgaaaccctgtctctactaaaaatacaaaaattaaccgggtgtggtgacatatgcctgtgttcccagctactcaggaggctgaggcaggagaatcccttgaatccaggaggcggaggttgcaatgagctgagatcgtactattgcactccagcctgggcaacagaacgacactccgtctcaaaagaaaaaaaaaatcagccaggcacattggcttacgcctgtaattccagcactttgggaggccgaggcgggcagatcacgaggtcaggagttcaagaccagcctgggcagcatggtgaaaccctgtctctactaagaatataaaaattagttgggcatggtggcgggcgcctgtaatcccagctactcaggaggctgaggcagagaatcacttgaaccaaggaggcggaggttgcagtgagctgagatcgcgctactgcactgtagcctgggcaacagagcaagactccatcaacaaaaaaaaaatctcagatgttactctctgaagtcttccctaaccccagcccatttcctccctaacaggattaatttccttctttgggttcctactgtgttcatacttctattactgctttttttttttttttttaatattgacatgtagttctttaggtgaccatctatgcctttttttttttttttttttttttttttttaataaggagtctcactctgttgcctggctggagtgcagtggcgcgatctcggctgcaggttgtgtgccaccacacccagctaatttttgtatttttagtagagacggggttgcaccatgttggccaggatggtctccatctcctgacctcatgatctgcctgcctcagcctcccagagtgctgggattacaggcatgagcctccaggcctggcctaggtgaccgtctatgtcttattcacctttatatcagtgtgctaacatagagcctgccatgtagtaggtgcacagtaagtggtcatgacaataaatagagagggagacaatggtagatatatgaaaaatcttggccgggtgtggtggctcacacctgtaatcccagcactttgggaggctgaggtgggtggatcacgaggttgggagttcaagagtagcctggccaacatggtgaaaccctgtgtctactaaagattaaaaaaaaaattagccaggcgcatacctataatcccagctgctactcaggaggctgaggcaggagaatctcttgaacctgggaggcagagttgcagtgagctgagattgcaccattgcactccaacctgggcgacagggtgagactccatctcaaaaaacaaaaaagaaaaaaatgccatatgaaaggatttgaactgtgttctaaagataatcatatgaagtcgtgttactttgttttttttttttgagacagagtctcactctgtcgtgcaggctagggtgcactggtgcgatctcggctcactgcaacctccacctcccaggttcaagcgattctcctgcctcagcctcctgagtagctggtattacaggcgcacgccaccacgtttagctaatttttttgtattttcagtagagatgggttttgccatgttggccaggctggtctggaactactgtcctcaggtgattcacccgcctggggttccctaagtgctgggattaccggcctgagccaccacacccagccaaagtcatgttttacgattgtcctggcagctgtaggaaggatgtactggatggggcaagcctgaaaacagagatgatttaggaaattatggttgtccaggtgagttatgatgaagatctgcagcaatgctgtgtcagttgagttgaagagaaaggatctgatgattggaatgtttaggaggtaaagtttgtaggacttagtaattttactggatatgaagggtgagagaagtctaggatcaacttgggtttcttttttgttctaaaagatatgttatttgataaaggagtattgttgacattaataacaccagattgcttgacaatgaccttaccttgatatgttaagtgaagtcaaagatctctcagagcactgcctcagaagttttcagttgagtcagactagccattgggaaaataaaatctaaaattggcacagcccttaactcaagagaagtcttcagcattctgaggtaatagtctcagagtggactttgttggttgaagaccttaccatgtactgtcattcattcattcatttatttattttgagtttcgctcttgttgcctaggctggagtgcaatggcacgatctcagctcactgcaacctctgcctcccaggttcaaacgattctcctgcctcagcctcccaagtagctgggattacaggcatgcaccatcacatctggctaattttgtatttttagtagagacagggtttctccatgttggtcaggctggtctcgaactcccaacctcaggtgatgcacttgcctcggcctcccaaaattgtctttaattaaaagcaactttcttctggtgttcactagtttaagttggagtggaagcctattatattaaaatgaagaccaaaaataattgtcatgagtgggtgattcccagttaggccttgaagaatcaggccagaaaagttatgaggttaattttagagaaaatatacttgtttgagttcttttatgtggaggttctagcatacgattccacagggcacaggaaaccacagtggaaatgttactgtcgataaaatgagacctggttgtagctgcttcaaccagattgtcttccacaaatggctataagatctgtaagtttgtgtgtgtcttatcacttatttctttcacctggtacatatatggattgtctctgtagcattgagctggaagcccctgtcttagatactaggcatgtgacttgaattgggttactggtatatgggagttcaactatcccactttgggccaagtggtatgatctttattcaaccctagtcaaatattcagtcgtcatctggtcaaagtattatgatcagtaggtcaccctgaagtaagaaaacgtttatcttccagtagagtggggcctggggtggtagttatcctgtgacaccttgaattgctttgaaggaaaatataaatgagaactgtttatcacagagcacagttgcttgcgggatatgcttccttggatctgttcttgcacctctttatcagactcatttccttctctctttctgcatattatcacctcagtcttcttggagttggttttcagctaacgagatttcagaccctgatttcatgttctatctagttcctcaaaattcagaccaagaatgcctacagcaaatatatgttctttgttaatgaattccctattattgttgctttagttattagttcttcaaataacaacttataaatcttttttttttttttttttttttttttttgagatggagtttcactcttgttgcccaggctggagtgcaatggcgtaatcttggctcactgcaacctccacctcccaggttcaggtgatcctcttgcctcagcctcccgagtggctgggattacaggtgcccgccatcatgccggctaattttttgtatttttagtagaaacggggtttcaccatgttggccaggctggttttgaactcctggcctcaagcaatccacctgtctcggcctcccaaagtgctaggattacaggcatgagccaccatgcctggctaacgtataaatcttatatctggagacagatataagatttacagatcatctgggaatttgttgtgaagagtgacatagtttaggagttattgatcatttcagtacaagaatgaataagaatgaaggggaggcttgaagatttggtgaaaatgcccattttccactgaatcagtggtggttgacaaaaactgctaaccaattttttctcttatgaaaatggcaaaagaaatttatatatatatacatatttatttagtcctctaaaaaaaataaaattagacaggtctggtggtgtgcacctgtagtctccagtacctcctgagtggcttgagccctccaggtcaaggctgtagtgagctacgaacacaccactgcactccggcctgggtcacagagtgaaatctcaaaataataattaattaataataaatataaaataaaatgtgacatccagagcttattcacattcttcacctcccttctcttattctttctctgggtaatctgcattttagttttctgactttcagaccagatatcccttacttgtgaggatacaatgtaagtatatagtggcttgttagtatgtaatgtggtctttagtgtccaggccctggttatggggattgtggttgtctttttttttttttggaggtactgaggctctgccaagctaacttcgttttaatgcatttgataatgaaaaataatctcttcttccaatgcataggctttactttattccttgtaggccactttgcttttcacctctgtttcttgtaagccccttgaagttcagtgctagtagtaggaaaagggatattcacctggaactttaatttgagattcatctgggaaagttgatttttatgtttgtctttattgtgaggcatgatgggtccaaggaacctattgttatttaatttgtccaccatttttccagtttttcccactatttaacattttcttactctgttaatacacatcagggtggtttttcttaaacatagagccatattgactacttgccaagacacaagcttagggataacacattaagagtaatatctacttttacttagagttatagttctaagagtgtacaattcccagcatgtgtgtattcaccatgaataaaataacgttaatgcacaagttggtaaattcattttttttttttttatttttgagaccgagtctcgctctgtcacccagtctggatggagtgcagtggtgcgatctcggctcactgcaagctccgcctcccgggttcacgccattctcctgcctcagcctccggcgtagctgggactactggtgcccgccaccacgcctggctaattttttgtatttttagtagagacggggtttcacagttttagccaggatggtctcaatctcctgacctcgtggtccgcccgctttggcctcccaaagtgctgggattacaggtgtgagccactgcgcccggccaattcattgcgtttttattcaacaagtatttattgattgcctgctgtgaactaggcatggtcctagatgctgatgagtaaacaaaacaaaaatccccgtcctcatggagctttcatcctagtgagtcgagaccaagtaaaagttctaaataagtaaattatattgtatcagacgatggtaaaataaggctggagagggccgggcgtggtggctcacgcctgtaatcccagcactttggaaggccgaggcaggtggatcatgaggtcaggagattgagaccatcctggctaacacggtgaaaccccgtctctactaaaaatacaaaaaattagccgggcatagtgccgggcacttgtagtcccagccactcgggaggctgaggcaggagaatggtgtgaacccgggagatggagcttgcagtgagccaagattgccccactgcactccagcctgggcaacagagcgagactccgtctcaaaaaatatatatatataaataaaaaataaggctggagaggtagtttaagagtgccaagtttgtggggaatttggtgctctgattttaaatagggttatcaagaatattcactaaaagttgacacttcaacaaagttctgaaggaagagagggaagaagccatggaaatatctagggtgaaaagcattccaggaagaaggaaaaggcaagtgcaaaaaacctgaggcaggaacaacaaggaagccagtgtggcaagagtggagtgaaagtgaaggagagaagtaagagaaggtatcagagaggaaatggggggccagattgtctatggacttgtaggtcatggtaagcaaggacttagacttttattctgattgagatgaaaacccgttggagagttttaagcagaagaatggcgtgatctgatacaaaaaaaaaaaaaattagttctggcggctgtgttgagaatagaccaagagggaagttaagggcagaaacagaccacttaagaggttattgcagaagcccagggagacattatgatggcttggaccagggaagtagccattgaagtcttaagaaatggtgagatattggatatactttggcttttctttgagacagggtctcactctgttgcccacgctagagtgtgtgccactatgcttggctaatttttttaacgttttattttttgtagagatggggtcttgctatgttgcccaggctgatcccaaactcctgggctcaagcaatcctcctgcctgggcctcccaaagtgctgggattagaagtgtgagccaccgcacctagccagagaaaagaattctatctttggatggcaagagtgaagataaaaaaaaaaaagaattctatcaagttctactacagatagatcaagttctactacagatagatcaattaagatgagaactgagccaggcacggtggctcacgcctgtaatcccagcactttgggaggctgaggcaggtggattacctgaggtcaggagttcaagaccagcctggctaacatggtgaaaccctgtttctactaaaaatacaaaattagctgggcatggttttggacgcctgtaatcccagctactcgggaggctgaggcaggcaggagaattgcttgaacccaggaggcagaggttgcagtgagccgagatcacgccattgcactccagcctgggtaacagggtaagactccatctcaaaaaaaaaaaaaaaagatgagaactgcgaattgaccgtttgatttagcagcatggaagtcaacagtgacctttacaagaatgattttgatggaatgatgagagtgaaagcctacttatagtgaattcaagaaaaaagtaggagaggaattaaaggcagggagtacagataatcttttgatgaattttgttgtaatgggaatctgagaaatgagtagtagctggaggaggatgtgggatctggataagagattttgtttcatgccagacattacagaatgtttgtgtgttaataggattgatccagtagagaggcaaaaactattgacatggaagaaggaggagagattggctgaaatggtttatggtgttggaaaagcagagctgttgattgtcctttgcctcaatggtctctaagccacagggaaggaaaaacaggaaaattaaagagatagtaattatgaatgctgctgctctggtctctgtagaattaggtttggagatcttgatggcagcctctggttttatttgtgccaaagcacctcagcatggatcttgtgcagagcttatttccttctaatacccagcaataacagctgggccctgtttttctttggcttctgaagataaaagggataagaaagaagagggtttacctttgtatctgtagccttacttttctaccgtgaacatttgaccctgcctattaatatgattgtggctgatagttaatattaagtttgttttattggctgggtgcggtggctctctcctataatcccagaactttgggaggttgaggcaggagaatcatttgggtccaggagtttgagatcagcctgggcaacatagagagaccccatctttaaaaaaaaacaaaacaaaaacaaagtacatgtcccacctcttccacactgaaagccatggtgtatgggcagggccagatgctagtaaaaatcccttctgttttctccacagcatcacttatcatgtaggacaagagtggtcaataaagaagtttaactattcatgcttctagttacagagaaatttgaatttccttactttttaaaatgaaacttttagtggcttagactttagaaggcttatcttagcagtcaaataagggtggaaaatacaggtaatttcatactttttacggtagttactaggagaaagtcttctctggtaatgaagtctgacccagaagcctatgagtcatatttgttgaatgtgctaaacataagacatagtaagataggaaataatgaaattccagctcagccattgctaacccccaattgttcttaaattgtgattgtgtagccagcatagtcttactctaggttctgtgtctgtttttacaaaaaaagtaaaagtcctaactattcacacagatttgtttttatgataagagatccaaaggaggtttctaaataattttcagaattgctctaaccagttaccttttcacccgaagtagatctggaaagcatccagcaaaacagcttttgcatgttcatacctttcagaatgaatcatcttccttccctttagctagagaagggctatgtgtactgtttctggcagaatttccacagatgttttatttttcttaagtcttccagtgcttcacttgagttgaacctagggggtacctgatgttccccaaggagatctctgaatctcctgactcttggttgtttgtgataaaagagcattccgttctgattcttctgggaggatttcaggtatccttttttttttttttttttttaatgaagttgttcccactataggaaatcagagatggcaggcaatagactgtataatgctgtactaaggattgtagaaaggtgaaggtttgttcttgcttgttgagcataatcctctttacctgtgaaatggaaagtagtatcatcagaatgttgaggtgaaatctgggacatcttctgttctccttaaattcaaagcttgtcccaactatcctgaactttttatttttatatttcacagtttccagacatcagtcaagagtctgattctccatttgttttcatctgcaaaaatcctcaggaaatggttgtgaagtttcctattaaaggaaatccaaaaatctgtaagtcatgattttttttctttaagactagtcaagtgcagtagtaaggaatggggaaaaaagtagaacaaggagttcaatctataactgactgtgaacaatcagttgaggtaacccactacctttggatcagcctgtaagtcataatctttgatggtctaattttcttttcttttcttttctttttttttgtcttgcatcttacttgtctagatttttataaaatcttcccttttggccgggcacggtggctcatgcctgtaatcccagcactttgggaggctgaggcaggcggatcacaaggtcaagagatcgagaccatcccggccaacatggtgaaacccccccgtctctactaagattaccaaaaaaaaaaaaaaaaaattagctgggtgtggtggcgtgcgcctgtagcacctgtagtgcctgtagcgcctgtagtctcagctgcttggaaggctgaggcaggagaatcgcttgaacctgggaggcggaggttacagtgagctgagattgtgccattacactccagcctggtaacagagcgacactcagtctcaaaaaaaaaaaaaaaaaaaaaaaatttattgtgttctgtgtgtccctagtgttggaggcttaatataattatacttatcaataactttatgttaggttaactacagtaaagcctttccaaagtataccttgatccacaattaccggcatagtaagtcgctctaaacttcaatttcagatcctattacattaaaatgctatttgtcagccaaaagagtgttttgccccactgtactgctcattaaaggaagtagtaaggcagtgcagtggcaacattgtcatttatccatttattcattgttcagtattcaactcaagaataagggctgggcatggtggctcatgcctataatcccagcactttgggaggctgagacgggtggatcatctgaggtcaggagttcgagaccagcctggccaacatggtaaaaccccgtctctactgaaaatacaaaaaattagcagggcatggtggtgggcacctgtaatcccagctactcgggaggctgaggcagaagtatcgcttgaactcgggaggcagaggttgcagtgagccgagatcacgccactgcactccagcctaggcaacaagagcgaaactccatctcaaaaaaaagacttaacattttaagtatttattattgaacatctattttagagacaccacttcccacatttctcttcattattggttcccagagtacagccttggctctcttgcttttcattcctttttaacattttttttttttttttgagacagagtctcactctgtctccgaggctggagtgcagtggcccaatctcggctcactacaacctccacctcctgggttcaagcgattctcctgcctcaccctcccgagtagctgggactacaggcatctgccaccactcctggctaatttttgtattttagtagagatggggtttcaccatattggccaggctggtctcgaactcctgaccttgtgatccgcctgccttggcctcccaaagtgctgggattacaggcgtgagccactgtacctggcctcattttaaaaatttttattagttaattgattgagacagggtctagctgggacccatcttttcttcctctgtcctagagcagcctcttgtatttcaaagcagtctcaaaacgcatatagtgggccgggcgtggtggctcacgcctgtaatcccaacactttgggaggccgaggcaagtggatcacaaggtcaggagatcgagactaccctggctaacacagtgaaaccccatctctactaaaaatacaaaaaattagccaggcatggtagcgggcacctgtagtcccagctactcgggaggctgaggcaggagaatggcgtgaacctgggaggcggagcttacagtgagtcgagattgcaccactgcactccagcctgggcaacagagcgagactccgtctcaaaacaaaacaaaacaaaaacaaaaacaaacaaaaaaaacacacatatagtagtggtgtcctccctgcctaacatccttggaaaagcaacatcagcaactctcccatttgctcatgtcagttaccattttgtgcctctttgtcattgctttcccattgtgtgaattgcatgattctagggcatgcattgtcctcactggtgcgaaactctccctcatccaataccttggggaccaactagccattttataaatctatgccctagagaagtacttctcaaactataatgtaactaaaaatcacctagcaagctgttaaaacacaggttcctcaatcctgctctcaggtgatactgatgctgttggccagctggctgtactttaagtaacactgctttcaatcacaaaatgaaatgcttagagtaggaatttatattaatgtatatttactgcaaaattcaggcaacatcttgattgataagatcctaagattcctacacattcgaagatctgaaccaagttgcccttaactgacacaaattatttacttcagacggtactccagttggtggcccagtagccctggaaatcctttcttttctccactattaaggatttatttatttttgagatagggccttggcctgtcacccagcctggagtgcagttgtgcaattatggctcattgcagcctccacctcctgggataaagtaatcctcccacctcagcccccaaagtagctgggactacaggtatgtgccaccacgcccagataatttttaaatttttggtagagatgaggtctcactatgttgcccagtttggtctcaagtggatcctcctgccttggcctcctaaagcgttaggattacaggtgtgagccaccacacctggccctgtttaggatttagatctccttttaccctccctctgttttggttctagcagtctaccccttcctcctccatttcattctcaccttcctctaggtactggtggcaacactggtggtaggaggaaacggtggtaaatcctctctctcaaacccactgttaattgatctttagtcctacttcccttttcgtagcttcttcccctggcttggttttcatctgctgcctaaagtcctgtgagaaaatgttctgtgtagagtttagctatttctctgaaatgttttactttagtactttctctacaccttcaggacctatagggccttcatttttctccataaggtttcatgatggtgaggggagtgacattcttaggagaaacctttaataacttcctatctttttcgtattgtttctgttagttaatggtagactagacaaggttaaaaattgcacagaaacaataggtagtgaaaattttattttgagatggggtctcactctgttatccaggttggagtgcagtggcacaatctcaattcactgcaacttccatctcccaggctcaagtgatcctcccacctcagcctcctaagtagctgggaccacaggcacgcgcctccatgcttggctaattttttgtatttttgctagaaacggggtcttgccatgttgcccaggctggtcttgaactcctgagctcaggtgatccatccaccttggcctctctaaaaaccttctactctgccagaactctcttgccttaggtcctaggggataacctccagtagtttaagctggaaaagtctttaatcccagttacattggggaaaatacatacctgcctcttaatttgaaatggttatcacactttcccctagatatattattacatgaagtgattaagtttaatagcaataatattaatacttggtcaggcacagtggctcatgtctataatcccagcactttaggaatctgaggcaggaggatcacttgaagccaggagtttgagaccagcctgagtaacatagcgagaccctgtctctacaaaaaaataaaaaaaattattccagtgtggtggcgtgtgcctatagtgccagctacttgggaggctgaggcagaaatattgcttgagcccaggagttcaaggctgcaatgggctatgattgcaatactgcactccagcctgggtgacacagcaagaccctgtctctaaaaaaaaaaaattaattaatagtctgctttacttataacactgtggcttaaatgtttgttttttttgtttgtttttgttttttttttttgtgggatgtcttaggaacctagccaccctttacagattagttctatgataaatatattcgaaattccaaacttttatttttgagacaggggtctcactgtgttgcctagactggccttgaactctgggctcaagagatcttcctgcctgagcctcccaagtagctggaactactatgtagatatacactactatgatgcccggcttcaggttccaaacttcagacttgcaaataaactttcagaatatgacccatttatgtgttgtatcatatatatatatataaaaaatatatggatgtataaatgccttaaattaaaggtgtatactttgatttgtttgtttttggaagtgtaaatttgagtttgcttgaccttaaggtaattgtgtctcctcaaattgagataattcagaaaagagcaatatacaatagggtatcacctggctctgtgtctgctttatataggttgaatactcagataaaggaaattttttaaatttagcaacatgctctataaactcatgcaccttatatcttttgcaaaccatgtgaaaattcctatgagagttatatcaattaatgacaaatattttttccccttttaacttcttgcccatctgctgcacatgcatttgactttcttttaggcactatgattgaggatgtggtttaacactgaaacgattaggtactaaatgtaaaaatattggggaaatacagaaactaagtgttacaccctaccatgaagaggatgtattgtatgtcactatggttcactatccagatcctgatcttagaagcccagggtgggctgggcgcagtggctcacgcctgtaatcccagcactttgggaggccgaggcggatcacaaggtcaggagatggagaccatcctcgctaacacggtgaaaccccgtctctactaaaaatacaaaacattagccagacgtggtggcaggtgcctgtagtcccagctactcgggaggctgaggcaggagaatggcgtgaacccgggaggcggagcttgcagtgagtcgagatggcgccactgcactccagcctgggcgagagtgtgagactccgtctcaaaagaaaaaaaaaaaaaaaaaaaaagaaagaaaggaaaaaaaagaaaaaagaagcccagggtgaactagaactcagagctttgagttcctgcaatctaaggacagtcatgatgactgctgctttccacaagaagccccggtcccttaccatcattgcccacagctggcccaagagttgcctctattggcaatcactctgttagacgttaaggatacaaaatgtccatgattgtaaggagttcacagattgttggcaaatgtctgattttttttaggcagcctagaggatgaaagaacgtctgaattcctgggaatatcctggaaatccttgttcctcttgtatcttgtttctcctattagctttccattttagacatcatcattgaagccagagattagtctgcctacaattgagtgttttattctgatgggttgatcttacctgagctggtctcacttgagggctttcataatcatactggagtttcctgaaacgtaaaataggaatgttctcattcagtaaagctttaagaatgtgaagaaaatgatatgtctttttttcttatgaagaatctgaaataaataataattaaaaga

SEQ ID NO: 14613 - DNA, 558 bp, Homo sapiens
ctcagaactccaggctacatatcgtcttcttcgtgggaaagatgtggaatttcctaatgactatccgtcaggttgtcttctgggctgtgtggacctaattgactgcttgtcccagaagcaatttaaggagcagtttccagacatcagtcaagagtctgattctccatttgttttcatctgcaaaaatcctcaggaaatggttgtgaagtttcctattaaaggaaatccaaaaatctgcagcctagaggatgaaagaacgtctgaattcctgggaatatcctggaaatccttgttcctcttgtatcttgtttctcctattagctttccattttagacatcatcattgaagccagagattagtctgcctacaattgagtgttttattctgatgggttgatcttacctgagctggtctcacttgagggctttcataatcatactggagtttcctgaaacgtaaaataggaatgttctcattcagtaaagctttaagaatgtgaagaaaatgatatgtctttttttcttatgaagaatctgaaataaataataattaaaaga

SEQ ID NO: 14614 - DNA, 6165 bp, Homo sapiens
agatggcggtggctggggcggtgtccggggagccgctggtgcactggtgcacccagcagttgcggaagactttcggcctggatgtcagcgaggagatcattcagtgagaacagttcgggtccaagcggggaaggagctctgggatgtgcactgcctgagcgaaccgggaagcggggaggactgaaaagttaagagagaaatgtgataaaggggctgcagtctgtagtctgtaggcgtcgaattttggcctccacctttgtagtttagtttctggaatagggtgtccggctccacagtctgccggtcgggcttttttcctgggaagacgcccaatctgtaataattagaaatgcaaggctgtcccaggagccagtttcctttctagagagaaggggcaggtcaaactgtatttcctaactttgaaccccttactcttttatttatttattattattgttgttattattgagacggagtctctgtcgcccaggctggcgtgcggtggcgcgatcttggctcactgcaacctccgccttccgggttcaggtgattcacctgcctgagcctcccaagtagctgggattacaggcacgcaccaccacacccggctaatttttaaaaatttttagtagagtcagtgtttcaccatgttggccaggctagtctccagctcctgatctcaagtgatccgcccgcctcgacctcccaaagtgctgggattacaggcatgagccaccgcacccagatatactctgaacattttagtcggcccaatctgagttgtgtcagtagagccaacagggtcagctgtgtcaataggacctagaatttaagtggaagcagcgtggtagagtacaaatagcttctgactctggagtctcaggttctatattctgttgtcgtttacctgttttagaacccaggacaacttaatttttctctctgtaccctggtttcttcatttataagattaatcattagtagagcttatcatgctttatgactcctatgaaatggagatggtgtacatgacttaatatctactttcaactgattgaagaacatttgttgcgctgctgttacacgccaggtgctggggtaacaaagacaagacagttgggttccccttcgttgatgagtgctgaggttggggaaatgaaggggcttgttggagcacaaaataaaggattctcattaagatttgaaaaactcggaaggtttattggaaaggataactttcacccgagaactaaggaatagacagaggtggcggtccaaagtgttcaggcaggggagaaaactacaaaaatgggacttgatcgaagaactgaaagtgttccttcatttgattccttggtcactgatgttgaaacctaaattgctgttctagggcttttgtaggaagtaagatgagtttctgagtttcggagaaaatagacttttggcaaggagacagttcaagtaggttattttaatggatttttttgaggccctaggagatggctcaagcccttattcccagcactttgggaggtagaggtgggaggattgcttgagactgggagttggagaccaccctgggcaacatagtgagaccctgtctctacagaaataaaaaaagtaaacaacaagataaaggattttttttaacactagaatagacaacaaaacaaaacagcgaaatcttatggtttggctttacccttgcttgaacgcagtcagattaagtatttagtagttttcaaacattttttaaagcagtggaatgctatcaaatgaaataatgaaactttgcaatatataaaacagaaaagtgttttttacgaatataagttcaaaattttcacttttttttttttttttttttgagacagattctgttgcccaggctggagtgcagtggtgcgatctcagctcgctgcaacctccgcctcccacgttcaagcgattctctttcctcagcccgagcagctgggattacaggcgcgcaccaccatgcctggctaatttttgtattcttactagagatggggtttcaccatgttgaccagggtggtctcgaactcctgacctcagatgatccaaccgcctcagcctcccaaagtgctgggattacaggcatgagccaccacgcctggcccaattttcacatatttattgtaaatatgtgtaatatattaaatatcaaatatattaaatattaaatatatcaaatattatattaaatatattaaatattaaatatatcaaatattatattaaatatattaaatatgtgtattatattaaatacagtattaaaaaaaaaagattgaggtggccaggcgcagtggttcatgtgtgtaatctaagcactttgggaggccgaggcagatggatcatttgaggtcaggaatttcagaccagcctggccaacatggcgaaacccccactctactaaaaatacaaaacttagtcgggtgtggtggagcgtgcaggtcatctcagttactcggaaggctgaggcaggagaatcccttgaaccgcggggcagaggttgcagtgagctgataccgcaccactgcactccatcctgggtgacagagtgagacctcgtctcaaaaaaaaaaaggaaaaaagaaagattgaggctatttttgataaattaacaatttgaaatagggtaagaatgatagatgtagtcttctcagtctagaatccagttgtattttgtttggattacacagtatcaagaaaatgcgttctcaggccaggcgtggtggctcacgcctgtaatcctagcactttaggaggccaaggcaggtggaccacctgaggtcaggagttcgagaccagcctggccaacatggtgaaaccccgtctctactaaaaatacaaaaaaaaattagccaggtatggtgacgggcacctgtaatcccagctactcgggaggctgaggcaggagaatcgcttgaacccaggaggcagaggttgcagtgagccaatatctcaccactgcactccagcctgggcgacagagcgagactccgtctcaaaaaaaaaaaaaaattatattccgcctgggaaggaggtcagtgcccgtcggcatgtattacgctaagatactatttgaagcatttgttaggtattcactagtattccacaacaggctattatgccatgatgaaagcatttgctgtgccttgcctggcatttaattgagaattacccaggtgtatgtactacagtaatgtactaacttgaacaattttatatgagtggactgaatttttgaaatagcacagagctattaacttttttttttttcttttttgagacggagtctcactctgtcgcccaggctggagtgcagtggcaggatctcggctcactgcaacctccacctcccaggttcaagcaattctcctgcctcagcctccccagtagcttggactacaggcgcgtgacaccatgcccagctaatttttgtatttttagtggagatgggattccaccaggttggccaggatggtctcggtctcctgacctcgtggtctgcccgcctcagcctcccaaagtgctgggattacaggtgtgagccactgcacccggccttaactttctaattagtgatacatttataagacataaatagctatccacagagttaacaaaataaactttggtccacaatctggatgagttcatattattttgataagatttggtatataacatatttggatgaatgttgttctttattataccttgttaagtagttaaaatgacatttattcaaatggttctgaaactctcttccctggttgtttgaaaaatactccagggttggccaggtgcagtggctcaacctgtaatcccagcactttgggaggctgaggtgggttgatcacttgaggtcaggagttcaagaccagcctgcccaacatggcaaaaccttgtctctactaaaaattcaaaaaattagccgggcgcagtggtgcacgcctgcaatcccagctactcaggaggctgaggcaggagaatttcttgaacctaggagccagaggttgcagtgagccaagatagcaccactgcactccagcctgggtgacagagtgagactctgtctcaaaaaaaaaaaaaaaaaaaaaaaagccaggtgcagcggctcagcctgtaattccagcactttggaaggctgaggcgggcaaatcacttgaggtcaggacttcgagaccagcctggccaacatagtgaaaccccgtctctactaaaaaaaagcaaaaacaaaacaaaacaaaacaaaaattagccgggtgtggttgtgcacgcctgtaatcccagctactcaggaggctgaggtaggagaatcgcttgaacctgggagatggagtttgcagtgagctgagatcgcaccactgcactccagcctgggagactaaatgagactctgtctgaaaaaacaaaaaaaccctccagggttaaatgatcccttgggattccttacagttttgcaagtctttgatagcagttaatcttttggtggggactggtaagtttggggatcaagatgattaaaatgtgtaagtcctgaaaaaccattgtcttttctaatccatagtaattagaagatgcctgtttttggggggtgtgtgtatgtgtgtgtgtatttttagtagagacggtttcaccatgttggccaagctggtctctaactcctgacctcaggtgatccacccgcctcagcctcccaaagtgctgggagccatcatgccccaccgtttttgcttgtttgagacagagtctcattctgttgctcaggctggaatgtagtggtgcaatcatggctctgcagccttcacctctgagactcaaaggatccttccacctcagcctcccaagtagctaggactacaggaacatgcctccatgcctggctaattttaatttttcttctagagacaaggtctccctatgttgcccaggctggtctcaaactcctgggcccaagtgatcctccagcttcagcctcccaaattgttgggattacaggcatgggctcccgaacccagacagaatattctcttagtgaggcccaaaggcacaaatttgtttacctctagagcataattctgcaattccaccattacactgtgaaaagaatgcagtacatacgataccaatcataggacaatttcataatttttaaaaagttaaaggatatagcactatggtaataatttttcttgcattccatatcattgtgtctgaattacagtttctgtgctgttttcagtgtcttgtatgttaattttttttttttttttttttgagaggaagtctcacttgcccaggctggagtgcagtggcacgatctcagctcactgcaagctctgtctcctgggttcacaccattctcctgcctcagcctcccgagtagctgggactacaggcgcctgctaccatacccgcctaatttttttttgttttttttttttagtagagacagggtttcaccgtgttagccaggatggtctcgatctcctgacctggtgatccgcccgcctcggcctcccaaagtgctgggattacaggtgtgagccaccgcgcccggccgcttatgtgttaatttataagtaatttttatcacttctttctcttgtaatgataagatgttcactgtagaaaactaaaaaaatcagaaaaggataaaaaagtaaactaaaattaccataatactacaacccagaaataagcactgtttctttctcttttttcccatatatattataatgtaatacattttaaaaacgtatttattgtaggaaaaaagaaaataaaaataaaactacctttaattccatcactcactagtaatcgttttggtgtataacgttgtttttttcctacacataagtgtatgtatgtatacattcataccagttaggatcgtatcgtatttctagcacctagcatagtacttggctcaaagtaaacactctaatagattaatgaatggtttttactacctagatctctgttaagattactgagaaacagtgtaagttagtcttgtttcaacaacttatatctttgcctcctgaggtacgttttgtcaattgagagtgctgaagagatacgagaatatgttactgatctcctccagggaaatgaaggcaaaaaagg

SEQ ID NO: 14615 - DNA, 362 bp, Homo sapiens
agatggcggtggctggggcggtgtccggggagccgctggtgcactggtgcacccagcagttgcggaagactttcggcctggatgtcagcgaggagatcattcagtgagaacagttcgggtccaagcggggaaggagctctgggatgtgcactgcctgagcgaaccgggaagcggggaggactgaaaatagagacagggtttcaccgtgttagccaggatggtctcgatctcctgacctggtgatccgcccgcctcggcctcccaaagtgctgggattacaggtacgttttgtcaattgagagtgctgaagagatacgagaatatgttactgatctcctccagggaaatgaaggcaaaaaagg

SEQ ID NO: 14616 - DNA, 21830 bp, Homo sapiens
ctggggaagatggcggtggctggggcggtgtccggggagccgctggtgcactggtgcacccagcagttgcggaagactttcggcctggatgtcagcgaggagatcattcagtgagaacagttcgggtccaagcggggaaggagctctgggatgtgcactgcctgagcgaaccgggaagcggggaggactgaaaagttaagagagaaatgtgataaaggggctgcagtctgtagtctgtaggcgtcgaattttggcctccacctttgtagtttagtttctggaatagggtgtccggctccacagtctgccggtcgggcttttttcctgggaagacgcccaatctgtaataattagaaatgcaaggctgtcccaggagccagtttcctttctagagagaaggggcaggtcaaactgtatttcctaactttgaaccccttactcttttatttatttattattattgttgttattattgagacggagtctctgtcgcccaggctggcgtgcggtggcgcgatcttggctcactgcaacctccgccttccgggttcaggtgattcacctgcctgagcctcccaagtagctgggattacaggcacgcaccaccacacccggctaatttttaaaaatttttagtagagtcagtgtttcaccatgttggccaggctagtctccagctcctgatctcaagtgatccgcccgcctcgacctcccaaagtgctgggattacaggcatgagccaccgcacccagatatactctgaacattttagtcggcccaatctgagttgtgtcagtagagccaacagggtcagctgtgtcaataggacctagaatttaagtggaagcagcgtggtagagtacaaatagcttctgactctggagtctcaggttctatattctgttgtcgtttacctgttttagaacccaggacaacttaatttttctctctgtaccctggtttcttcatttataagattaatcattagtagagcttatcatgctttatgactcctatgaaatggagatggtgtacatgacttaatatctactttcaactgattgaagaacatttgttgcgctgctgttacacgccaggtgctggggtaacaaagacaagacagttgggttccccttcgttgatgagtgctgaggttggggaaatgaaggggcttgttggagcacaaaataaaggattctcattaagatttgaaaaactcggaaggtttattggaaaggataactttcacccgagaactaaggaatagacagaggtggcggtccaaagtgttcaggcaggggagaaaactacaaaaatgggacttgatcgaagaactgaaagtgttccttcatttgattccttggtcactgatgttgaaacctaaattgctgttctagggcttttgtaggaagtaagatgagtttctgagtttcggagaaaatagacttttggcaaggagacagttcaagtaggttattttaatggatttttttgaggccctaggagatggctcaagcccttattcccagcactttgggaggtagaggtgggaggattgcttgagactgggagttggagaccaccctgggcaacatagtgagaccctgtctctacagaaataaaaaaagtaaacaacaagataaaggattttttttaacactagaatagacaacaaaacaaaacagcgaaatcttatggtttggctttacccttgcttgaacgcagtcagattaagtatttagtagttttcaaacattttttaaagcagtggaatgctatcaaatgaaataatgaaactttgcaatatataaaacagaaaagtgttttttacgaatataagttcaaaattttcacttttttttttttttttttttgagacagattctgttgcccaggctggagtgcagtggtgcgatctcagctcgctgcaacctccgcctcccacgttcaagcgattctctttcctcagcccgagcagctgggattacaggcgcgcaccaccatgcctggctaatttttgtattcttactagagatggggtttcaccatgttgaccagggtggtctcgaactcctgacctcagatgatccaaccgcctcagcctcccaaagtgctgggattacaggcatgagccaccacgcctggcccaattttcacatatttattgtaaatatgtgtaatatattaaatatcaaatatattaaatattaaatatatcaaatattatattaaatatattaaatattaaatatatcaaatattatattaaatatattaaatatgtgtattatattaaatacagtattaaaaaaaaaagattgaggtggccaggcgcagtggttcatgtgtgtaatctaagcactttgggaggccgaggcagatggatcatttgaggtcaggaatttcagaccagcctggccaacatggcgaaacccccactctactaaaaatacaaaacttagtcgggtgtggtggagcgtgcaggtcatctcagttactcggaaggctgaggcaggagaatcccttgaaccgcggggcagaggttgcagtgagctgataccgcaccactgcactccatcctgggtgacagagtgagacctcgtctcaaaaaaaaaaaggaaaaaagaaagattgaggctatttttgataaattaacaatttgaaatagggtaagaatgatagatgtagtcttctcagtctagaatccagttgtattttgtttggattacacagtatcaagaaaatgcgttctcaggccaggcgtggtggctcacgcctgtaatcctagcactttaggaggccaaggcaggtggaccacctgaggtcaggagttcgagaccagcctggccaacatggtgaaaccccgtctctactaaaaatacaaaaaaaaattagccaggtatggtgacgggcacctgtaatcccagctactcgggaggctgaggcaggagaatcgcttgaacccaggaggcagaggttgcagtgagccaatatctcaccactgcactccagcctgggcgacagagcgagactccgtctcaaaaaaaaaaaaaaattatattccgcctgggaaggaggtcagtgcccgtcggcatgtattacgctaagatactatttgaagcatttgttaggtattcactagtattccacaacaggctattatgccatgatgaaagcatttgctgtgccttgcctggcatttaattgagaattacccaggtgtatgtactacagtaatgtactaacttgaacaattttatatgagtggactgaatttttgaaatagcacagagctattaacttttttttttttcttttttgagacggagtctcactctgtcgcccaggctggagtgcagtggcaggatctcggctcactgcaacctccacctcccaggttcaagcaattctcctgcctcagcctccccagtagcttggactacaggcgcgtgacaccatgcccagctaatttttgtatttttagtggagatgggattccaccaggttggccaggatggtctcggtctcctgacctcgtggtctgcccgcctcagcctcccaaagtgctgggattacaggtgtgagccactgcacccggccttaactttctaattagtgatacatttataagacataaatagctatccacagagttaacaaaataaactttggtccacaatctggatgagttcatattattttgataagatttggtatataacatatttggatgaatgttgttctttattataccttgttaagtagttaaaatgacatttattcaaatggttctgaaactctcttccctggttgtttgaaaaatactccagggttggccaggtgcagtggctcaacctgtaatcccagcactttgggaggctgaggtgggttgatcacttgaggtcaggagttcaagaccagcctgcccaacatggcaaaaccttgtctctactaaaaattcaaaaaattagccgggcgcagtggtgcacgcctgcaatcccagctactcaggaggctgaggcaggagaatttcttgaacctaggagccagaggttgcagtgagccaagatagcaccactgcactccagcctgggtgacagagtgagactctgtctcaaaaaaaaaaaaaaaaaaaaaaaagccaggtgcagcggctcagcctgtaattccagcactttggaaggctgaggcgggcaaatcacttgaggtcaggacttcgagaccagcctggccaacatagtgaaaccccgtctctactaaaaaaaagcaaaaacaaaacaaaacaaaacaaaaattagccgggtgtggttgtgcacgcctgtaatcccagctactcaggaggctgaggtaggagaatcgcttgaacctgggagatggagtttgcagtgagctgagatcgcaccactgcactccagcctgggagactaaatgagactctgtctgaaaaaacaaaaaaaccctccagggttaaatgatcccttgggattccttacagttttgcaagtctttgatagcagttaatcttttggtggggactggtaagtttggggatcaagatgattaaaatgtgtaagtcctgaaaaaccattgtcttttctaatccatagtaattagaagatgcctgtttttggggggtgtgtgtatgtgtgtgtgtatttttagtagagacggtttcaccatgttggccaagctggtctctaactcctgacctcaggtgatccacccgcctcagcctcccaaagtgctgggagccatcatgccccaccgtttttgcttgtttgagacagagtctcattctgttgctcaggctggaatgtagtggtgcaatcatggctctgcagccttcacctctgagactcaaaggatccttccacctcagcctcccaagtagctaggactacaggaacatgcctccatgcctggctaattttaatttttcttctagagacaaggtctccctatgttgcccaggctggtctcaaactcctgggcccaagtgatcctccagcttcagcctcccaaattgttgggattacaggcatgggctcccgaacccagacagaatattctcttagtgaggcccaaaggcacaaatttgtttacctctagagcataattctgcaattccaccattacactgtgaaaagaatgcagtacatacgataccaatcataggacaatttcataatttttaaaaagttaaaggatatagcactatggtaataatttttcttgcattccatatcattgtgtctgaattacagtttctgtgctgttttcagtgtcttgtatgttaattttttttttttttttttttgagaggaagtctcacttgcccaggctggagtgcagtggcacgatctcagctcactgcaagctctgtctcctgggttcacaccattctcctgcctcagcctcccgagtagctgggactacaggcgcctgctaccatacccgcctaatttttttttgttttttttttttagtagagacagggtttcaccgtgttagccaggatggtctcgatctcctgacctggtgatccgcccgcctcggcctcccaaagtgctgggattacaggtgtgagccaccgcgcccggccgcttatgtgttaatttataagtaatttttatcacttctttctcttgtaatgataagatgttcactgtagaaaactaaaaaaatcagaaaaggataaaaaagtaaactaaaattaccataatactacaacccagaaataagcactgtttctttctcttttttcccatatatattataatgtaatacattttaaaaacgtatttattgtaggaaaaaagaaaataaaaataaaactacctttaattccatcactcactagtaatcgttttggtgtataacgttgtttttttcctacacataagtgtatgtatgtatacattcataccagttaggatcgtatcgtatttctagcacctagcatagtacttggctcaaagtaaacactctaatagattaatgaatggtttttactacctagatctctgttaagattactgagaaacagtgtaagttagtcttgtttcaacaacttatatctttgcctcctgaggtacgttttgtcaattgagagtgctgaagagatacgagaatatgttactgatctcctccagggaaatgaaggcaaaaaaggtcaattcatagaagaacttataaccaaatggcaaaagaatgatcaggagttgatttcggatcctttgcagcagtgcttcaaaaaagatggtaagttaatgtaattatgcaaatgttgaaatattggtaagtgggcaggcttaaagaattattattattatttttttttttgccatcttgtgtttcttcacagctaacttaaacagagtcatatgtatacatatttttagttcggttctactcaatccgtaatgaatattgctctagttctttttcaacttagaaaatatcacaaaaaggccgggcgtggtggctcacgcctgtaatcccagcactttgggaggctgaggtgggcggatcacgtggtcaggagatcgagaccatcgtggctaacacggtgaaaccccatctctactaaaaatacaaaaagttagccaggcatggaggcaggcgcctgtagtcccagctactcaggaggctgaggcaggagaatggcgtgaacctgggaggtggagcttgcagtgagctgagatagcaccactgcactccagcctgggcgacagagcgagactccatctcaaaaaaaaaaaaaaaaaaggaaaatatcacaaaaaaatgtgtgtttacagacacaaatgtggcttcagaataatttgaaaaatttatacataaagaaacatttttcagtcgtgcatacctggatgtaagtaaagtgttgattgactatagtatgaatagcatttagagataactgcttaaatagtacaaaagataagcaccaaactaaataatctaagttattatgcaatctacaatatcagaattttgtttgttttgagacatggtctcactttcattgcccaggctggagtgatgtggcttgatcctagctcactgcagcctctgcttcctgggctcagatgattctcccacctcagcctcctgagtagctgggactacaggcgtgtgttaccacacctggctaatttttgtatttttttctagagatagggtctcactctgttgtccagggtgctctcaaactccttggttcaaacggtccacctgtctcggcctctcaaagtgctgggattatgcatgtgagccactaagcctgattttagaatatcagattttaatttaacttcttagtcccagccacttgtttgacttctttttcattgactgcactcttggaaatgatgatttaaatttaattctggtttgacaggaaaagataattaaaaatcttcctgatgatatcttgactctaaatattaagcatcaccttagtttattagctatattagttcaccaggaatcctcttatcaatctgtgtgtgtgtgtatttttttttttctatctttaaagaaattttagatgggcagaaatcaggcgaccatctaaagcggggtaggaagaaagggagaaacagacaggaagttcctgcatttactgaacctgacacgactgcagaggttaaaacaccttttgatttggccaaggtgagtgcttatagattgaagctttttctgactattggagaagaggaagtgactaatacatttcagagagcaaagtgtacaaattggtctagaatggcaatttttcaacaaatgcatgaattttaggtagaaaaagttacatatactcctttctatatggtagattttttgtttggcaacctgattagtattataaagacatctttgcttttttttttttttttccccaagacagagtcttgctctgtttccagtctggagtgcagtggtgcgatctctgctcattgcaacctccgcttcctgggttcaagtgattctcctgcatcagtctcccgaatagctgggactacaggcatgcgccaccatacccagctaattttcttttttttttttttgagacagagtctcgctctgtcgcccaggctggaatgcagtggtgtaatctcagctcaccacaacctctgcctcctgggttcaagcgattctcctgcctcagcctcccaagtagctgggactgcatgcgcacactgccacgcccagctaatttttcgtattttagtagagatggggtttcaccgagttgcccaagctggtcttgagctgctgagctcaggcaatccacccaccttggcctcccaaagtgctaggattacaggcgtgagccaccgcgcccagccctgtttttgaactttaaattaatggagctaaatagtgtgtactcttgtatctagctgcttttttttttttttttttttttttttttgagacggagtcttgctctgtcacccaggctggagtgcagtggcgcaatcttggcccactgcaacctctgcctccctggttcaaacgattctcctgcctcagtctcccaagtagctgtgattacaggcacacatgctaccacacccagctaatttttgtatttttagtagagatggggtttcaccatgttggccaggctggtcttgaactcctgacctcaagcaatctgcctgccttggcttctcaaagtgctgggattacaggcatgagcaactgtgcccagccagtgtctagcttctttcaatttatgagattcatctctactctgggcagctatactttctcattctcattgctacacagaattgtattaagtgaacacatcacaatttatccattctattatttggatagtttccaattccaatgcaacagtgaacattcttgtatgtatttttggtgaacatatttacacatttctgtttagtatatatctaggagttgaattgctgtgtcatagaacatgcatatgttcaacttcagttgatatgagtttgcagtcctgccagcagtgtatgagaggtctaattcttttgtatctttgctaacacttcatattttctctttttcagtttagccattctggttggtatttagtggtattgcattttgttttcgtttttgcattattttgacgactaatgaaattgagcactttttcatatgcctgttagtcattaggatatcttttgttatgaagttcttattaggttttttttgccctttttttgtttgagataggatctcgctctgttgcccagtggcgtcaactcgactaactgcaacctccaccttctgtttttctattgtattatctgtccttttcttagtggtttctgattaagtcaactttatatttatttttcctattttattgatggcccatatttccaaatctgtgaatatcatctgcttttagaggcattcttgtttcttatgatctccaatttagctgtgcttaaagatgtcatataaacagatttaactgctacatttaccctccactagctatagtaatgggctgaaagctactagcagaaaagacaaggtaattatcagctagtttttctagagtataacctttcctcagaaccttgattataactaatttgtatttcttcctttcactgccttctttcttggttcttggatagtatataagttgttactgaacagaacggagcattttctcccttgactttttacattgtcattaattatttgatgttattttgatgtctttgtacgataggcacaagagaacagcaactccgtaaagaagaagacaaagtttgtcaatttatacacaagagagggacaggacaggcttgcagtcctgctccctggtcgtcacccttgtgattgcctgggccagaagcacaagctcatcaataactgtctgatctgtgggcgcattgtctgtgaacaagaaggctcaggcccttgcttattctgtggcactctggtaaattatttcttttctattttattttactgtgctttgtgttaatacgcagagccagtcagatctcaagtaatttctctttttttgtttttttttggttgagacggagtctcactttgtcgcccaggctggagtgcagtggcacgatctcggctcgctgcaggctctgcctcccgggttcatgccattctcctgcctcagcctcccgagcagctggaactacaggtgcctgccaccacgcccagctaatttttttgtatttttattagagacgggattttacagtgttagccaggatggtctcgatctcctgaccttgtgatccgcccacctcggcctctcaaagttctgggattacaggcgtcagccaccgtgcctggctttctctttttcttagtaaatttcttccctaaaatatccagtgaactcgagtgtcagggatatgattagttagaaacccaaggttaggccaggcacagtggcacacgcctgtagtcccaacactttgggaagccaaggtgggttttgggaggctgaggtgggaggatcacctgagcccaggagtttgagaccagcctgggcaatgtaggaagaccctgtctctacaaaaaaaaaaaaaaaaaaaaaaaaaagtttttaattagctgggctgggtatggtggtgcacacctgtggtagcatttacatgaggggctgaaatgggagcttcacttgatcccaggacgtccaggctgcagtgagacagcgagtccttatctcagaagaaagaaagaaccccaggttatatcctagtactgaggccattaatgagaagggtttgagaacatacattgttgagagatccaagggctaggagccactgtgacagaatcctcagatcattatagcttctatttccaggattccaccttgtcatagctctgctttgtctgagagaatgacctcaagaatgcagtgataatgactcacagaaacccttaatgagctatctagaaagctaattttaccaagttgagctggctgtcagaagcaatgacatttggtgttggtaaaggcatccgttttatattacttcattttctcctcttttctgatggggcccttaattttttcttttttccttttttttttttttttttttttttttttgagacggagtctcactctgtcgcccaggctggagagcagtggcacaatctcggctcactgcaacctctgcctcctgggttcaagcaattctcctgtctcagcctccctagtagctgggacaacagggacacaccaccacgcccagctaattttttgtatttttagtagagacagggtttcaccatattggtcaagctggtctcagaactcctgacctcaggtgatccaaccatctcagcctcccaaagtgctgggattacaggtgtgagccaccgtgcctggtgggacccttaattttttcatatgctcagaataagctgatagacaatggatgacctgaaaaatgtagtgtctaccaataaaaatgtccattaaatggcagtaaatctcctcccatatggagctttctctttagagcaagctcttatagctgctggcaggaactctgtgtgtcattgaggcaactgctaggaagtattgtacagtgttttctcctaggtcccttgaagtaatgtaaagcagattggccttgaagtttgtttgtttgtttgttttttgagatggagtctcactctcttgcccagcctggagtgcagtggctcactgcaacttccgcctcctgggttcaagttcaagtgattctcctgccttagcctcttgagtagctgggattacaggtgcccactaccacgcccagctaatttttgtatttttagtagagacagggtttctctatattgaccacgctcaattgaactcctgacctcaggtgatctacctgcctcggcctcccaaagtgctgggattacaggcatgagccactgcgcctggcccttgtttgttttttagacagagtctcaggccaggcatgctggcttatgtctgtaatcccagcactttggaaggctgagttgggaggatgacttgagcccgggaggtggaggttgcagtgagcagagatggtgccaccgcactccagtctgggtgacaaagccacaccctgctcaaaaaaaaaaaaagaaagaaaaaaagaaaaaataacgtactctcaaagataaatatttctcactgttgagaatactagataaaacatatgtgactttaccataaaaagcaacccagttctaatcatgaagcccaaatctgacaagagaagttaattataagaagatgtcttattagaaagaaccagaagccaggtatggtggctgatgcctataatcccattgctttcggaggctgaggagggaagactgcttgagcccaggagttcaggaccagcctgggcaacatggcaaaaccccatatctacaaagaagtcccagctcctaagtagctggaactataggcacacaccaccacgccaggctaatttttgcatttttttgttgaaatggggtttggccatgttgcccaggctggtctcgaattcctgcactcaagcaatctgcccacctcagcctcccaaagtgctgggattacagtcataagccactgtgcccagccttttttttttttttttctaaaccattaagtcattcagggacatgtgcagtgatataagttttttgtttgggtcataaaaaagaaatggaaagagatctggagaaaactcatttgcatttttatattttggtgtgtttggattaaaaaacaccaatagtctcattattttatcatcatctaatgtgtaatttcaggttacttttagatatatcaagaaagcaatataatttaactgttggatcacatgtcttactcttactattttacaggtgtgtactcatgaggaacaagatattttacagcgtgactcaaacaagagccagaaactgctaaagaaactcatgtcaggtagacagcagtcttgtaattggatcactgggatgatgggtaccttgttgcgtctgtggttgtttctcttttctgtatcctggagtgcaagatgcagtttattcactcattctcagtttttttggggggttttttttgttttgttttgttttgttttgatgtggagtctcactcttatcacccaggctggagagcagtgacgcgatcttggcttactgcaacctccgcctcctgggttcaagtgattctcctgcctcaaactccctagtagctgggattgcaggcgtgtgccaccacgcgtagctaatatttacttttttttttttttttgagatggagtctcgctctgtcacccaggctggagtgtagtggcgctgatctcggctcactacaacctctgccttctgggttcaagcaattctcctgcctcagcctgccaagtagctgggactacaggcacatgccaccatgcctggctaatgttttgtattttttagtagagatggggtttcaccatgttagccaggatggtcttgatctcctgacctcatgatctgcccaccttggcctcccaaagtgctgagattacaggcataagccaccacgcccagccaatatttacatttttttagtaggggtggggttttgccatgttggccaggctggtcttgaactcatgacctcaagtgatctgcctgcctcggcctcccaaagcactgggattacagatgtgacccactgtgcctggcctattcactcattctataagcatctattttttagaaaaattattaagactacataacattgaacagcaaaataaataatagtattacattataatctaaataaaattaatatccatgtgaccatacttgtataaataactgaataagttaataaaatggagaaaggacaacttcttataaaagaattccagttaataaagtacaagaaatgaaaatactagaaaatcacaattagaacactacagtagtaactgccacaagcacgatccaccaatggatactgaaattattggttgaaagtttaagaacaagagatttacaatgtcatgaaagacaagaaaagattgaagaaacgtcacagatcagagtagattaaggatatatatgacgactaattgcagtatagatccagtattagatcctagaatagaaaaatgacattaatgggaaaaaaatgttaaaatccaaatagtctgtctatagtattataccaatattaatttcttagttttgataattgtactatggttttgtaagataagatggtaacattaaaggaagctatgtgaaggttatataggaactctacttattttctaattattttgcatgccttttatgcttgaaacacacctgacaaaaatggttaaggacattttttttttttttgagacggagtttcactctttttgcccaggctggagtgcaatggtgtgatctcggctcaccgcagccttcgcctcccaggttcaagcgattcttctgcctcagcctccccagtaggtgggattacaggcatgcgtcaccaccctgactaattttgtatttttagtagagacagggtttctccatgttggtcaggctggtcttgagctcccgacctcaggtgttccacccacctcagcctcccaaagtgctgggattaaggtgtgagccaccgcgcccggccaacatttttttttttttttctgagacggagttttgctcttgttgcccaggctggagtgcaatggcgcgatctcagctcactgcaacctccgccacttgggttcaagtgattctcctgcttcagcctctcaagtagctgggattacaagcgcatgccaccttgtccagctaatttttttgtatttttagtagagatggggttctcccatgttgactaggctggtctcgaactcctgacctcagatgatctgcccacctcaacctcccaaagtgctgagattacaggcgtgagccaccgcacttggtcagttaaggacattatttttatttatttattatttatttagttagttagttttgagatggagtctcgctctgtcgcccaggctggagtgtggtggcgtgatctcggctcgctgcaagctccatctcccaggttcatgccattctcctgcctcagcctcctgagtagttgagactggcgacgcccgccaccatgcccggctaatttttttgtatttttttagtatagacggtgtttcactgtgttagccaagatggtctcgatctcctgaccttgtgatccacctgccttggcctcccaaagtgctgggattacaggcgcgagccaccgcacccctatttttaattttttttagacggagtctcgctctttcgcccgggctggagtgcagtggcgcaatcttggctgactgcaacctctgcctcctgggttcaagcgattctcctgcctcagcctgccacgtagctgggactacaggcgtgcaccactatgcccagttaaattttgtatttttagtagagatggggtttcaccatgttggttggccatggtggtcttgatctcttgacctcgtgttccacccgcctcggcctcccaaagtgctggaattacaggcatgagccaccgcgcccagcagttaaggacactattaaaaagaaaaacaatatactcattactcactacttacgcaaatatttcattttgttcctaccttggttcatagtagtttttgttttatatcgacagatttgttgggattataatgtagtcatctgtgtaaaaacatttgtttttccattttccaactaattcataattagctgccatcttgctatatattcataattgtttttagtagctaaaaatagtcttttaacttggtttattatagtatgattatttcctaattactggatatttgtttccaaattttaaataatattacaaattgtcacctttattaacatagcttttgatttacttccttgtgataaattgctaagaataatgttactatgtcaaataatgtgtctttttttgacacttgagatgtatttgccagattattttgtcaaaatatataaatagccgggcatggtggctcatgcctgtaatcctagcactttgagaggccgagacgggcggatcacctgaggttgggagtttgagaccagcctgaccaatgtggagaaaccccgtctctaccaaaaacacaaaattagccgtgcatggtggcacatgcctgtaatcccagctactcaggagactgaggctgggaattgcttgaaccccggaggcggaggttgcagtgagccgagattgcaccattgcactccagcctgggcaacgagagtgaaactccatctcaaaaaaaaaaaatcatattaatctatagcaatattagcattgtacccagaatcctgttcactcttgagttttgacatttcaaatttgttttagttgtaaaaggctgtaattttattattttttatttttatttttatttatttatttgttttgagacagagtctctgtcacctaggctggagtgcagtggcgtgatcttggctcactgcaacttctgcctctcaggttcaagcaattctcctgcctcagcctcccaagtagctgggattgcgggcgcctgccaccacacccagctaatttttgcatttatagtagagacagggttttgccatgttggccaggcctcctgacctcaggtgatccacccaccttggcctcccaaaatgctgggattacaggcatgaaccaccgcgctcggcctgtaattttattattaatgaggttgcacatgcctctatgtttttttcaattagattttaaggtaatcattctgagaaaaaatagttctgattgtacgtactgtccttgtttgtttgtttgtttttagacggtctctgtcaggctggagtacattggtatgaacacattttactgcagcaattctcctgcctcagcctcccaagtagctggatctacaggcttgtaccaccgtgtctggctaatttttaaattgtttgtacagatgggctctcaccatgttgcccaggctagtcttgaactcctaggctcaagtgatcctcccacctcagcctcccaaagtgctgcaattacaggagtgagccactgcacacagccacctaacccattttggatcttgggtgtatcataatctatggctctcttttctgggatatacaaatttacaatatgctgtcaaagaagaaaacacaaccatggaatcaatgttggctttagagttatactcgagctcagattttgtttctatggtctaatttctttttcttttcttttttttttttttgagatggagtcttgctctgtcgcccaagctggagtgcagtggcacggtctcggctcactgtaagctcagcgtcccaggttcatgccattgtcctgcctcagcctcccaagtagctgggactacaggtgcctgccaccatgcctggctaattttttgtatttttagtggagacagggtttcaccatgttagccaggatggtctcgatctcctgacctcatgatccgcccgcctcagcctcccaaagtgctgggattacaggcgtgagccactgcacccggccactggtctaatttctaactgtgtgaactcagtaaatttatagtcatctctgaacttcagttactttatctgtaaaataaagataatacaaactgtcttacagggttattgcgaaaattaaataacatgtatactaagtgactcagcatttagcaggttctcattaaactgaaactgttcattttttctgccccttttgtgaaattttcttttttcttccattatttagtgtttagttttgataatataaacgtatatttaggctggcatagtggatcatgtctggaatcccagtactttgaggtgctgagttgggaggattgcttgaagccaggactttgaaaccagcctgagcaacatagtgagacccgcctctctacaaaaatttaaaaattcagacacaatggcatgtgcctgttgtctcagctattcaggaagctgaggtggaaggatcgcctgagcctaagagtttgagactgcagtgagctatgatcacactactgcactccagactgggcaacagcattagatcctgtcttgaaaaaacgtatatttaaaggtaatattgagcaaatgtcttcttcactgagaaggcatttttatgtcacattcttaaatactttggtgcccttagtgaaccaaatttttataaaggaagaaaagatccctgccatttattgaaaacctgtcatgtgtcaagcactgcttactgctgtacaggtaaggcctggactgtgtacttgttttctgttgaaatgaaggctccaggccatcaggccagaaccagatcttctgatgttttgttctttgttgcacactggtacaactaatttgtatttagaggctgacaccatttgacttccttattgaatttcaggagtggagaattctggaaaggtggacatctctaccaaggaccttcttcctcatcaagaattgcgaattaagtctggtctggagaaggctatcaagcataaagacaaactgttagagtttgacagaactaggtatgaaagggttagaataacaaatgctaagaaataaactagtccacagattctggccattattttggtacttgataccttctcaaagtggagtgtgaaagagtttatagcaaaagaagagccagatgctctacataggaggcctacatcttgttttttaatccacggttgaataatataggctcctatgaaaagaatcctgtcctgtagcattttttgattcctgacaaatgttagtatatcccctggacagttatgtgagttgacagaattcaccacttgttttacttgtagccattcattcagtcacctgtattagagtacgtgttatttgcaaactgttaggctgggctctggagaatctgtaaggaattgcctctgggagaacacaggttatgccctatcataggagggcatgatttacccttctcctttactttgactaaatttgttttttgattcaataatcggtatattaaaatacaactaaattagctttatactactgcattattattgtttagcccattgacttctgtttaggagatagatttatgataattctgtttttgacttcctccttacttacatttttttttcttttgaaaaaaatacttgttgaaaaccagttagtggtaaaaaatgtttggataggatttatatgctcccttctcaaatgactctgagggtcctcagagagaccctgaatctcttgtaacctgagagtctgttgctgacagtgtaatcttttgatgggacattcctgctacttccaaaccatttgctatgaatacatgagataagatttagaaaactattccttaaataaacccatcacaaggtgtataactcatattcactcttcatcctttcagtatcacatttcaccctactcagtagaacgtattattagaaatagaaatggaagccgggcacggtggctcacacctgtaatcccggcacttggggaggccgaggcaggtggatcacgagatcaggagatccagaccatcctggctaacacagtgaaaccccatctcactaaaaatacaaaaaaattagccaagcgtggtggcaggtgcctgtagtcccaggtactcgggaggctgaggcaggagaatggcatgaacccaggaggcggagcttgcagtgagccaagattgtgccactgcactccagcctgggcaacagagtgagactctgtctcaaaaaaaaaataataataatagaaatagaatgcacttactttttgataaacagaaagtggaaaagggtctctccctattgttgctgttttgctggtgtattcatggataccagtttcattatctaggtttttgtataagaccaatttccaccaggcacagtggctcacgcctgtaatcctagcactttgggaggccaaggcagacggattgcttgagcctgtaagtttgagagcagcctgggcagcatagcaaaaccctgtctgtacaaaaaatacagaaattagccaggagtaatgttacatgcctgtaatcccagctacttgggaggctgaggtgggagtattgattgagactgggaggtggaggttacagtgaggcgagattaatccagtgcactccagcctgggtgtcacagcgagattgtctcaaaaaaaaaaaaaaaattcctccagagtactgttaaaaaagtttctactctaagtctgctttatttttgttttttttttttgatccgccagcctcggcctcccaaagtgctggaattacaggtgtgagccaccgtgcctggcctaagaagacaaatttttttttttttttttttttttttttgagatggagtcttgctctgtcgcctgggctgcagtgcagtggcgccatctcggcttactgcaagctccgccccctggactcacgccattctcccgcctcagcctcctgagtagctgggactacaggcgcccgccactacgcccagctaatttttttgtatttttagtagagacggggtttcaccgtgttagccaggatggtctcgatctcctgaccttgtgatccgtccgcctcagcctcccaaagtgttgggattacaggtgttgagccactgtgcccggctgacaaaatttttttataattctagctgagtatgaaaatttgaagccaatatatgaatctaacttcagtatttcccttatgtctatttatgtcactatttgtaattatggggaaacgtaatcttaactggatttatgacattggagtaatcactcaacttctatgagccccaggtttataatatgtagaattagagagttagaccatcaagattccttccaggttttagtgtctctgtcagtatgatcttagagataggcctaattgtcatattttggaacttggccccagtgcattagtgagagcctgcaaagtggggtataggtaatgacatatagtagtagggtaatagaatgtcttaagagtaaatagttggccaggcacagtggctcacacctgtaatcctagcactttgggaggccaaggtgggtggatcacgaggtcaggagttcaagaccagccaagccaagatggtgaaaccccatccctactaaaaatacaaaaattagccaggcatggtgttgcgcctataatcccagctactcaggtggctgaggcagagaactgcttgaactgaggaggcagtcacaccactgcactccagcctgagcgacagaacgagactctgtctcaaaaaaaaaaaaaaggtaaatagttaagctacagaactgagacttaagcatagaactccagtaagcaaataagcctagcaagaataggctggatcccagttacagagggactaggatatttagtaagctgtcaaacttgaactcagatgcagcaaaaccaggctgaagcccagctttcagaaggtagaggctggactaatatgaaaggtagaaggaaaatgtattatggtgctgtgtcttttcttgcctgaggttgagataagttctaggagctgagcctacactggagataaaacatatgcagagcttgacctgattttggaacatatttgagatattaagttaccttgaaactgttttccaataatcggtccttatttgtcaacagatgacctaattaccatgtgttccctttttctcagtattcgaaggacccaagtcattgatgatgagtcagattactttgccagtgattctaaccaatggttgtccaa

SEQ ID NO: 14617 - DNA, 847 bp, Homo sapiens
ctggggaagatggcggtggctggggcggtgtccggggagccgctggtgcactggtgcacccagcagttgcggaagactttcggcctggatgtcagcgaggagatcattcaggaaatgaaggcaaaaaaggtcaattcatagaagaacttataaccaaatggcaaaagaatgatcaggagttgatttcggatcctttgcagcagtgcttcaaaaaagatgaaattttagatgggcagaaatcaggcgaccatctaaagcggggtaggaagaaagggagaaacagacaggaagttcctgcatttactgaacctgacacgactgcagaggttaaaacaccttttgatttggccaaggcacaagagaacagcaactccgtaaagaagaagacaaagtttgtcaatttatacacaagagagggacaggacaggcttgcagtcctgctccctggtcgtcacccttgtgattgcctgggccagaagcacaagctcatcaataactgtctgatctgtgggcgcattgtctgtgaacaagaaggctcaggcccttgcttattctgtggcactctggtgtgtactcatgaggaacaagatattttacagcgtgactcaaacaagagccagaaactgctaaagaaactcatgtcaggagtggagaattctggaaaggtggacatctctaccaaggaccttcttcctcatcaagaattgcgaattaagtctggtctggagaaggctatcaagcataaagacaaactgttagagtttgacagaactagtattcgaaggacccaagtcattgatgatgagtcagattactttgccagtgattctaaccaatggttgtccaa

SEQ ID NO: 14618 - DNA, 22050 bp, Homo sapiens
ggggcggtgcaagctggcggaacccgcgtgagagaggttggtgttgcgaagggaactagtccggtgcaggacgtggggcttttgcagctcagctggttccggctggggaagatggcggtggctggggcggtgtccggggagccgctggtgcactggtgcacccagcagttgcggaagactttcggcctggatgtcagcgaggagatcattcagtgagaacagttcgggtccaagcggggaaggagctctgggatgtgcactgcctgagcgaaccgggaagcggggaggactgaaaagttaagagagaaatgtgataaaggggctgcagtctgtagtctgtaggcgtcgaattttggcctccacctttgtagtttagtttctggaatagggtgtccggctccacagtctgccggtcgggcttttttcctgggaagacgcccaatctgtaataattagaaatgcaaggctgtcccaggagccagtttcctttctagagagaaggggcaggtcaaactgtatttcctaactttgaaccccttactcttttatttatttattattattgttgttattattgagacggagtctctgtcgcccaggctggcgtgcggtggcgcgatcttggctcactgcaacctccgccttccgggttcaggtgattcacctgcctgagcctcccaagtagctgggattacaggcacgcaccaccacacccggctaatttttaaaaatttttagtagagtcagtgtttcaccatgttggccaggctagtctccagctcctgatctcaagtgatccgcccgcctcgacctcccaaagtgctgggattacaggcatgagccaccgcacccagatatactctgaacattttagtcggcccaatctgagttgtgtcagtagagccaacagggtcagctgtgtcaataggacctagaatttaagtggaagcagcgtggtagagtacaaatagcttctgactctggagtctcaggttctatattctgttgtcgtttacctgttttagaacccaggacaacttaatttttctctctgtaccctggtttcttcatttataagattaatcattagtagagcttatcatgctttatgactcctatgaaatggagatggtgtacatgacttaatatctactttcaactgattgaagaacatttgttgcgctgctgttacacgccaggtgctggggtaacaaagacaagacagttgggttccccttcgttgatgagtgctgaggttggggaaatgaaggggcttgttggagcacaaaataaaggattctcattaagatttgaaaaactcggaaggtttattggaaaggataactttcacccgagaactaaggaatagacagaggtggcggtccaaagtgttcaggcaggggagaaaactacaaaaatgggacttgatcgaagaactgaaagtgttccttcatttgattccttggtcactgatgttgaaacctaaattgctgttctagggcttttgtaggaagtaagatgagtttctgagtttcggagaaaatagacttttggcaaggagacagttcaagtaggttattttaatggatttttttgaggccctaggagatggctcaagcccttattcccagcactttgggaggtagaggtgggaggattgcttgagactgggagttggagaccaccctgggcaacatagtgagaccctgtctctacagaaataaaaaaagtaaacaacaagataaaggattttttttaacactagaatagacaacaaaacaaaacagcgaaatcttatggtttggctttacccttgcttgaacgcagtcagattaagtatttagtagttttcaaacattttttaaagcagtggaatgctatcaaatgaaataatgaaactttgcaatatataaaacagaaaagtgttttttacgaatataagttcaaaattttcacttttttttttttttttttttgagacagattctgttgcccaggctggagtgcagtggtgcgatctcagctcgctgcaacctccgcctcccacgttcaagcgattctctttcctcagcccgagcagctgggattacaggcgcgcaccaccatgcctggctaatttttgtattcttactagagatggggtttcaccatgttgaccagggtggtctcgaactcctgacctcagatgatccaaccgcctcagcctcccaaagtgctgggattacaggcatgagccaccacgcctggcccaattttcacatatttattgtaaatatgtgtaatatattaaatatcaaatatattaaatattaaatatatcaaatattatattaaatatattaaatattaaatatatcaaatattatattaaatatattaaatatgtgtattatattaaatacagtattaaaaaaaaaagattgaggtggccaggcgcagtggttcatgtgtgtaatctaagcactttgggaggccgaggcagatggatcatttgaggtcaggaatttcagaccagcctggccaacatggcgaaacccccactctactaaaaatacaaaacttagtcgggtgtggtggagcgtgcaggtcatctcagttactcggaaggctgaggcaggagaatcccttgaaccgcggggcagaggttgcagtgagctgataccgcaccactgcactccatcctgggtgacagagtgagacctcgtctcaaaaaaaaaaaggaaaaaagaaagattgaggctatttttgataaattaacaatttgaaatagggtaagaatgatagatgtagtcttctcagtctagaatccagttgtattttgtttggattacacagtatcaagaaaatgcgttctcaggccaggcgtggtggctcacgcctgtaatcctagcactttaggaggccaaggcaggtggaccacctgaggtcaggagttcgagaccagcctggccaacatggtgaaaccccgtctctactaaaaatacaaaaaaaaattagccaggtatggtgacgggcacctgtaatcccagctactcgggaggctgaggcaggagaatcgcttgaacccaggaggcagaggttgcagtgagccaatatctcaccactgcactccagcctgggcgacagagcgagactccgtctcaaaaaaaaaaaaaaattatattccgcctgggaaggaggtcagtgcccgtcggcatgtattacgctaagatactatttgaagcatttgttaggtattcactagtattccacaacaggctattatgccatgatgaaagcatttgctgtgccttgcctggcatttaattgagaattacccaggtgtatgtactacagtaatgtactaacttgaacaattttatatgagtggactgaatttttgaaatagcacagagctattaacttttttttttttcttttttgagacggagtctcactctgtcgcccaggctggagtgcagtggcaggatctcggctcactgcaacctccacctcccaggttcaagcaattctcctgcctcagcctccccagtagcttggactacaggcgcgtgacaccatgcccagctaatttttgtatttttagtggagatgggattccaccaggttggccaggatggtctcggtctcctgacctcgtggtctgcccgcctcagcctcccaaagtgctgggattacaggtgtgagccactgcacccggccttaactttctaattagtgatacatttataagacataaatagctatccacagagttaacaaaataaactttggtccacaatctggatgagttcatattattttgataagatttggtatataacatatttggatgaatgttgttctttattataccttgttaagtagttaaaatgacatttattcaaatggttctgaaactctcttccctggttgtttgaaaaatactccagggttggccaggtgcagtggctcaacctgtaatcccagcactttgggaggctgaggtgggttgatcacttgaggtcaggagttcaagaccagcctgcccaacatggcaaaaccttgtctctactaaaaattcaaaaaattagccgggcgcagtggtgcacgcctgcaatcccagctactcaggaggctgaggcaggagaatttcttgaacctaggagccagaggttgcagtgagccaagatagcaccactgcactccagcctgggtgacagagtgagactctgtctcaaaaaaaaaaaaaaaaaaaaaaaagccaggtgcagcggctcagcctgtaattccagcactttggaaggctgaggcgggcaaatcacttgaggtcaggacttcgagaccagcctggccaacatagtgaaaccccgtctctactaaaaaaaagcaaaaacaaaacaaaacaaaacaaaaattagccgggtgtggttgtgcacgcctgtaatcccagctactcaggaggctgaggtaggagaatcgcttgaacctgggagatggagtttgcagtgagctgagatcgcaccactgcactccagcctgggagactaaatgagactctgtctgaaaaaacaaaaaaaccctccagggttaaatgatcccttgggattccttacagttttgcaagtctttgatagcagttaatcttttggtggggactggtaagtttggggatcaagatgattaaaatgtgtaagtcctgaaaaaccattgtcttttctaatccatagtaattagaagatgcctgtttttggggggtgtgtgtatgtgtgtgtgtatttttagtagagacggtttcaccatgttggccaagctggtctctaactcctgacctcaggtgatccacccgcctcagcctcccaaagtgctgggagccatcatgccccaccgtttttgcttgtttgagacagagtctcattctgttgctcaggctggaatgtagtggtgcaatcatggctctgcagccttcacctctgagactcaaaggatccttccacctcagcctcccaagtagctaggactacaggaacatgcctccatgcctggctaattttaatttttcttctagagacaaggtctccctatgttgcccaggctggtctcaaactcctgggcccaagtgatcctccagcttcagcctcccaaattgttgggattacaggcatgggctcccgaacccagacagaatattctcttagtgaggcccaaaggcacaaatttgtttacctctagagcataattctgcaattccaccattacactgtgaaaagaatgcagtacatacgataccaatcataggacaatttcataatttttaaaaagttaaaggatatagcactatggtaataatttttcttgcattccatatcattgtgtctgaattacagtttctgtgctgttttcagtgtcttgtatgttaattttttttttttttttttttgagaggaagtctcacttgcccaggctggagtgcagtggcacgatctcagctcactgcaagctctgtctcctgggttcacaccattctcctgcctcagcctcccgagtagctgggactacaggcgcctgctaccatacccgcctaatttttttttgttttttttttttagtagagacagggtttcaccgtgttagccaggatggtctcgatctcctgacctggtgatccgcccgcctcggcctcccaaagtgctgggattacaggtgtgagccaccgcgcccggccgcttatgtgttaatttataagtaatttttatcacttctttctcttgtaatgataagatgttcactgtagaaaactaaaaaaatcagaaaaggataaaaaagtaaactaaaattaccataatactacaacccagaaataagcactgtttctttctcttttttcccatatatattataatgtaatacattttaaaaacgtatttattgtaggaaaaaagaaaataaaaataaaactacctttaattccatcactcactagtaatcgttttggtgtataacgttgtttttttcctacacataagtgtatgtatgtatacattcataccagttaggatcgtatcgtatttctagcacctagcatagtacttggctcaaagtaaacactctaatagattaatgaatggtttttactacctagatctctgttaagattactgagaaacagtgtaagttagtcttgtttcaacaacttatatctttgcctcctgaggtacgttttgtcaattgagagtgctgaagagatacgagaatatgttactgatctcctccagggaaatgaaggcaaaaaaggtcaattcatagaagaacttataaccaaatggcaaaagaatgatcaggagttgatttcggatcctttgcagcagtgcttcaaaaaagatggtaagttaatgtaattatgcaaatgttgaaatattggtaagtgggcaggcttaaagaattattattattatttttttttttgccatcttgtgtttcttcacagctaacttaaacagagtcatatgtatacatatttttagttcggttctactcaatccgtaatgaatattgctctagttctttttcaacttagaaaatatcacaaaaaggccgggcgtggtggctcacgcctgtaatcccagcactttgggaggctgaggtgggcggatcacgtggtcaggagatcgagaccatcgtggctaacacggtgaaaccccatctctactaaaaatacaaaaagttagccaggcatggaggcaggcgcctgtagtcccagctactcaggaggctgaggcaggagaatggcgtgaacctgggaggtggagcttgcagtgagctgagatagcaccactgcactccagcctgggcgacagagcgagactccatctcaaaaaaaaaaaaaaaaaaggaaaatatcacaaaaaaatgtgtgtttacagacacaaatgtggcttcagaataatttgaaaaatttatacataaagaaacatttttcagtcgtgcatacctggatgtaagtaaagtgttgattgactatagtatgaatagcatttagagataactgcttaaatagtacaaaagataagcaccaaactaaataatctaagttattatgcaatctacaatatcagaattttgtttgttttgagacatggtctcactttcattgcccaggctggagtgatgtggcttgatcctagctcactgcagcctctgcttcctgggctcagatgattctcccacctcagcctcctgagtagctgggactacaggcgtgtgttaccacacctggctaatttttgtatttttttctagagatagggtctcactctgttgtccagggtgctctcaaactccttggttcaaacggtccacctgtctcggcctctcaaagtgctgggattatgcatgtgagccactaagcctgattttagaatatcagattttaatttaacttcttagtcccagccacttgtttgacttctttttcattgactgcactcttggaaatgatgatttaaatttaattctggtttgacaggaaaagataattaaaaatcttcctgatgatatcttgactctaaatattaagcatcaccttagtttattagctatattagttcaccaggaatcctcttatcaatctgtgtgtgtgtgtatttttttttttctatctttaaagaaattttagatgggcagaaatcaggcgaccatctaaagcggggtaggaagaaagggagaaacagacaggaagttcctgcatttactgaacctgacacgactgcagaggttaaaacaccttttgatttggccaaggtgagtgcttatagattgaagctttttctgactattggagaagaggaagtgactaatacatttcagagagcaaagtgtacaaattggtctagaatggcaatttttcaacaaatgcatgaattttaggtagaaaaagttacatatactcctttctatatggtagattttttgtttggcaacctgattagtattataaagacatctttgcttttttttttttttttccccaagacagagtcttgctctgtttccagtctggagtgcagtggtgcgatctctgctcattgcaacctccgcttcctgggttcaagtgattctcctgcatcagtctcccgaatagctgggactacaggcatgcgccaccatacccagctaattttcttttttttttttttgagacagagtctcgctctgtcgcccaggctggaatgcagtggtgtaatctcagctcaccacaacctctgcctcctgggttcaagcgattctcctgcctcagcctcccaagtagctgggactgcatgcgcacactgccacgcccagctaatttttcgtattttagtagagatggggtttcaccgagttgcccaagctggtcttgagctgctgagctcaggcaatccacccaccttggcctcccaaagtgctaggattacaggcgtgagccaccgcgcccagccctgtttttgaactttaaattaatggagctaaatagtgtgtactcttgtatctagctgcttttttttttttttttttttttttttttgagacggagtcttgctctgtcacccaggctggagtgcagtggcgcaatcttggcccactgcaacctctgcctccctggttcaaacgattctcctgcctcagtctcccaagtagctgtgattacaggcacacatgctaccacacccagctaatttttgtatttttagtagagatggggtttcaccatgttggccaggctggtcttgaactcctgacctcaagcaatctgcctgccttggcttctcaaagtgctgggattacaggcatgagcaactgtgcccagccagtgtctagcttctttcaatttatgagattcatctctactctgggcagctatactttctcattctcattgctacacagaattgtattaagtgaacacatcacaatttatccattctattatttggatagtttccaattccaatgcaacagtgaacattcttgtatgtatttttggtgaacatatttacacatttctgtttagtatatatctaggagttgaattgctgtgtcatagaacatgcatatgttcaacttcagttgatatgagtttgcagtcctgccagcagtgtatgagaggtctaattcttttgtatctttgctaacacttcatattttctctttttcagtttagccattctggttggtatttagtggtattgcattttgttttcgtttttgcattattttgacgactaatgaaattgagcactttttcatatgcctgttagtcattaggatatcttttgttatgaagttcttattaggttttttttgccctttttttgtttgagataggatctcgctctgttgcccagtggcgtcaactcgactaactgcaacctccaccttctgtttttctattgtattatctgtccttttcttagtggtttctgattaagtcaactttatatttatttttcctattttattgatggcccatatttccaaatctgtgaatatcatctgcttttagaggcattcttgtttcttatgatctccaatttagctgtgcttaaagatgtcatataaacagatttaactgctacatttaccctccactagctatagtaatgggctgaaagctactagcagaaaagacaaggtaattatcagctagtttttctagagtataacctttcctcagaaccttgattataactaatttgtatttcttcctttcactgccttctttcttggttcttggatagtatataagttgttactgaacagaacggagcattttctcccttgactttttacattgtcattaattatttgatgttattttgatgtctttgtacgataggcacaagagaacagcaactccgtaaagaagaagacaaagtttgtcaatttatacacaagagagggacaggacaggcttgcagtcctgctccctggtcgtcacccttgtgattgcctgggccagaagcacaagctcatcaataactgtctgatctgtgggcgcattgtctgtgaacaagaaggctcaggcccttgcttattctgtggcactctggtaaattatttcttttctattttattttactgtgctttgtgttaatacgcagagccagtcagatctcaagtaatttctctttttttgtttttttttggttgagacggagtctcactttgtcgcccaggctggagtgcagtggcacgatctcggctcgctgcaggctctgcctcccgggttcatgccattctcctgcctcagcctcccgagcagctggaactacaggtgcctgccaccacgcccagctaatttttttgtatttttattagagacgggattttacagtgttagccaggatggtctcgatctcctgaccttgtgatccgcccacctcggcctctcaaagttctgggattacaggcgtcagccaccgtgcctggctttctctttttcttagtaaatttcttccctaaaatatccagtgaactcgagtgtcagggatatgattagttagaaacccaaggttaggccaggcacagtggcacacgcctgtagtcccaacactttgggaagccaaggtgggttttgggaggctgaggtgggaggatcacctgagcccaggagtttgagaccagcctgggcaatgtaggaagaccctgtctctacaaaaaaaaaaaaaaaaaaaaaaaaaagtttttaattagctgggctgggtatggtggtgcacacctgtggtagcatttacatgaggggctgaaatgggagcttcacttgatcccaggacgtccaggctgcagtgagacagcgagtccttatctcagaagaaagaaagaaccccaggttatatcctagtactgaggccattaatgagaagggtttgagaacatacattgttgagagatccaagggctaggagccactgtgacagaatcctcagatcattatagcttctatttccaggattccaccttgtcatagctctgctttgtctgagagaatgacctcaagaatgcagtgataatgactcacagaaacccttaatgagctatctagaaagctaattttaccaagttgagctggctgtcagaagcaatgacatttggtgttggtaaaggcatccgttttatattacttcattttctcctcttttctgatggggcccttaattttttcttttttccttttttttttttttttttttttttttttgagacggagtctcactctgtcgcccaggctggagagcagtggcacaatctcggctcactgcaacctctgcctcctgggttcaagcaattctcctgtctcagcctccctagtagctgggacaacagggacacaccaccacgcccagctaattttttgtatttttagtagagacagggtttcaccatattggtcaagctggtctcagaactcctgacctcaggtgatccaaccatctcagcctcccaaagtgctgggattacaggtgtgagccaccgtgcctggtgggacccttaattttttcatatgctcagaataagctgatagacaatggatgacctgaaaaatgtagtgtctaccaataaaaatgtccattaaatggcagtaaatctcctcccatatggagctttctctttagagcaagctcttatagctgctggcaggaactctgtgtgtcattgaggcaactgctaggaagtattgtacagtgttttctcctaggtcccttgaagtaatgtaaagcagattggccttgaagtttgtttgtttgtttgttttttgagatggagtctcactctcttgcccagcctggagtgcagtggctcactgcaacttccgcctcctgggttcaagttcaagtgattctcctgccttagcctcttgagtagctgggattacaggtgcccactaccacgcccagctaatttttgtatttttagtagagacagggtttctctatattgaccacgctcaattgaactcctgacctcaggtgatctacctgcctcggcctcccaaagtgctgggattacaggcatgagccactgcgcctggcccttgtttgttttttagacagagtctcaggccaggcatgctggcttatgtctgtaatcccagcactttggaaggctgagttgggaggatgacttgagcccgggaggtggaggttgcagtgagcagagatggtgccaccgcactccagtctgggtgacaaagccacaccctgctcaaaaaaaaaaaaagaaagaaaaaaagaaaaaataacgtactctcaaagataaatatttctcactgttgagaatactagataaaacatatgtgactttaccataaaaagcaacccagttctaatcatgaagcccaaatctgacaagagaagttaattataagaagatgtcttattagaaagaaccagaagccaggtatggtggctgatgcctataatcccattgctttcggaggctgaggagggaagactgcttgagcccaggagttcaggaccagcctgggcaacatggcaaaaccccatatctacaaagaagtcccagctcctaagtagctggaactataggcacacaccaccacgccaggctaatttttgcatttttttgttgaaatggggtttggccatgttgcccaggctggtctcgaattcctgcactcaagcaatctgcccacctcagcctcccaaagtgctgggattacagtcataagccactgtgcccagccttttttttttttttttctaaaccattaagtcattcagggacatgtgcagtgatataagttttttgtttgggtcataaaaaagaaatggaaagagatctggagaaaactcatttgcatttttatattttggtgtgtttggattaaaaaacaccaatagtctcattattttatcatcatctaatgtgtaatttcaggttacttttagatatatcaagaaagcaatataatttaactgttggatcacatgtcttactcttactattttacaggtgtgtactcatgaggaacaagatattttacagcgtgactcaaacaagagccagaaactgctaaagaaactcatgtcaggtagacagcagtcttgtaattggatcactgggatgatgggtaccttgttgcgtctgtggttgtttctcttttctgtatcctggagtgcaagatgcagtttattcactcattctcagtttttttggggggttttttttgttttgttttgttttgttttgatgtggagtctcactcttatcacccaggctggagagcagtgacgcgatcttggcttactgcaacctccgcctcctgggttcaagtgattctcctgcctcaaactccctagtagctgggattgcaggcgtgtgccaccacgcgtagctaatatttacttttttttttttttttgagatggagtctcgctctgtcacccaggctggagtgtagtggcgctgatctcggctcactacaacctctgccttctgggttcaagcaattctcctgcctcagcctgccaagtagctgggactacaggcacatgccaccatgcctggctaatgttttgtattttttagtagagatggggtttcaccatgttagccaggatggtcttgatctcctgacctcatgatctgcccaccttggcctcccaaagtgctgagattacaggcataagccaccacgcccagccaatatttacatttttttagtaggggtggggttttgccatgttggccaggctggtcttgaactcatgacctcaagtgatctgcctgcctcggcctcccaaagcactgggattacagatgtgacccactgtgcctggcctattcactcattctataagcatctattttttagaaaaattattaagactacataacattgaacagcaaaataaataatagtattacattataatctaaataaaattaatatccatgtgaccatacttgtataaataactgaataagttaataaaatggagaaaggacaacttcttataaaagaattccagttaataaagtacaagaaatgaaaatactagaaaatcacaattagaacactacagtagtaactgccacaagcacgatccaccaatggatactgaaattattggttgaaagtttaagaacaagagatttacaatgtcatgaaagacaagaaaagattgaagaaacgtcacagatcagagtagattaaggatatatatgacgactaattgcagtatagatccagtattagatcctagaatagaaaaatgacattaatgggaaaaaaatgttaaaatccaaatagtctgtctatagtattataccaatattaatttcttagttttgataattgtactatggttttgtaagataagatggtaacattaaaggaagctatgtgaaggttatataggaactctacttattttctaattattttgcatgccttttatgcttgaaacacacctgacaaaaatggttaaggacattttttttttttttgagacggagtttcactctttttgcccaggctggagtgcaatggtgtgatctcggctcaccgcagccttcgcctcccaggttcaagcgattcttctgcctcagcctccccagtaggtgggattacaggcatgcgtcaccaccctgactaattttgtatttttagtagagacagggtttctccatgttggtcaggctggtcttgagctcccgacctcaggtgttccacccacctcagcctcccaaagtgctgggattaaggtgtgagccaccgcgcccggccaacatttttttttttttttctgagacggagttttgctcttgttgcccaggctggagtgcaatggcgcgatctcagctcactgcaacctccgccacttgggttcaagtgattctcctgcttcagcctctcaagtagctgggattacaagcgcatgccaccttgtccagctaatttttttgtatttttagtagagatggggttctcccatgttgactaggctggtctcgaactcctgacctcagatgatctgcccacctcaacctcccaaagtgctgagattacaggcgtgagccaccgcacttggtcagttaaggacattatttttatttatttattatttatttagttagttagttttgagatggagtctcgctctgtcgcccaggctggagtgtggtggcgtgatctcggctcgctgcaagctccatctcccaggttcatgccattctcctgcctcagcctcctgagtagttgagactggcgacgcccgccaccatgcccggctaatttttttgtatttttttagtatagacggtgtttcactgtgttagccaagatggtctcgatctcctgaccttgtgatccacctgccttggcctcccaaagtgctgggattacaggcgcgagccaccgcacccctatttttaattttttttagacggagtctcgctctttcgcccgggctggagtgcagtggcgcaatcttggctgactgcaacctctgcctcctgggttcaagcgattctcctgcctcagcctgccacgtagctgggactacaggcgtgcaccactatgcccagttaaattttgtatttttagtagagatggggtttcaccatgttggttggccatggtggtcttgatctcttgacctcgtgttccacccgcctcggcctcccaaagtgctggaattacaggcatgagccaccgcgcccagcagttaaggacactattaaaaagaaaaacaatatactcattactcactacttacgcaaatatttcattttgttcctaccttggttcatagtagtttttgttttatatcgacagatttgttgggattataatgtagtcatctgtgtaaaaacatttgtttttccattttccaactaattcataattagctgccatcttgctatatattcataattgtttttagtagctaaaaatagtcttttaacttggtttattatagtatgattatttcctaattactggatatttgtttccaaattttaaataatattacaaattgtcacctttattaacatagcttttgatttacttccttgtgataaattgctaagaataatgttactatgtcaaataatgtgtctttttttgacacttgagatgtatttgccagattattttgtcaaaatatataaatagccgggcatggtggctcatgcctgtaatcctagcactttgagaggccgagacgggcggatcacctgaggttgggagtttgagaccagcctgaccaatgtggagaaaccccgtctctaccaaaaacacaaaattagccgtgcatggtggcacatgcctgtaatcccagctactcaggagactgaggctgggaattgcttgaaccccggaggcggaggttgcagtgagccgagattgcaccattgcactccagcctgggcaacgagagtgaaactccatctcaaaaaaaaaaaatcatattaatctatagcaatattagcattgtacccagaatcctgttcactcttgagttttgacatttcaaatttgttttagttgtaaaaggctgtaattttattattttttatttttatttttatttatttatttgttttgagacagagtctctgtcacctaggctggagtgcagtggcgtgatcttggctcactgcaacttctgcctctcaggttcaagcaattctcctgcctcagcctcccaagtagctgggattgcgggcgcctgccaccacacccagctaatttttgcatttatagtagagacagggttttgccatgttggccaggcctcctgacctcaggtgatccacccaccttggcctcccaaaatgctgggattacaggcatgaaccaccgcgctcggcctgtaattttattattaatgaggttgcacatgcctctatgtttttttcaattagattttaaggtaatcattctgagaaaaaatagttctgattgtacgtactgtccttgtttgtttgtttgtttttagacggtctctgtcaggctggagtacattggtatgaacacattttactgcagcaattctcctgcctcagcctcccaagtagctggatctacaggcttgtaccaccgtgtctggctaatttttaaattgtttgtacagatgggctctcaccatgttgcccaggctagtcttgaactcctaggctcaagtgatcctcccacctcagcctcccaaagtgctgcaattacaggagtgagccactgcacacagccacctaacccattttggatcttgggtgtatcataatctatggctctcttttctgggatatacaaatttacaatatgctgtcaaagaagaaaacacaaccatggaatcaatgttggctttagagttatactcgagctcagattttgtttctatggtctaatttctttttcttttcttttttttttttttgagatggagtcttgctctgtcgcccaagctggagtgcagtggcacggtctcggctcactgtaagctcagcgtcccaggttcatgccattgtcctgcctcagcctcccaagtagctgggactacaggtgcctgccaccatgcctggctaattttttgtatttttagtggagacagggtttcaccatgttagccaggatggtctcgatctcctgacctcatgatccgcccgcctcagcctcccaaagtgctgggattacaggcgtgagccactgcacccggccactggtctaatttctaactgtgtgaactcagtaaatttatagtcatctctgaacttcagttactttatctgtaaaataaagataatacaaactgtcttacagggttattgcgaaaattaaataacatgtatactaagtgactcagcatttagcaggttctcattaaactgaaactgttcattttttctgccccttttgtgaaattttcttttttcttccattatttagtgtttagttttgataatataaacgtatatttaggctggcatagtggatcatgtctggaatcccagtactttgaggtgctgagttgggaggattgcttgaagccaggactttgaaaccagcctgagcaacatagtgagacccgcctctctacaaaaatttaaaaattcagacacaatggcatgtgcctgttgtctcagctattcaggaagctgaggtggaaggatcgcctgagcctaagagtttgagactgcagtgagctatgatcacactactgcactccagactgggcaacagcattagatcctgtcttgaaaaaacgtatatttaaaggtaatattgagcaaatgtcttcttcactgagaaggcatttttatgtcacattcttaaatactttggtgcccttagtgaaccaaatttttataaaggaagaaaagatccctgccatttattgaaaacctgtcatgtgtcaagcactgcttactgctgtacaggtaaggcctggactgtgtacttgttttctgttgaaatgaaggctccaggccatcaggccagaaccagatcttctgatgttttgttctttgttgcacactggtacaactaatttgtatttagaggctgacaccatttgacttccttattgaatttcaggagtggagaattctggaaaggtggacatctctaccaaggaccttcttcctcatcaagaattgcgaattaagtctggtctggagaaggctatcaagcataaagacaaactgttagagtttgacagaactaggtatgaaagggttagaataacaaatgctaagaaataaactagtccacagattctggccattattttggtacttgataccttctcaaagtggagtgtgaaagagtttatagcaaaagaagagccagatgctctacataggaggcctacatcttgttttttaatccacggttgaataatataggctcctatgaaaagaatcctgtcctgtagcattttttgattcctgacaaatgttagtatatcccctggacagttatgtgagttgacagaattcaccacttgttttacttgtagccattcattcagtcacctgtattagagtacgtgttatttgcaaactgttaggctgggctctggagaatctgtaaggaattgcctctgggagaacacaggttatgccctatcataggagggcatgatttacccttctcctttactttgactaaatttgttttttgattcaataatcggtatattaaaatacaactaaattagctttatactactgcattattattgtttagcccattgacttctgtttaggagatagatttatgataattctgtttttgacttcctccttacttacatttttttttcttttgaaaaaaatacttgttgaaaaccagttagtggtaaaaaatgtttggataggatttatatgctcccttctcaaatgactctgagggtcctcagagagaccctgaatctcttgtaacctgagagtctgttgctgacagtgtaatcttttgatgggacattcctgctacttccaaaccatttgctatgaatacatgagataagatttagaaaactattccttaaataaacccatcacaaggtgtataactcatattcactcttcatcctttcagtatcacatttcaccctactcagtagaacgtattattagaaatagaaatggaagccgggcacggtggctcacacctgtaatcccggcacttggggaggccgaggcaggtggatcacgagatcaggagatccagaccatcctggctaacacagtgaaaccccatctcactaaaaatacaaaaaaattagccaagcgtggtggcaggtgcctgtagtcccaggtactcgggaggctgaggcaggagaatggcatgaacccaggaggcggagcttgcagtgagccaagattgtgccactgcactccagcctgggcaacagagtgagactctgtctcaaaaaaaaaataataataatagaaatagaatgcacttactttttgataaacagaaagtggaaaagggtctctccctattgttgctgttttgctggtgtattcatggataccagtttcattatctaggtttttgtataagaccaatttccaccaggcacagtggctcacgcctgtaatcctagcactttgggaggccaaggcagacggattgcttgagcctgtaagtttgagagcagcctgggcagcatagcaaaaccctgtctgtacaaaaaatacagaaattagccaggagtaatgttacatgcctgtaatcccagctacttgggaggctgaggtgggagtattgattgagactgggaggtggaggttacagtgaggcgagattaatccagtgcactccagcctgggtgtcacagcgagattgtctcaaaaaaaaaaaaaaaattcctccagagtactgttaaaaaagtttctactctaagtctgctttatttttgttttttttttttgatccgccagcctcggcctcccaaagtgctggaattacaggtgtgagccaccgtgcctggcctaagaagacaaatttttttttttttttttttttttttttgagatggagtcttgctctgtcgcctgggctgcagtgcagtggcgccatctcggcttactgcaagctccgccccctggactcacgccattctcccgcctcagcctcctgagtagctgggactacaggcgcccgccactacgcccagctaatttttttgtatttttagtagagacggggtttcaccgtgttagccaggatggtctcgatctcctgaccttgtgatccgtccgcctcagcctcccaaagtgttgggattacaggtgttgagccactgtgcccggctgacaaaatttttttataattctagctgagtatgaaaatttgaagccaatatatgaatctaacttcagtatttcccttatgtctatttatgtcactatttgtaattatggggaaacgtaatcttaactggatttatgacattggagtaatcactcaacttctatgagccccaggtttataatatgtagaattagagagttagaccatcaagattccttccaggttttagtgtctctgtcagtatgatcttagagataggcctaattgtcatattttggaacttggccccagtgcattagtgagagcctgcaaagtggggtataggtaatgacatatagtagtagggtaatagaatgtcttaagagtaaatagttggccaggcacagtggctcacacctgtaatcctagcactttgggaggccaaggtgggtggatcacgaggtcaggagttcaagaccagccaagccaagatggtgaaaccccatccctactaaaaatacaaaaattagccaggcatggtgttgcgcctataatcccagctactcaggtggctgaggcagagaactgcttgaactgaggaggcagtcacaccactgcactccagcctgagcgacagaacgagactctgtctcaaaaaaaaaaaaaaggtaaatagttaagctacagaactgagacttaagcatagaactccagtaagcaaataagcctagcaagaataggctggatcccagttacagagggactaggatatttagtaagctgtcaaacttgaactcagatgcagcaaaaccaggctgaagcccagctttcagaaggtagaggctggactaatatgaaaggtagaaggaaaatgtattatggtgctgtgtcttttcttgcctgaggttgagataagttctaggagctgagcctacactggagataaaacatatgcagagcttgacctgattttggaacatatttgagatattaagttaccttgaaactgttttccaataatcggtccttatttgtcaacagatgacctaattaccatgtgttccctttttctcagtattcgaaggacccaagtcattgatgatgagtcagattactttgccagtgattctaaccaatggttgtccaaacttgagcgggaaaccttgcagaagcgagaggaggagctgagagaacttcgacacgcctctcgactttctaagaaggtcaccattgactttgcaggaaggaagatcctggaagaagaa

SEQ ID NO: 14619 - DNA, 761 bp, Homo sapiens
ggggcggtgcaagctggcggaacccgcgtgagagagggaaatgaaggcaaaaaaggtcaattcatagaagaacttataaccaaatggcaaaagaatgatcaggagttgatttcggatcctttgcagcagtgcttcaaaaaagatgaaattttagatgggcagaaatcaggcgaccatctaaagcggggtaggaagaaagggagaaacagacaggaagttcctgcatttactgaacctgacacgactgcagaggttaaaacaccttttgatttggccaaggcacaagagaacagcaactccgtaaagaagaagacaaagtttgtcaatttatacacaagagagggacaggacaggcttgcagtcctgctccctggtcgtcacccttgtgattgcctgggccagaagcacaagctcatcaataactgtctgatctgtgggcgcattgtctgtgaacaagaaggctcaggcccttgcttattctgtggcactctggtgtgtactcatgaggaacaagatattttacagcgtgactcaaacaagagccagaaactgctaaagaaactcatgtcagtattcgaaggacccaagtcattgatgatgagtcagattactttgccagtgattctaaccaatggttgtccaaacttgagcgggaaaccttgcagaagcgagaggaggagctgagagaacttcgacacgcctctcgactttctaagaaggtcaccattgactttgcaggaaggaagatcctggaagaagaa

SEQ ID NO: 14620 - DNA, 10578 bp, Homo sapiens
caaggagatctctgaatctcctgactcttggttgtttgtgataaaagagcattccgttctgattcttctgggaggatttcaggtatccttttttttttttttttttttaatgaagttgttcccactataggaaatcagagatggcaggcaatagactgtataatgctgtactaaggattgtagaaaggtgaaggtttgttcttgcttgttgagcataatcctctttacctgtgaaatggaaagtagtatcatcagaatgttgaggtgaaatctgggacatcttctgttctccttaaattcaaagcttgtcccaactatcctgaactttttatttttatatttcacagtttccagacatcagtcaagagtctgattctccatttgttttcatctgcaaaaatcctcaggaaatggttgtgaagtttcctattaaaggaaatccaaaaatctgtaagtcatgattttttttctttaagactagtcaagtgcagtagtaaggaatggggaaaaaagtagaacaaggagttcaatctataactgactgtgaacaatcagttgaggtaacccactacctttggatcagcctgtaagtcataatctttgatggtctaattttcttttcttttcttttctttttttttgtcttgcatcttacttgtctagatttttataaaatcttcccttttggccgggcacggtggctcatgcctgtaatcccagcactttgggaggctgaggcaggcggatcacaaggtcaagagatcgagaccatcccggccaacatggtgaaacccccccgtctctactaagattaccaaaaaaaaaaaaaaaaaattagctgggtgtggtggcgtgcgcctgtagcacctgtagtgcctgtagcgcctgtagtctcagctgcttggaaggctgaggcaggagaatcgcttgaacctgggaggcggaggttacagtgagctgagattgtgccattacactccagcctggtaacagagcgacactcagtctcaaaaaaaaaaaaaaaaaaaaaaaatttattgtgttctgtgtgtccctagtgttggaggcttaatataattatacttatcaataactttatgttaggttaactacagtaaagcctttccaaagtataccttgatccacaattaccggcatagtaagtcgctctaaacttcaatttcagatcctattacattaaaatgctatttgtcagccaaaagagtgttttgccccactgtactgctcattaaaggaagtagtaaggcagtgcagtggcaacattgtcatttatccatttattcattgttcagtattcaactcaagaataagggctgggcatggtggctcatgcctataatcccagcactttgggaggctgagacgggtggatcatctgaggtcaggagttcgagaccagcctggccaacatggtaaaaccccgtctctactgaaaatacaaaaaattagcagggcatggtggtgggcacctgtaatcccagctactcgggaggctgaggcagaagtatcgcttgaactcgggaggcagaggttgcagtgagccgagatcacgccactgcactccagcctaggcaacaagagcgaaactccatctcaaaaaaaagacttaacattttaagtatttattattgaacatctattttagagacaccacttcccacatttctcttcattattggttcccagagtacagccttggctctcttgcttttcattcctttttaacattttttttttttttttgagacagagtctcactctgtctccgaggctggagtgcagtggcccaatctcggctcactacaacctccacctcctgggttcaagcgattctcctgcctcaccctcccgagtagctgggactacaggcatctgccaccactcctggctaatttttgtattttagtagagatggggtttcaccatattggccaggctggtctcgaactcctgaccttgtgatccgcctgccttggcctcccaaagtgctgggattacaggcgtgagccactgtacctggcctcattttaaaaatttttattagttaattgattgagacagggtctagctgggacccatcttttcttcctctgtcctagagcagcctcttgtatttcaaagcagtctcaaaacgcatatagtgggccgggcgtggtggctcacgcctgtaatcccaacactttgggaggccgaggcaagtggatcacaaggtcaggagatcgagactaccctggctaacacagtgaaaccccatctctactaaaaatacaaaaaattagccaggcatggtagcgggcacctgtagtcccagctactcgggaggctgaggcaggagaatggcgtgaacctgggaggcggagcttacagtgagtcgagattgcaccactgcactccagcctgggcaacagagcgagactccgtctcaaaacaaaacaaaacaaaaacaaaaacaaacaaaaaaaacacacatatagtagtggtgtcctccctgcctaacatccttggaaaagcaacatcagcaactctcccatttgctcatgtcagttaccattttgtgcctctttgtcattgctttcccattgtgtgaattgcatgattctagggcatgcattgtcctcactggtgcgaaactctccctcatccaataccttggggaccaactagccattttataaatctatgccctagagaagtacttctcaaactataatgtaactaaaaatcacctagcaagctgttaaaacacaggttcctcaatcctgctctcaggtgatactgatgctgttggccagctggctgtactttaagtaacactgctttcaatcacaaaatgaaatgcttagagtaggaatttatattaatgtatatttactgcaaaattcaggcaacatcttgattgataagatcctaagattcctacacattcgaagatctgaaccaagttgcccttaactgacacaaattatttacttcagacggtactccagttggtggcccagtagccctggaaatcctttcttttctccactattaaggatttatttatttttgagatagggccttggcctgtcacccagcctggagtgcagttgtgcaattatggctcattgcagcctccacctcctgggataaagtaatcctcccacctcagcccccaaagtagctgggactacaggtatgtgccaccacgcccagataatttttaaatttttggtagagatgaggtctcactatgttgcccagtttggtctcaagtggatcctcctgccttggcctcctaaagcgttaggattacaggtgtgagccaccacacctggccctgtttaggatttagatctccttttaccctccctctgttttggttctagcagtctaccccttcctcctccatttcattctcaccttcctctaggtactggtggcaacactggtggtaggaggaaacggtggtaaatcctctctctcaaacccactgttaattgatctttagtcctacttcccttttcgtagcttcttcccctggcttggttttcatctgctgcctaaagtcctgtgagaaaatgttctgtgtagagtttagctatttctctgaaatgttttactttagtactttctctacaccttcaggacctatagggccttcatttttctccataaggtttcatgatggtgaggggagtgacattcttaggagaaacctttaataacttcctatctttttcgtattgtttctgttagttaatggtagactagacaaggttaaaaattgcacagaaacaataggtagtgaaaattttattttgagatggggtctcactctgttatccaggttggagtgcagtggcacaatctcaattcactgcaacttccatctcccaggctcaagtgatcctcccacctcagcctcctaagtagctgggaccacaggcacgcgcctccatgcttggctaattttttgtatttttgctagaaacggggtcttgccatgttgcccaggctggtcttgaactcctgagctcaggtgatccatccaccttggcctctctaaaaaccttctactctgccagaactctcttgccttaggtcctaggggataacctccagtagtttaagctggaaaagtctttaatcccagttacattggggaaaatacatacctgcctcttaatttgaaatggttatcacactttcccctagatatattattacatgaagtgattaagtttaatagcaataatattaatacttggtcaggcacagtggctcatgtctataatcccagcactttaggaatctgaggcaggaggatcacttgaagccaggagtttgagaccagcctgagtaacatagcgagaccctgtctctacaaaaaaataaaaaaaattattccagtgtggtggcgtgtgcctatagtgccagctacttgggaggctgaggcagaaatattgcttgagcccaggagttcaaggctgcaatgggctatgattgcaatactgcactccagcctgggtgacacagcaagaccctgtctctaaaaaaaaaaaattaattaatagtctgctttacttataacactgtggcttaaatgtttgttttttttgtttgtttttgttttttttttttgtgggatgtcttaggaacctagccaccctttacagattagttctatgataaatatattcgaaattccaaacttttatttttgagacaggggtctcactgtgttgcctagactggccttgaactctgggctcaagagatcttcctgcctgagcctcccaagtagctggaactactatgtagatatacactactatgatgcccggcttcaggttccaaacttcagacttgcaaataaactttcagaatatgacccatttatgtgttgtatcatatatatatatataaaaaatatatggatgtataaatgccttaaattaaaggtgtatactttgatttgtttgtttttggaagtgtaaatttgagtttgcttgaccttaaggtaattgtgtctcctcaaattgagataattcagaaaagagcaatatacaatagggtatcacctggctctgtgtctgctttatataggttgaatactcagataaaggaaattttttaaatttagcaacatgctctataaactcatgcaccttatatcttttgcaaaccatgtgaaaattcctatgagagttatatcaattaatgacaaatattttttccccttttaacttcttgcccatctgctgcacatgcatttgactttcttttaggcactatgattgaggatgtggtttaacactgaaacgattaggtactaaatgtaaaaatattggggaaatacagaaactaagtgttacaccctaccatgaagaggatgtattgtatgtcactatggttcactatccagatcctgatcttagaagcccagggtgggctgggcgcagtggctcacgcctgtaatcccagcactttgggaggccgaggcggatcacaaggtcaggagatggagaccatcctcgctaacacggtgaaaccccgtctctactaaaaatacaaaacattagccagacgtggtggcaggtgcctgtagtcccagctactcgggaggctgaggcaggagaatggcgtgaacccgggaggcggagcttgcagtgagtcgagatggcgccactgcactccagcctgggcgagagtgtgagactccgtctcaaaagaaaaaaaaaaaaaaaaaaaaagaaagaaaggaaaaaaaagaaaaaagaagcccagggtgaactagaactcagagctttgagttcctgcaatctaaggacagtcatgatgactgctgctttccacaagaagccccggtcccttaccatcattgcccacagctggcccaagagttgcctctattggcaatcactctgttagacgttaaggatacaaaatgtccatgattgtaaggagttcacagattgttggcaaatgtctgattttttttaggcagcctagaggatgaaagaacgtctgaattcctgggaatatcctggaaatccttgttcctcttgtatcttgtttctcctattagctttccattttagacatcatcattgaagccagagattagtctgcctacaattgagtgttttattctgatgggttgatcttacctgagctggtctcacttgagggctttcataatcatactggagtttcctgaaacgtaaaataggaatgttctcattcagtaaagctttaagaatgtgaagaaaatgatatgtctttttttcttatgaagaatctgaaataaataataattaaaagacttgcctggggttatatggtaaatgaaaggtgaaattgaaaccataactaagaaacctaactcccaagcctcagcgtaaataatataaccacccttacttcttcaggagactttgaatttatgaagccccccacttttttttttgagatggggtcttgctctgttgcccaggctggcatgcactggtgagatctcagctcactgcaacctctgcctcctgggttcaagcaattctcctgcctcagcctcccgagtagctgggattacaggcgagcaccatcacacccaactaatttttgtatttttagtagagacggggtttcgccatgttggtcaggctggtcttgaactcctgacctcaagtgatttgcttgccttggcctccgaaagtgctgggattacaggcatgagccacacctggcctgaaacactttaatatatattatttcagttataggctgagcatcccaaatctgatctttttttttttttttttttttttggggagtgggtctcactctgtcacccaggctgaagtgtagtggtgtgaactcggctcactgcaacctctgcctccctggctcaagcaattctcccacctcagcctcccaagtagctgggactataggcctgcaccaccatacccggctaattttttattgcttttatttttattaattttttttttttgagttttactcttgttgcccaggctggagtgcaatggtgcgatcttggctcactggaacctccaactcctgggttcaagtgattctcctgcctcagcctcttgagtagctgggattacagacaccctccaccacgcccaactaatttttgtatttttagtagagacgggtttcaccattttgaccaggctggtcttgaacttctgaccttaggtgatctgcctgtctcggcctcccaaagtgcagggattacaggagtgagccactgtgcccggcccaaaaaaaaaaaaaaattttttttttagacaggtctcactctgttgcccatgctggagtgcaatggcatgagatcttggctcactgcaacctccacctcctgggctcatgccatcctcctgtctcagcctcctgagtagctgggactccaggcttgcaccaccatacccagcaaatttttctgggggttgaggggggtttggtttttttgttagagacagtatttcaccatgttggccagactggtctggaacttctgggctcaagcgatctgcctgccttggcctcccaaagtactgggattgcaggcatgagccaccatgccctgccacaaatctgaaaatctgaaatgcaaaatctaaacctttttgagcttcaacatgatgctcaaaggatatgcctcattggagcatttgggattttggatttctggatttgggatacttaaccagtaaatatatataatgcaaatattccaaaatccaaaaaaatctgaaatttaaaacacttctggtcccaagcattttagataaggaatactgaacctgtagttatttgattaaaggactcagtgtatgtgtaatacacgtagctcagtgactggtctatagaatgcacttcatgttagctataatcttcttaataattctgtgtgttagtaagggctttttcctcctttcattttacaggtttatggaagttgttttactcaaatctttctggcacaaggtttcctgttcttttcactgtatcagattgcctcaggaacaaattattccaatttacatttcatttctagggcacaatatcatagagttggaaggaaccttcagtattgtatagtccagtttcctcttagagttgataaaaattgaggacaagagtgactaggtaacatactcaaggttatacagctaggaagtcttaggattaaaactgagtttttcagccaggtgtggtggctcacgcctgtaatcccagcactttgggaggctgaggtggggtgggggattgcttgaggtcaggagttcaagaccaacttggccaacgtggtgaaaccctatctctaccaaaaaataaaaaaattagctgggcgtgatggcacacacctgtagtcccagctacaggggaggctaaggcagaattgcttgaacctgggtggtgggggttgcagtgagccgagattatgccattgcactccagcctgggcgacagagactctgtctcaataaataaagtctttcaacttatgcaatacagacgactggatgtctggagtcctagatggaattctaaattctgtcccagcttgtcctaaaaagctgaatgggactcacctctgggtaccaccacctttacaatctgtactcttacatttgtctgatatctgctatttgtggttacttagtactgtctataatataaaggttttgaaatttgtagtgtctacctttgtttaattcatttggtgagagcatttattgagcgtctaccatttggcagtcactatggtagtgttagggatacaaaggctgacttgccttgtaacagggctctttgccagatggctggcacatgttcaggttttcagccaggcagcataagggataaaagaactcctaaatccctgggaatgccctatgctctaaagccctaattaaaatcaacagcattgtgattattgttaaatgatattcagggtatcacttagtgatggtttctgaggaagcccagaaaaggacataatgttcttctagaagcaggtgtagcctaaaagaaaagagagagagagataaacagacaaagagagatatacagacagactaatgttgggcaagaggagatttaagtaaacagagaaacttgttaggctgaggctaatttttctcacagtcttactgtgccatggtcagtacatgtattcttaacttaattggacaagtgaaaatactgaaatccagagaaattgaatgactcgcctaggtcacacagctagttaataccagagaagggtggactagaacctgggtcttctgatttttagtccagtgctctgttatgcccaattgctgcaacaaatgaaaatgacaacatattgagaggcagtgattatgggcatgggcctgtggtatactcagctgcctttgaaggggaagactccttgttttttttttttgttttcttttttttttttagtgctgagactgaactgaattatgtttctattttcagcataagcatcactattgacttagatgagactttttgtgggagaaagcaaactgccaaactgttctcaggccagacagacaggaattctcttaagattctcctaatgagatggatggttcctaaggctgctaccactgagccaaactctatcctggtagatctgagaagaggtcagagaccacatcagtaatatacctttcattagggtcacctgggatgggaaggttgcttgttttctaagtttaacacttagagagtcatatagcctatgacctttaaccttcttagctggtgataggggccctttgtcagtaaagcattcatgtggattctattccactgttgcaggtcactccccctattaagtctgaggcagcaaaggggtgttgaactgcttttctcactgtgaaggttcatgcattatgctcagccagttaacaggtcacaggaatggatttcccactgtgaaatgcctgcctttattgcatgtgtatattcttaaaaatttgccgtagcatcaaaccccttaaaaatgtgattatttcttttctagtagctacaaaattagaaataattaacttcttagattcttaggacaaatactcattgtatgcatttgtgtatccttgtacagtgttcccattgcttccttattcttacagaatgaaactctgaagtttggaagtgtctgagtcctgaagtaagataattgaatgtgacaggaacacagtaaccagaagacctgggaggctgcaaaagatttgcattgcaaatacaaaaataaataatgagacttatttttctcccttacagggaaattggattccaagatccatcaaggagcaaagaaggggttaatgaagcagaataaagctgtctgacccaggagaaaaggaactatacagcatagtggagttttgtgtactaaaattgctatctactggtcctttggaattgaagtagtagaaacctaaaggcttggcgtcaggcttgaatatctcagaacttaaactcttaccaaaatctgtatatttttcttaaggagtgggattc

SEQ ID NO: 14621 - DNA, 425 bp, Homo sapiens
caaggagatctctgaatctcctgactcttggttgtttgtgataaaagagcattccgttctgattcttctgggaggatttcagtttccagacatcagtcaagagtctgattctccatttgttttcatctgcaaaaatcctcaggaaatggttgtgaagtttcctattaaaggaaatccaaaaatctggaaattggattccaagatccatcaaggagcaaagaaggggttaatgaagcagaataaagctgtctgacccaggagaaaaggaactatacagcatagtggagttttgtgtactaaaattgctatctactggtcctttggaattgaagtagtagaaacctaaaggcttggcgtcaggcttgaatatctcagaacttaaactcttaccaaaatctgtatatttttcttaaggagtgggattc

SEQ ID NO: 14622 - DNA, 10013 bp, Homo sapiens
cttgcggggcggtgcaagctggcggaacccgcgtgagagaggttggtgttgcgaagggaactagtccggtgcaggacgtggggcttttgcagctcagctggttccggctggggaagatggcggtggctggggcggtgtccggggagccgctggtgcactggtgcacccagcagttgcggaagactttcggcctggatgtcagcgaggagatcattcagtgagaacagttcgggtccaagcggggaaggagctctgggatgtgcactgcctgagcgaaccgggaagcggggaggactgaaaagttaagagagaaatgtgataaaggggctgcagtctgtagtctgtaggcgtcgaattttggcctccacctttgtagtttagtttctggaatagggtgtccggctccacagtctgccggtcgggcttttttcctgggaagacgcccaatctgtaataattagaaatgcaaggctgtcccaggagccagtttcctttctagagagaaggggcaggtcaaactgtatttcctaactttgaaccccttactcttttatttatttattattattgttgttattattgagacggagtctctgtcgcccaggctggcgtgcggtggcgcgatcttggctcactgcaacctccgccttccgggttcaggtgattcacctgcctgagcctcccaagtagctgggattacaggcacgcaccaccacacccggctaatttttaaaaatttttagtagagtcagtgtttcaccatgttggccaggctagtctccagctcctgatctcaagtgatccgcccgcctcgacctcccaaagtgctgggattacaggcatgagccaccgcacccagatatactctgaacattttagtcggcccaatctgagttgtgtcagtagagccaacagggtcagctgtgtcaataggacctagaatttaagtggaagcagcgtggtagagtacaaatagcttctgactctggagtctcaggttctatattctgttgtcgtttacctgttttagaacccaggacaacttaatttttctctctgtaccctggtttcttcatttataagattaatcattagtagagcttatcatgctttatgactcctatgaaatggagatggtgtacatgacttaatatctactttcaactgattgaagaacatttgttgcgctgctgttacacgccaggtgctggggtaacaaagacaagacagttgggttccccttcgttgatgagtgctgaggttggggaaatgaaggggcttgttggagcacaaaataaaggattctcattaagatttgaaaaactcggaaggtttattggaaaggataactttcacccgagaactaaggaatagacagaggtggcggtccaaagtgttcaggcaggggagaaaactacaaaaatgggacttgatcgaagaactgaaagtgttccttcatttgattccttggtcactgatgttgaaacctaaattgctgttctagggcttttgtaggaagtaagatgagtttctgagtttcggagaaaatagacttttggcaaggagacagttcaagtaggttattttaatggatttttttgaggccctaggagatggctcaagcccttattcccagcactttgggaggtagaggtgggaggattgcttgagactgggagttggagaccaccctgggcaacatagtgagaccctgtctctacagaaataaaaaaagtaaacaacaagataaaggattttttttaacactagaatagacaacaaaacaaaacagcgaaatcttatggtttggctttacccttgcttgaacgcagtcagattaagtatttagtagttttcaaacattttttaaagcagtggaatgctatcaaatgaaataatgaaactttgcaatatataaaacagaaaagtgttttttacgaatataagttcaaaattttcacttttttttttttttttttttgagacagattctgttgcccaggctggagtgcagtggtgcgatctcagctcgctgcaacctccgcctcccacgttcaagcgattctctttcctcagcccgagcagctgggattacaggcgcgcaccaccatgcctggctaatttttgtattcttactagagatggggtttcaccatgttgaccagggtggtctcgaactcctgacctcagatgatccaaccgcctcagcctcccaaagtgctgggattacaggcatgagccaccacgcctggcccaattttcacatatttattgtaaatatgtgtaatatattaaatatcaaatatattaaatattaaatatatcaaatattatattaaatatattaaatattaaatatatcaaatattatattaaatatattaaatatgtgtattatattaaatacagtattaaaaaaaaaagattgaggtggccaggcgcagtggttcatgtgtgtaatctaagcactttgggaggccgaggcagatggatcatttgaggtcaggaatttcagaccagcctggccaacatggcgaaacccccactctactaaaaatacaaaacttagtcgggtgtggtggagcgtgcaggtcatctcagttactcggaaggctgaggcaggagaatcccttgaaccgcggggcagaggttgcagtgagctgataccgcaccactgcactccatcctgggtgacagagtgagacctcgtctcaaaaaaaaaaaggaaaaaagaaagattgaggctatttttgataaattaacaatttgaaatagggtaagaatgatagatgtagtcttctcagtctagaatccagttgtattttgtttggattacacagtatcaagaaaatgcgttctcaggccaggcgtggtggctcacgcctgtaatcctagcactttaggaggccaaggcaggtggaccacctgaggtcaggagttcgagaccagcctggccaacatggtgaaaccccgtctctactaaaaatacaaaaaaaaattagccaggtatggtgacgggcacctgtaatcccagctactcgggaggctgaggcaggagaatcgcttgaacccaggaggcagaggttgcagtgagccaatatctcaccactgcactccagcctgggcgacagagcgagactccgtctcaaaaaaaaaaaaaaattatattccgcctgggaaggaggtcagtgcccgtcggcatgtattacgctaagatactatttgaagcatttgttaggtattcactagtattccacaacaggctattatgccatgatgaaagcatttgctgtgccttgcctggcatttaattgagaattacccaggtgtatgtactacagtaatgtactaacttgaacaattttatatgagtggactgaatttttgaaatagcacagagctattaacttttttttttttcttttttgagacggagtctcactctgtcgcccaggctggagtgcagtggcaggatctcggctcactgcaacctccacctcccaggttcaagcaattctcctgcctcagcctccccagtagcttggactacaggcgcgtgacaccatgcccagctaatttttgtatttttagtggagatgggattccaccaggttggccaggatggtctcggtctcctgacctcgtggtctgcccgcctcagcctcccaaagtgctgggattacaggtgtgagccactgcacccggccttaactttctaattagtgatacatttataagacataaatagctatccacagagttaacaaaataaactttggtccacaatctggatgagttcatattattttgataagatttggtatataacatatttggatgaatgttgttctttattataccttgttaagtagttaaaatgacatttattcaaatggttctgaaactctcttccctggttgtttgaaaaatactccagggttggccaggtgcagtggctcaacctgtaatcccagcactttgggaggctgaggtgggttgatcacttgaggtcaggagttcaagaccagcctgcccaacatggcaaaaccttgtctctactaaaaattcaaaaaattagccgggcgcagtggtgcacgcctgcaatcccagctactcaggaggctgaggcaggagaatttcttgaacctaggagccagaggttgcagtgagccaagatagcaccactgcactccagcctgggtgacagagtgagactctgtctcaaaaaaaaaaaaaaaaaaaaaaaagccaggtgcagcggctcagcctgtaattccagcactttggaaggctgaggcgggcaaatcacttgaggtcaggacttcgagaccagcctggccaacatagtgaaaccccgtctctactaaaaaaaagcaaaaacaaaacaaaacaaaacaaaaattagccgggtgtggttgtgcacgcctgtaatcccagctactcaggaggctgaggtaggagaatcgcttgaacctgggagatggagtttgcagtgagctgagatcgcaccactgcactccagcctgggagactaaatgagactctgtctgaaaaaacaaaaaaaccctccagggttaaatgatcccttgggattccttacagttttgcaagtctttgatagcagttaatcttttggtggggactggtaagtttggggatcaagatgattaaaatgtgtaagtcctgaaaaaccattgtcttttctaatccatagtaattagaagatgcctgtttttggggggtgtgtgtatgtgtgtgtgtatttttagtagagacggtttcaccatgttggccaagctggtctctaactcctgacctcaggtgatccacccgcctcagcctcccaaagtgctgggagccatcatgccccaccgtttttgcttgtttgagacagagtctcattctgttgctcaggctggaatgtagtggtgcaatcatggctctgcagccttcacctctgagactcaaaggatccttccacctcagcctcccaagtagctaggactacaggaacatgcctccatgcctggctaattttaatttttcttctagagacaaggtctccctatgttgcccaggctggtctcaaactcctgggcccaagtgatcctccagcttcagcctcccaaattgttgggattacaggcatgggctcccgaacccagacagaatattctcttagtgaggcccaaaggcacaaatttgtttacctctagagcataattctgcaattccaccattacactgtgaaaagaatgcagtacatacgataccaatcataggacaatttcataatttttaaaaagttaaaggatatagcactatggtaataatttttcttgcattccatatcattgtgtctgaattacagtttctgtgctgttttcagtgtcttgtatgttaattttttttttttttttttttgagaggaagtctcacttgcccaggctggagtgcagtggcacgatctcagctcactgcaagctctgtctcctgggttcacaccattctcctgcctcagcctcccgagtagctgggactacaggcgcctgctaccatacccgcctaatttttttttgttttttttttttagtagagacagggtttcaccgtgttagccaggatggtctcgatctcctgacctggtgatccgcccgcctcggcctcccaaagtgctgggattacaggtgtgagccaccgcgcccggccgcttatgtgttaatttataagtaatttttatcacttctttctcttgtaatgataagatgttcactgtagaaaactaaaaaaatcagaaaaggataaaaaagtaaactaaaattaccataatactacaacccagaaataagcactgtttctttctcttttttcccatatatattataatgtaatacattttaaaaacgtatttattgtaggaaaaaagaaaataaaaataaaactacctttaattccatcactcactagtaatcgttttggtgtataacgttgtttttttcctacacataagtgtatgtatgtatacattcataccagttaggatcgtatcgtatttctagcacctagcatagtacttggctcaaagtaaacactctaatagattaatgaatggtttttactacctagatctctgttaagattactgagaaacagtgtaagttagtcttgtttcaacaacttatatctttgcctcctgaggtacgttttgtcaattgagagtgctgaagagatacgagaatatgttactgatctcctccagggaaatgaaggcaaaaaaggtcaattcatagaagaacttataaccaaatggcaaaagaatgatcaggagttgatttcggatcctttgcagcagtgcttcaaaaaagatggtaagttaatgtaattatgcaaatgttgaaatattggtaagtgggcaggcttaaagaattattattattatttttttttttgccatcttgtgtttcttcacagctaacttaaacagagtcatatgtatacatatttttagttcggttctactcaatccgtaatgaatattgctctagttctttttcaacttagaaaatatcacaaaaaggccgggcgtggtggctcacgcctgtaatcccagcactttgggaggctgaggtgggcggatcacgtggtcaggagatcgagaccatcgtggctaacacggtgaaaccccatctctactaaaaatacaaaaagttagccaggcatggaggcaggcgcctgtagtcccagctactcaggaggctgaggcaggagaatggcgtgaacctgggaggtggagcttgcagtgagctgagatagcaccactgcactccagcctgggcgacagagcgagactccatctcaaaaaaaaaaaaaaaaaaggaaaatatcacaaaaaaatgtgtgtttacagacacaaatgtggcttcagaataatttgaaaaatttatacataaagaaacatttttcagtcgtgcatacctggatgtaagtaaagtgttgattgactatagtatgaatagcatttagagataactgcttaaatagtacaaaagataagcaccaaactaaataatctaagttattatgcaatctacaatatcagaattttgtttgttttgagacatggtctcactttcattgcccaggctggagtgatgtggcttgatcctagctcactgcagcctctgcttcctgggctcagatgattctcccacctcagcctcctgagtagctgggactacaggcgtgtgttaccacacctggctaatttttgtatttttttctagagatagggtctcactctgttgtccagggtgctctcaaactccttggttcaaacggtccacctgtctcggcctctcaaagtgctgggattatgcatgtgagccactaagcctgattttagaatatcagattttaatttaacttcttagtcccagccacttgtttgacttctttttcattgactgcactcttggaaatgatgatttaaatttaattctggtttgacaggaaaagataattaaaaatcttcctgatgatatcttgactctaaatattaagcatcaccttagtttattagctatattagttcaccaggaatcctcttatcaatctgtgtgtgtgtgtatttttttttttctatctttaaagaaattttagatgggcagaaatcaggcgaccatctaaagcggggtaggaagaaagggagaaacagacaggaagttcctgcatttactgaacctgacacgactgcagaggttaaaacaccttttgatttggccaaggtgagtgcttatagattgaagctttttctgactattggagaagaggaagtgactaatacatttcagagagcaaagtgtacaaattggtctagaatggcaatttttcaacaaatgcatgaattttaggtagaaaaagttacatatactcctttctatatggtagattttttgtttggcaacctgattagtattataaagacatctttgcttttttttttttttttccccaagacagagtcttgctctgtttccagtctggagtgcagtggtgcgatctctgctcattgcaacctccgcttcctgggttcaagtgattctcctgcatcagtctcccgaatagctgggactacaggcatgcgccaccatacccagctaattttcttttttttttttttgagacagagtctcgctctgtcgcccaggctggaatgcagtggtgtaatctcagctcaccacaacctctgcctcctgggttcaagcgattctcctgcctcagcctcccaagtagctgggactgcatgcgcacactgccacgcccagctaatttttcgtattttagtagagatggggtttcaccgagttgcccaagctggtcttgagctgctgagctcaggcaatccacccaccttggcctcccaaagtgctaggattacaggcgtgagccaccgcgcccagccctgtttttgaactttaaattaatggagctaaatagtgtgtactcttgtatctagctgcttttttttttttttttttttttttttttgagacggagtcttgctctgtcacccaggctggagtgcagtggcgcaatcttggcccactgcaacctctgcctccctggttcaaacgattctcctgcctcagtctcccaagtagctgtgattacaggcacacatgctaccacacccagctaatttttgtatttttagtagagatggggtttcaccatgttggccaggctggtcttgaactcctgacctcaagcaatctgcctgccttggcttctcaaagtgctgggattacaggcatgagcaactgtgcccagccagtgtctagcttctttcaatttatgagattcatctctactctgggcagctatactttctcattctcattgctacacagaattgtattaagtgaacacatcacaatttatccattctattatttggatagtttccaattccaatgcaacagtgaacattcttgtatgtatttttggtgaacatatttacacatttctgtttagtatatatctaggagttgaattgctgtgtcatagaacatgcatatgttcaacttcagttgatatgagtttgcagtcctgccagcagtgtatgagaggtctaattcttttgtatctttgctaacacttcatattttctctttttcagtttagccattctggttggtatttagtggtattgcattttgttttcgtttttgcattattttgacgactaatgaaattgagcactttttcatatgcctgttagtcattaggatatcttttgttatgaagttcttattaggttttttttgccctttttttgtttgagataggatctcgctctgttgcccagtggcgtcaactcgactaactgcaacctccaccttctgtttttctattgtattatctgtccttttcttagtggtttctgattaagtcaactttatatttatttttcctattttattgatggcccatatttccaaatctgtgaatatcatctgcttttagaggcattcttgtttcttatgatctccaatttagctgtgcttaaagatgtcatataaacagatttaactgctacatttaccctccactagctatagtaatgggctgaaagctactagcagaaaagacaaggtaattatcagctagtttttctagagtataacctttcctcagaaccttgattataactaatttgtatttcttcctttcactgccttctttcttggttcttggatagtatataagttgttactgaacagaacggagcattttctcccttgactttttacattgtcattaattatttgatgttattttgatgtctttgtacgataggcacaagagaacagcaactccgtaaagaagaagacaaagtttgtcaatttatacacaagagagggacaggacaggcttgcagtcctgctccctggtcgtcacccttgtgattgcctgggccagaagcacaagctcatcaataactgtctgatctg

SEQ ID NO: 14623 - DNA, 636 bp, Homo sapiens
cttgcggggcggtgcaagctggcggaacccgcgtgagagagtagagacagggtttcaccgtgttagccaggatggtctcgatctcctgacctggtgatccgcccgcctcggcctcccaaagtgctgggattacaggtgtgagccaccgcgcccggccgcttatgtgttaatttataagtacgttttgtcaattgagagtgctgaagagatacgagaatatgttactgatctcctccagggaaatgaaggcaaaaaaggtcaattcatagaagaacttataaccaaatggcaaaagaatgatcaggagttgatttcggatcctttgcagcagtgcttcaaaaaagatgaaattttagatgggcagaaatcaggcgaccatctaaagcggggtaggaagaaagggagaaacagacaggaagttcctgcatttactgaacctgacacgactgcagaggttaaaacaccttttgatttggccaaggcacaagagaacagcaactccgtaaagaagaagacaaagtttgtcaatttatacacaagagagggacaggacaggcttgcagtcctgctccctggtcgtcacccttgtgattgcctgggccagaagcacaagctcatcaataactgtctgatctg

SEQ ID NO: 14624 - DNA, 521 bp, Homo sapiens
ggagctgagagaacttcgacacgcctctcgactttctaagaaggtcaccattgactttgcaggaaggaagatcctggaagaagaaaattcactagcagagtatcatagcagtttccagacatcagtcaagagtctgattctccatttgttttcatctgcaaaaatcctcaggaaatggttgtgaagtttcctattaaaggaaatccaaaaatctggaaattggattccaagatccatcaaggagcaaagaaggggttaatgaagcagaataaagctgtctgacccaggagaaaaggaactatacagcatagtggagttttgtgtactaaaattgctatctactggtcctttggaattgaagtagtagaaacctaaaggcttggcgtcaggcttgaatatctcagaacttaaactcttaccaaaatctgtatatttttcttaaggagtgggattcctactttatgtaatggggtcgaaatctttgaacacattatttataaaaacctgtttaaaaattctaa

SEQ ID NO: 14625 - DNA, 1536 bp, Homo sapiens
ggaagatggcggtggctggggcggtgtccggggagccgctggtgcactggtgcacccagcagttgcggaagactttcggcctggatgtcagcgaggagatcattcagtacgttttgtcaattgagagtgctgaagagatacgagaatatgttactgatctcctccagggaaatgaaggcaaaaaaggtcaattcatagaagaacttataaccaaatggcaaaagaatgatcaggagttgatttcggatcctttgcagcagtgcttcaaaaaagatgaaattttagatgggcagaaatcaggcgaccatctaaagcggggtaggaagaaagggagaaacagacaggaagttcctgcatttactgaacctgacacgactgcagaggttaaaacaccttttgatttggccaaggcacaagagaacagcaactccgtaaagaagaagacaaagtttgtcaatttatacacaagagagggacaggacaggcttgcagtcctgctccctggtcgtcacccttgtgattgcctgggccagaagcacaagctcatcaataactgtctgatctgtgggcgcattgtctgtgaacaagaaggctcaggcccttgcttattctgtggcactctggtgtgtactcatgaggaacaagatattttacagcgtgactcaaacaagagccagaaactgctaaagaaactcatgtcaggagtggagaattctggaaaggtggacatctctaccaaggaccttcttcctcatcaagaattgcgaattaagtctggtctggagaaggctatcaagcataaagacaaactgttagagtttgacagaactagtattcgaaggacccaagtcattgatgatgagtcagattactttgccagtgattctaaccaatggttgtccaaacttgagcgggaaaccttgcagaagcgagaggaggagctgagagaacttcgacacgcctctcgactttctaagaaggtcaccattgactttgcaggaaggaagatcctggaagaagaaaattcactagcagagtatcatagcagtgggttgaccacacaggtgcagcctcacagaagaaggctttccgttcttcaggatttggactagagttcaactcatttcagcaccagttgcgaatccaggatcaagaatttcaggaaggctttgatggtggctggtgcctctctgtacatcagccctgggcttctctgcttgtcagagggattaaaagggtggagggcagatcctggtacaccccccacagaggacgactttggatagcagccacagctaaaaaaccctcccctcaagaagtctcagaactccaggctacatatcgtcttcttcgtgggaaaggtaacagccgcatattctcctttcaattttactttatggagagaagtcattgacgttcatcttctttcacttccttctttctttggctttttctttgttaaaagagacttttaatctttgtatatgtttgtttgtttagtggtaaatcattgacagcgttcaaagcattaatctg

SEQ ID NO: 14626 - DNA, 12960 bp, Homo sapiens
agatggcggtggctggggcggtgtccggggagccgctggtgcactggtgcacccagcagttgcggaagactttcggcctggatgtcagcgaggagatcattcagtgagaacagttcgggtccaagcggggaaggagctctgggatgtgcactgcctgagcgaaccgggaagcggggaggactgaaaagttaagagagaaatgtgataaaggggctgcagtctgtagtctgtaggcgtcgaattttggcctccacctttgtagtttagtttctggaatagggtgtccggctccacagtctgccggtcgggcttttttcctgggaagacgcccaatctgtaataattagaaatgcaaggctgtcccaggagccagtttcctttctagagagaaggggcaggtcaaactgtatttcctaactttgaaccccttactcttttatttatttattattattgttgttattattgagacggagtctctgtcgcccaggctggcgtgcggtggcgcgatcttggctcactgcaacctccgccttccgggttcaggtgattcacctgcctgagcctcccaagtagctgggattacaggcacgcaccaccacacccggctaatttttaaaaatttttagtagagtcagtgtttcaccatgttggccaggctagtctccagctcctgatctcaagtgatccgcccgcctcgacctcccaaagtgctgggattacaggcatgagccaccgcacccagatatactctgaacattttagtcggcccaatctgagttgtgtcagtagagccaacagggtcagctgtgtcaataggacctagaatttaagtggaagcagcgtggtagagtacaaatagcttctgactctggagtctcaggttctatattctgttgtcgtttacctgttttagaacccaggacaacttaatttttctctctgtaccctggtttcttcatttataagattaatcattagtagagcttatcatgctttatgactcctatgaaatggagatggtgtacatgacttaatatctactttcaactgattgaagaacatttgttgcgctgctgttacacgccaggtgctggggtaacaaagacaagacagttgggttccccttcgttgatgagtgctgaggttggggaaatgaaggggcttgttggagcacaaaataaaggattctcattaagatttgaaaaactcggaaggtttattggaaaggataactttcacccgagaactaaggaatagacagaggtggcggtccaaagtgttcaggcaggggagaaaactacaaaaatgggacttgatcgaagaactgaaagtgttccttcatttgattccttggtcactgatgttgaaacctaaattgctgttctagggcttttgtaggaagtaagatgagtttctgagtttcggagaaaatagacttttggcaaggagacagttcaagtaggttattttaatggatttttttgaggccctaggagatggctcaagcccttattcccagcactttgggaggtagaggtgggaggattgcttgagactgggagttggagaccaccctgggcaacatagtgagaccctgtctctacagaaataaaaaaagtaaacaacaagataaaggattttttttaacactagaatagacaacaaaacaaaacagcgaaatcttatggtttggctttacccttgcttgaacgcagtcagattaagtatttagtagttttcaaacattttttaaagcagtggaatgctatcaaatgaaataatgaaactttgcaatatataaaacagaaaagtgttttttacgaatataagttcaaaattttcacttttttttttttttttttttgagacagattctgttgcccaggctggagtgcagtggtgcgatctcagctcgctgcaacctccgcctcccacgttcaagcgattctctttcctcagcccgagcagctgggattacaggcgcgcaccaccatgcctggctaatttttgtattcttactagagatggggtttcaccatgttgaccagggtggtctcgaactcctgacctcagatgatccaaccgcctcagcctcccaaagtgctgggattacaggcatgagccaccacgcctggcccaattttcacatatttattgtaaatatgtgtaatatattaaatatcaaatatattaaatattaaatatatcaaatattatattaaatatattaaatattaaatatatcaaatattatattaaatatattaaatatgtgtattatattaaatacagtattaaaaaaaaaagattgaggtggccaggcgcagtggttcatgtgtgtaatctaagcactttgggaggccgaggcagatggatcatttgaggtcaggaatttcagaccagcctggccaacatggcgaaacccccactctactaaaaatacaaaacttagtcgggtgtggtggagcgtgcaggtcatctcagttactcggaaggctgaggcaggagaatcccttgaaccgcggggcagaggttgcagtgagctgataccgcaccactgcactccatcctgggtgacagagtgagacctcgtctcaaaaaaaaaaaggaaaaaagaaagattgaggctatttttgataaattaacaatttgaaatagggtaagaatgatagatgtagtcttctcagtctagaatccagttgtattttgtttggattacacagtatcaagaaaatgcgttctcaggccaggcgtggtggctcacgcctgtaatcctagcactttaggaggccaaggcaggtggaccacctgaggtcaggagttcgagaccagcctggccaacatggtgaaaccccgtctctactaaaaatacaaaaaaaaattagccaggtatggtgacgggcacctgtaatcccagctactcgggaggctgaggcaggagaatcgcttgaacccaggaggcagaggttgcagtgagccaatatctcaccactgcactccagcctgggcgacagagcgagactccgtctcaaaaaaaaaaaaaaattatattccgcctgggaaggaggtcagtgcccgtcggcatgtattacgctaagatactatttgaagcatttgttaggtattcactagtattccacaacaggctattatgccatgatgaaagcatttgctgtgccttgcctggcatttaattgagaattacccaggtgtatgtactacagtaatgtactaacttgaacaattttatatgagtggactgaatttttgaaatagcacagagctattaacttttttttttttcttttttgagacggagtctcactctgtcgcccaggctggagtgcagtggcaggatctcggctcactgcaacctccacctcccaggttcaagcaattctcctgcctcagcctccccagtagcttggactacaggcgcgtgacaccatgcccagctaatttttgtatttttagtggagatgggattccaccaggttggccaggatggtctcggtctcctgacctcgtggtctgcccgcctcagcctcccaaagtgctgggattacaggtgtgagccactgcacccggccttaactttctaattagtgatacatttataagacataaatagctatccacagagttaacaaaataaactttggtccacaatctggatgagttcatattattttgataagatttggtatataacatatttggatgaatgttgttctttattataccttgttaagtagttaaaatgacatttattcaaatggttctgaaactctcttccctggttgtttgaaaaatactccagggttggccaggtgcagtggctcaacctgtaatcccagcactttgggaggctgaggtgggttgatcacttgaggtcaggagttcaagaccagcctgcccaacatggcaaaaccttgtctctactaaaaattcaaaaaattagccgggcgcagtggtgcacgcctgcaatcccagctactcaggaggctgaggcaggagaatttcttgaacctaggagccagaggttgcagtgagccaagatagcaccactgcactccagcctgggtgacagagtgagactctgtctcaaaaaaaaaaaaaaaaaaaaaaaagccaggtgcagcggctcagcctgtaattccagcactttggaaggctgaggcgggcaaatcacttgaggtcaggacttcgagaccagcctggccaacatagtgaaaccccgtctctactaaaaaaaagcaaaaacaaaacaaaacaaaacaaaaattagccgggtgtggttgtgcacgcctgtaatcccagctactcaggaggctgaggtaggagaatcgcttgaacctgggagatggagtttgcagtgagctgagatcgcaccactgcactccagcctgggagactaaatgagactctgtctgaaaaaacaaaaaaaccctccagggttaaatgatcccttgggattccttacagttttgcaagtctttgatagcagttaatcttttggtggggactggtaagtttggggatcaagatgattaaaatgtgtaagtcctgaaaaaccattgtcttttctaatccatagtaattagaagatgcctgtttttggggggtgtgtgtatgtgtgtgtgtatttttagtagagacggtttcaccatgttggccaagctggtctctaactcctgacctcaggtgatccacccgcctcagcctcccaaagtgctgggagccatcatgccccaccgtttttgcttgtttgagacagagtctcattctgttgctcaggctggaatgtagtggtgcaatcatggctctgcagccttcacctctgagactcaaaggatccttccacctcagcctcccaagtagctaggactacaggaacatgcctccatgcctggctaattttaatttttcttctagagacaaggtctccctatgttgcccaggctggtctcaaactcctgggcccaagtgatcctccagcttcagcctcccaaattgttgggattacaggcatgggctcccgaacccagacagaatattctcttagtgaggcccaaaggcacaaatttgtttacctctagagcataattctgcaattccaccattacactgtgaaaagaatgcagtacatacgataccaatcataggacaatttcataatttttaaaaagttaaaggatatagcactatggtaataatttttcttgcattccatatcattgtgtctgaattacagtttctgtgctgttttcagtgtcttgtatgttaattttttttttttttttttttgagaggaagtctcacttgcccaggctggagtgcagtggcacgatctcagctcactgcaagctctgtctcctgggttcacaccattctcctgcctcagcctcccgagtagctgggactacaggcgcctgctaccatacccgcctaatttttttttgttttttttttttagtagagacagggtttcaccgtgttagccaggatggtctcgatctcctgacctggtgatccgcccgcctcggcctcccaaagtgctgggattacaggtgtgagccaccgcgcccggccgcttatgtgttaatttataagtaatttttatcacttctttctcttgtaatgataagatgttcactgtagaaaactaaaaaaatcagaaaaggataaaaaagtaaactaaaattaccataatactacaacccagaaataagcactgtttctttctcttttttcccatatatattataatgtaatacattttaaaaacgtatttattgtaggaaaaaagaaaataaaaataaaactacctttaattccatcactcactagtaatcgttttggtgtataacgttgtttttttcctacacataagtgtatgtatgtatacattcataccagttaggatcgtatcgtatttctagcacctagcatagtacttggctcaaagtaaacactctaatagattaatgaatggtttttactacctagatctctgttaagattactgagaaacagtgtaagttagtcttgtttcaacaacttatatctttgcctcctgaggtacgttttgtcaattgagagtgctgaagagatacgagaatatgttactgatctcctccagggaaatgaaggcaaaaaaggtcaattcatagaagaacttataaccaaatggcaaaagaatgatcaggagttgatttcggatcctttgcagcagtgcttcaaaaaagatggtaagttaatgtaattatgcaaatgttgaaatattggtaagtgggcaggcttaaagaattattattattatttttttttttgccatcttgtgtttcttcacagctaacttaaacagagtcatatgtatacatatttttagttcggttctactcaatccgtaatgaatattgctctagttctttttcaacttagaaaatatcacaaaaaggccgggcgtggtggctcacgcctgtaatcccagcactttgggaggctgaggtgggcggatcacgtggtcaggagatcgagaccatcgtggctaacacggtgaaaccccatctctactaaaaatacaaaaagttagccaggcatggaggcaggcgcctgtagtcccagctactcaggaggctgaggcaggagaatggcgtgaacctgggaggtggagcttgcagtgagctgagatagcaccactgcactccagcctgggcgacagagcgagactccatctcaaaaaaaaaaaaaaaaaaggaaaatatcacaaaaaaatgtgtgtttacagacacaaatgtggcttcagaataatttgaaaaatttatacataaagaaacatttttcagtcgtgcatacctggatgtaagtaaagtgttgattgactatagtatgaatagcatttagagataactgcttaaatagtacaaaagataagcaccaaactaaataatctaagttattatgcaatctacaatatcagaattttgtttgttttgagacatggtctcactttcattgcccaggctggagtgatgtggcttgatcctagctcactgcagcctctgcttcctgggctcagatgattctcccacctcagcctcctgagtagctgggactacaggcgtgtgttaccacacctggctaatttttgtatttttttctagagatagggtctcactctgttgtccagggtgctctcaaactccttggttcaaacggtccacctgtctcggcctctcaaagtgctgggattatgcatgtgagccactaagcctgattttagaatatcagattttaatttaacttcttagtcccagccacttgtttgacttctttttcattgactgcactcttggaaatgatgatttaaatttaattctggtttgacaggaaaagataattaaaaatcttcctgatgatatcttgactctaaatattaagcatcaccttagtttattagctatattagttcaccaggaatcctcttatcaatctgtgtgtgtgtgtatttttttttttctatctttaaagaaattttagatgggcagaaatcaggcgaccatctaaagcggggtaggaagaaagggagaaacagacaggaagttcctgcatttactgaacctgacacgactgcagaggttaaaacaccttttgatttggccaaggtgagtgcttatagattgaagctttttctgactattggagaagaggaagtgactaatacatttcagagagcaaagtgtacaaattggtctagaatggcaatttttcaacaaatgcatgaattttaggtagaaaaagttacatatactcctttctatatggtagattttttgtttggcaacctgattagtattataaagacatctttgcttttttttttttttttccccaagacagagtcttgctctgtttccagtctggagtgcagtggtgcgatctctgctcattgcaacctccgcttcctgggttcaagtgattctcctgcatcagtctcccgaatagctgggactacaggcatgcgccaccatacccagctaattttcttttttttttttttgagacagagtctcgctctgtcgcccaggctggaatgcagtggtgtaatctcagctcaccacaacctctgcctcctgggttcaagcgattctcctgcctcagcctcccaagtagctgggactgcatgcgcacactgccacgcccagctaatttttcgtattttagtagagatggggtttcaccgagttgcccaagctggtcttgagctgctgagctcaggcaatccacccaccttggcctcccaaagtgctaggattacaggcgtgagccaccgcgcccagccctgtttttgaactttaaattaatggagctaaatagtgtgtactcttgtatctagctgcttttttttttttttttttttttttttttgagacggagtcttgctctgtcacccaggctggagtgcagtggcgcaatcttggcccactgcaacctctgcctccctggttcaaacgattctcctgcctcagtctcccaagtagctgtgattacaggcacacatgctaccacacccagctaatttttgtatttttagtagagatggggtttcaccatgttggccaggctggtcttgaactcctgacctcaagcaatctgcctgccttggcttctcaaagtgctgggattacaggcatgagcaactgtgcccagccagtgtctagcttctttcaatttatgagattcatctctactctgggcagctatactttctcattctcattgctacacagaattgtattaagtgaacacatcacaatttatccattctattatttggatagtttccaattccaatgcaacagtgaacattcttgtatgtatttttggtgaacatatttacacatttctgtttagtatatatctaggagttgaattgctgtgtcatagaacatgcatatgttcaacttcagttgatatgagtttgcagtcctgccagcagtgtatgagaggtctaattcttttgtatctttgctaacacttcatattttctctttttcagtttagccattctggttggtatttagtggtattgcattttgttttcgtttttgcattattttgacgactaatgaaattgagcactttttcatatgcctgttagtcattaggatatcttttgttatgaagttcttattaggttttttttgccctttttttgtttgagataggatctcgctctgttgcccagtggcgtcaactcgactaactgcaacctccaccttctgtttttctattgtattatctgtccttttcttagtggtttctgattaagtcaactttatatttatttttcctattttattgatggcccatatttccaaatctgtgaatatcatctgcttttagaggcattcttgtttcttatgatctccaatttagctgtgcttaaagatgtcatataaacagatttaactgctacatttaccctccactagctatagtaatgggctgaaagctactagcagaaaagacaaggtaattatcagctagtttttctagagtataacctttcctcagaaccttgattataactaatttgtatttcttcctttcactgccttctttcttggttcttggatagtatataagttgttactgaacagaacggagcattttctcccttgactttttacattgtcattaattatttgatgttattttgatgtctttgtacgataggcacaagagaacagcaactccgtaaagaagaagacaaagtttgtcaatttatacacaagagagggacaggacaggcttgcagtcctgctccctggtcgtcacccttgtgattgcctgggccagaagcacaagctcatcaataactgtctgatctgtgggcgcattgtctgtgaacaagaaggctcaggcccttgcttattctgtggcactctggtaaattatttcttttctattttattttactgtgctttgtgttaatacgcagagccagtcagatctcaagtaatttctctttttttgtttttttttggttgagacggagtctcactttgtcgcccaggctggagtgcagtggcacgatctcggctcgctgcaggctctgcctcccgggttcatgccattctcctgcctcagcctcccgagcagctggaactacaggtgcctgccaccacgcccagctaatttttttgtatttttattagagacgggattttacagtgttagccaggatggtctcgatctcctgaccttgtgatccgcccacctcggcctctcaaagttctgggattacaggcgtcagccaccgtgcctggctttctctttttcttagtaaatttcttccctaaaatatccagtgaactcgagtgtcagggatatgattagttagaaacccaaggttaggccaggcacagtggcacacgcctgtagtcccaacactttgggaagccaaggtgggttttgggaggctgaggtgggaggatcacctgagcccaggagtttgagaccagcctgggcaatgtaggaagaccctgtctctacaaaaaaaaaaaaaaaaaaaaaaaaaagtttttaattagctgggctgggtatggtggtgcacacctgtggtagcatttacatgaggggctgaaatgggagcttcacttgatcccaggacgtccaggctgcagtgagacagcgagtccttatctcagaagaaagaaagaaccccaggttatatcctagtactgaggccattaatgagaagggtttgagaacatacattgttgagagatccaagggctaggagccactgtgacagaatcctcagatcattatagcttctatttccaggattccaccttgtcatagctctgctttgtctgagagaatgacctcaagaatgcagtgataatgactcacagaaacccttaatgagctatctagaaagctaattttaccaagttgagctggctgtcagaagcaatgacatttggtgttggtaaaggcatccgttttatattacttcattttctcctcttttctgatggggcccttaattttttcttttttccttttttttttttttttttttttttttttgagacggagtctcactctgtcgcccaggctggagagcagtggcacaatctcggctcactgcaacctctgcctcctgggttcaagcaattctcctgtctcagcctccctagtagctgggacaacagggacacaccaccacgcccagctaattttttgtatttttagtagagacagggtttcaccatattggtcaagctggtctcagaactcctgacctcaggtgatccaaccatctcagcctcccaaagtgctgggattacaggtgtgagccaccgtgcctggtgggacccttaattttttcatatgctcagaataagctgatagacaatggatgacctgaaaaatgtagtgtctaccaataaaaatgtccattaaatggcagtaaatctcctcccatatggagctttctctttagagcaagctcttatagctgctggcaggaactctgtgtgtcattgaggcaactgctaggaagtattgtacagtgttttctcctaggtcccttgaagtaatgtaaagcagattggccttgaagtttgtttgtttgtttgttttttgagatggagtctcactctcttgcccagcctggagtgcagtggctcactgcaacttccgcctcctgggttcaagttcaagtgattctcctgccttagcctcttgagtagctgggattacaggtgcccactaccacgcccagctaatttttgtatttttagtagagacagggtttctctatattgaccacgctcaattgaactcctgacctcaggtgatctacctgcctcggcctcccaaagtgctgggattacaggcatgagccactgcgcctggcccttgtttgttttttagacagagtctcaggccaggcatgctggcttatgtctgtaatcccagcactttggaaggctgagttgggaggatgacttgagcccgggaggtggaggttgcagtgagcagagatggtgccaccgcactccagtctgggtgacaaagccacaccctgctcaaaaaaaaaaaaagaaagaaaaaaagaaaaaataacgtactctcaaagataaatatttctcactgttgagaatactagataaaacatatgtgactttaccataaaaagcaacccagttctaatcatgaagcccaaatctgacaagagaagttaattataagaagatgtcttattagaaagaaccagaagccaggtatggtggctgatgcctataatcccattgctttcggaggctgaggagggaagactgcttgagcccaggagttcaggaccagcctgggcaacatggcaaaaccccatatctacaaagaagtcccagctcctaagtagctggaactataggcacacaccaccacgccaggctaatttttgcatttttttgttgaaatggggtttggccatgttgcccaggctggtctcgaattcctgcactcaagcaatctgcccacctcagcctcccaaagtgctgggattacagtcataagccactgtgcccagccttttttttttttttttctaaaccattaagtcattcagggacatgtgcagtgatataagttttttgtttgggtcataaaaaagaaatggaaagagatctggagaaaactcatttgcatttttatattttggtgtgtttggattaaaaaacaccaatagtctcattattttatcatcatctaatgtgtaatttcaggttacttttagatatatcaagaaagcaatataatttaactgttggatcacatgtcttactcttactattttacaggtgtgtactcatgaggaacaagatattttacagcgtgactcaaacaagagccagaaactgctaaagaaactcatgtcag

SEQ ID NO: 14627 - DNA, 565 bp, Homo sapiens
agatggcggtggctggggcggtgtccggggagccgctggtgcactggtgcacccagcagttgcggaagactttcggcctggatgtcagcgaggagatcattcagtacgttttgtcaattgagagtgctgaagagatacgagaatatgttactgatctcctccagggaaatgaaggcaaaaaaggtcaattcatagaagaacttataaccaaatggcaaaagaatgatcaggagttgatttcggatcctttgcagcagtgcttcaaaaaagatggcacaagagaacagcaactccgtaaagaagaagacaaagtttgtcaatttatacacaagagagggacaggacaggcttgcagtcctgctccctggtcgtcacccttgtgattgcctgggccagaagcacaagctcatcaataactgtctgatctgtgggcgcattgtctgtgaacaagaaggctcaggcccttgcttattctgtggcactctggtgtgtactcatgaggaacaagatattttacagcgtgactcaaacaagagccagaaactgctaaagaaactcatgtcag

SEQ ID NO: 14628 - DNA, 16110 bp, Homo sapiens
taattccatcactcactagtaatcgttttggtgtataacgttgtttttttcctacacataagtgtatgtatgtatacattcataccagttaggatcgtatcgtatttctagcacctagcatagtacttggctcaaagtaaacactctaatagattaatgaatggtttttactacctagatctctgttaagattactgagaaacagtgtaagttagtcttgtttcaacaacttatatctttgcctcctgaggtacgttttgtcaattgagagtgctgaagagatacgagaatatgttactgatctcctccagggaaatgaaggcaaaaaaggtcaattcatagaagaacttataaccaaatggcaaaagaatgatcaggagttgatttcggatcctttgcagcagtgcttcaaaaaagatggtaagttaatgtaattatgcaaatgttgaaatattggtaagtgggcaggcttaaagaattattattattatttttttttttgccatcttgtgtttcttcacagctaacttaaacagagtcatatgtatacatatttttagttcggttctactcaatccgtaatgaatattgctctagttctttttcaacttagaaaatatcacaaaaaggccgggcgtggtggctcacgcctgtaatcccagcactttgggaggctgaggtgggcggatcacgtggtcaggagatcgagaccatcgtggctaacacggtgaaaccccatctctactaaaaatacaaaaagttagccaggcatggaggcaggcgcctgtagtcccagctactcaggaggctgaggcaggagaatggcgtgaacctgggaggtggagcttgcagtgagctgagatagcaccactgcactccagcctgggcgacagagcgagactccatctcaaaaaaaaaaaaaaaaaaggaaaatatcacaaaaaaatgtgtgtttacagacacaaatgtggcttcagaataatttgaaaaatttatacataaagaaacatttttcagtcgtgcatacctggatgtaagtaaagtgttgattgactatagtatgaatagcatttagagataactgcttaaatagtacaaaagataagcaccaaactaaataatctaagttattatgcaatctacaatatcagaattttgtttgttttgagacatggtctcactttcattgcccaggctggagtgatgtggcttgatcctagctcactgcagcctctgcttcctgggctcagatgattctcccacctcagcctcctgagtagctgggactacaggcgtgtgttaccacacctggctaatttttgtatttttttctagagatagggtctcactctgttgtccagggtgctctcaaactccttggttcaaacggtccacctgtctcggcctctcaaagtgctgggattatgcatgtgagccactaagcctgattttagaatatcagattttaatttaacttcttagtcccagccacttgtttgacttctttttcattgactgcactcttggaaatgatgatttaaatttaattctggtttgacaggaaaagataattaaaaatcttcctgatgatatcttgactctaaatattaagcatcaccttagtttattagctatattagttcaccaggaatcctcttatcaatctgtgtgtgtgtgtatttttttttttctatctttaaagaaattttagatgggcagaaatcaggcgaccatctaaagcggggtaggaagaaagggagaaacagacaggaagttcctgcatttactgaacctgacacgactgcagaggttaaaacaccttttgatttggccaaggtgagtgcttatagattgaagctttttctgactattggagaagaggaagtgactaatacatttcagagagcaaagtgtacaaattggtctagaatggcaatttttcaacaaatgcatgaattttaggtagaaaaagttacatatactcctttctatatggtagattttttgtttggcaacctgattagtattataaagacatctttgcttttttttttttttttccccaagacagagtcttgctctgtttccagtctggagtgcagtggtgcgatctctgctcattgcaacctccgcttcctgggttcaagtgattctcctgcatcagtctcccgaatagctgggactacaggcatgcgccaccatacccagctaattttcttttttttttttttgagacagagtctcgctctgtcgcccaggctggaatgcagtggtgtaatctcagctcaccacaacctctgcctcctgggttcaagcgattctcctgcctcagcctcccaagtagctgggactgcatgcgcacactgccacgcccagctaatttttcgtattttagtagagatggggtttcaccgagttgcccaagctggtcttgagctgctgagctcaggcaatccacccaccttggcctcccaaagtgctaggattacaggcgtgagccaccgcgcccagccctgtttttgaactttaaattaatggagctaaatagtgtgtactcttgtatctagctgcttttttttttttttttttttttttttttgagacggagtcttgctctgtcacccaggctggagtgcagtggcgcaatcttggcccactgcaacctctgcctccctggttcaaacgattctcctgcctcagtctcccaagtagctgtgattacaggcacacatgctaccacacccagctaatttttgtatttttagtagagatggggtttcaccatgttggccaggctggtcttgaactcctgacctcaagcaatctgcctgccttggcttctcaaagtgctgggattacaggcatgagcaactgtgcccagccagtgtctagcttctttcaatttatgagattcatctctactctgggcagctatactttctcattctcattgctacacagaattgtattaagtgaacacatcacaatttatccattctattatttggatagtttccaattccaatgcaacagtgaacattcttgtatgtatttttggtgaacatatttacacatttctgtttagtatatatctaggagttgaattgctgtgtcatagaacatgcatatgttcaacttcagttgatatgagtttgcagtcctgccagcagtgtatgagaggtctaattcttttgtatctttgctaacacttcatattttctctttttcagtttagccattctggttggtatttagtggtattgcattttgttttcgtttttgcattattttgacgactaatgaaattgagcactttttcatatgcctgttagtcattaggatatcttttgttatgaagttcttattaggttttttttgccctttttttgtttgagataggatctcgctctgttgcccagtggcgtcaactcgactaactgcaacctccaccttctgtttttctattgtattatctgtccttttcttagtggtttctgattaagtcaactttatatttatttttcctattttattgatggcccatatttccaaatctgtgaatatcatctgcttttagaggcattcttgtttcttatgatctccaatttagctgtgcttaaagatgtcatataaacagatttaactgctacatttaccctccactagctatagtaatgggctgaaagctactagcagaaaagacaaggtaattatcagctagtttttctagagtataacctttcctcagaaccttgattataactaatttgtatttcttcctttcactgccttctttcttggttcttggatagtatataagttgttactgaacagaacggagcattttctcccttgactttttacattgtcattaattatttgatgttattttgatgtctttgtacgataggcacaagagaacagcaactccgtaaagaagaagacaaagtttgtcaatttatacacaagagagggacaggacaggcttgcagtcctgctccctggtcgtcacccttgtgattgcctgggccagaagcacaagctcatcaataactgtctgatctgtgggcgcattgtctgtgaacaagaaggctcaggcccttgcttattctgtggcactctggtaaattatttcttttctattttattttactgtgctttgtgttaatacgcagagccagtcagatctcaagtaatttctctttttttgtttttttttggttgagacggagtctcactttgtcgcccaggctggagtgcagtggcacgatctcggctcgctgcaggctctgcctcccgggttcatgccattctcctgcctcagcctcccgagcagctggaactacaggtgcctgccaccacgcccagctaatttttttgtatttttattagagacgggattttacagtgttagccaggatggtctcgatctcctgaccttgtgatccgcccacctcggcctctcaaagttctgggattacaggcgtcagccaccgtgcctggctttctctttttcttagtaaatttcttccctaaaatatccagtgaactcgagtgtcagggatatgattagttagaaacccaaggttaggccaggcacagtggcacacgcctgtagtcccaacactttgggaagccaaggtgggttttgggaggctgaggtgggaggatcacctgagcccaggagtttgagaccagcctgggcaatgtaggaagaccctgtctctacaaaaaaaaaaaaaaaaaaaaaaaaaagtttttaattagctgggctgggtatggtggtgcacacctgtggtagcatttacatgaggggctgaaatgggagcttcacttgatcccaggacgtccaggctgcagtgagacagcgagtccttatctcagaagaaagaaagaaccccaggttatatcctagtactgaggccattaatgagaagggtttgagaacatacattgttgagagatccaagggctaggagccactgtgacagaatcctcagatcattatagcttctatttccaggattccaccttgtcatagctctgctttgtctgagagaatgacctcaagaatgcagtgataatgactcacagaaacccttaatgagctatctagaaagctaattttaccaagttgagctggctgtcagaagcaatgacatttggtgttggtaaaggcatccgttttatattacttcattttctcctcttttctgatggggcccttaattttttcttttttccttttttttttttttttttttttttttttgagacggagtctcactctgtcgcccaggctggagagcagtggcacaatctcggctcactgcaacctctgcctcctgggttcaagcaattctcctgtctcagcctccctagtagctgggacaacagggacacaccaccacgcccagctaattttttgtatttttagtagagacagggtttcaccatattggtcaagctggtctcagaactcctgacctcaggtgatccaaccatctcagcctcccaaagtgctgggattacaggtgtgagccaccgtgcctggtgggacccttaattttttcatatgctcagaataagctgatagacaatggatgacctgaaaaatgtagtgtctaccaataaaaatgtccattaaatggcagtaaatctcctcccatatggagctttctctttagagcaagctcttatagctgctggcaggaactctgtgtgtcattgaggcaactgctaggaagtattgtacagtgttttctcctaggtcccttgaagtaatgtaaagcagattggccttgaagtttgtttgtttgtttgttttttgagatggagtctcactctcttgcccagcctggagtgcagtggctcactgcaacttccgcctcctgggttcaagttcaagtgattctcctgccttagcctcttgagtagctgggattacaggtgcccactaccacgcccagctaatttttgtatttttagtagagacagggtttctctatattgaccacgctcaattgaactcctgacctcaggtgatctacctgcctcggcctcccaaagtgctgggattacaggcatgagccactgcgcctggcccttgtttgttttttagacagagtctcaggccaggcatgctggcttatgtctgtaatcccagcactttggaaggctgagttgggaggatgacttgagcccgggaggtggaggttgcagtgagcagagatggtgccaccgcactccagtctgggtgacaaagccacaccctgctcaaaaaaaaaaaaagaaagaaaaaaagaaaaaataacgtactctcaaagataaatatttctcactgttgagaatactagataaaacatatgtgactttaccataaaaagcaacccagttctaatcatgaagcccaaatctgacaagagaagttaattataagaagatgtcttattagaaagaaccagaagccaggtatggtggctgatgcctataatcccattgctttcggaggctgaggagggaagactgcttgagcccaggagttcaggaccagcctgggcaacatggcaaaaccccatatctacaaagaagtcccagctcctaagtagctggaactataggcacacaccaccacgccaggctaatttttgcatttttttgttgaaatggggtttggccatgttgcccaggctggtctcgaattcctgcactcaagcaatctgcccacctcagcctcccaaagtgctgggattacagtcataagccactgtgcccagccttttttttttttttttctaaaccattaagtcattcagggacatgtgcagtgatataagttttttgtttgggtcataaaaaagaaatggaaagagatctggagaaaactcatttgcatttttatattttggtgtgtttggattaaaaaacaccaatagtctcattattttatcatcatctaatgtgtaatttcaggttacttttagatatatcaagaaagcaatataatttaactgttggatcacatgtcttactcttactattttacaggtgtgtactcatgaggaacaagatattttacagcgtgactcaaacaagagccagaaactgctaaagaaactcatgtcaggtagacagcagtcttgtaattggatcactgggatgatgggtaccttgttgcgtctgtggttgtttctcttttctgtatcctggagtgcaagatgcagtttattcactcattctcagtttttttggggggttttttttgttttgttttgttttgttttgatgtggagtctcactcttatcacccaggctggagagcagtgacgcgatcttggcttactgcaacctccgcctcctgggttcaagtgattctcctgcctcaaactccctagtagctgggattgcaggcgtgtgccaccacgcgtagctaatatttacttttttttttttttttgagatggagtctcgctctgtcacccaggctggagtgtagtggcgctgatctcggctcactacaacctctgccttctgggttcaagcaattctcctgcctcagcctgccaagtagctgggactacaggcacatgccaccatgcctggctaatgttttgtattttttagtagagatggggtttcaccatgttagccaggatggtcttgatctcctgacctcatgatctgcccaccttggcctcccaaagtgctgagattacaggcataagccaccacgcccagccaatatttacatttttttagtaggggtggggttttgccatgttggccaggctggtcttgaactcatgacctcaagtgatctgcctgcctcggcctcccaaagcactgggattacagatgtgacccactgtgcctggcctattcactcattctataagcatctattttttagaaaaattattaagactacataacattgaacagcaaaataaataatagtattacattataatctaaataaaattaatatccatgtgaccatacttgtataaataactgaataagttaataaaatggagaaaggacaacttcttataaaagaattccagttaataaagtacaagaaatgaaaatactagaaaatcacaattagaacactacagtagtaactgccacaagcacgatccaccaatggatactgaaattattggttgaaagtttaagaacaagagatttacaatgtcatgaaagacaagaaaagattgaagaaacgtcacagatcagagtagattaaggatatatatgacgactaattgcagtatagatccagtattagatcctagaatagaaaaatgacattaatgggaaaaaaatgttaaaatccaaatagtctgtctatagtattataccaatattaatttcttagttttgataattgtactatggttttgtaagataagatggtaacattaaaggaagctatgtgaaggttatataggaactctacttattttctaattattttgcatgccttttatgcttgaaacacacctgacaaaaatggttaaggacattttttttttttttgagacggagtttcactctttttgcccaggctggagtgcaatggtgtgatctcggctcaccgcagccttcgcctcccaggttcaagcgattcttctgcctcagcctccccagtaggtgggattacaggcatgcgtcaccaccctgactaattttgtatttttagtagagacagggtttctccatgttggtcaggctggtcttgagctcccgacctcaggtgttccacccacctcagcctcccaaagtgctgggattaaggtgtgagccaccgcgcccggccaacatttttttttttttttctgagacggagttttgctcttgttgcccaggctggagtgcaatggcgcgatctcagctcactgcaacctccgccacttgggttcaagtgattctcctgcttcagcctctcaagtagctgggattacaagcgcatgccaccttgtccagctaatttttttgtatttttagtagagatggggttctcccatgttgactaggctggtctcgaactcctgacctcagatgatctgcccacctcaacctcccaaagtgctgagattacaggcgtgagccaccgcacttggtcagttaaggacattatttttatttatttattatttatttagttagttagttttgagatggagtctcgctctgtcgcccaggctggagtgtggtggcgtgatctcggctcgctgcaagctccatctcccaggttcatgccattctcctgcctcagcctcctgagtagttgagactggcgacgcccgccaccatgcccggctaatttttttgtatttttttagtatagacggtgtttcactgtgttagccaagatggtctcgatctcctgaccttgtgatccacctgccttggcctcccaaagtgctgggattacaggcgcgagccaccgcacccctatttttaattttttttagacggagtctcgctctttcgcccgggctggagtgcagtggcgcaatcttggctgactgcaacctctgcctcctgggttcaagcgattctcctgcctcagcctgccacgtagctgggactacaggcgtgcaccactatgcccagttaaattttgtatttttagtagagatggggtttcaccatgttggttggccatggtggtcttgatctcttgacctcgtgttccacccgcctcggcctcccaaagtgctggaattacaggcatgagccaccgcgcccagcagttaaggacactattaaaaagaaaaacaatatactcattactcactacttacgcaaatatttcattttgttcctaccttggttcatagtagtttttgttttatatcgacagatttgttgggattataatgtagtcatctgtgtaaaaacatttgtttttccattttccaactaattcataattagctgccatcttgctatatattcataattgtttttagtagctaaaaatagtcttttaacttggtttattatagtatgattatttcctaattactggatatttgtttccaaattttaaataatattacaaattgtcacctttattaacatagcttttgatttacttccttgtgataaattgctaagaataatgttactatgtcaaataatgtgtctttttttgacacttgagatgtatttgccagattattttgtcaaaatatataaatagccgggcatggtggctcatgcctgtaatcctagcactttgagaggccgagacgggcggatcacctgaggttgggagtttgagaccagcctgaccaatgtggagaaaccccgtctctaccaaaaacacaaaattagccgtgcatggtggcacatgcctgtaatcccagctactcaggagactgaggctgggaattgcttgaaccccggaggcggaggttgcagtgagccgagattgcaccattgcactccagcctgggcaacgagagtgaaactccatctcaaaaaaaaaaaatcatattaatctatagcaatattagcattgtacccagaatcctgttcactcttgagttttgacatttcaaatttgttttagttgtaaaaggctgtaattttattattttttatttttatttttatttatttatttgttttgagacagagtctctgtcacctaggctggagtgcagtggcgtgatcttggctcactgcaacttctgcctctcaggttcaagcaattctcctgcctcagcctcccaagtagctgggattgcgggcgcctgccaccacacccagctaatttttgcatttatagtagagacagggttttgccatgttggccaggcctcctgacctcaggtgatccacccaccttggcctcccaaaatgctgggattacaggcatgaaccaccgcgctcggcctgtaattttattattaatgaggttgcacatgcctctatgtttttttcaattagattttaaggtaatcattctgagaaaaaatagttctgattgtacgtactgtccttgtttgtttgtttgtttttagacggtctctgtcaggctggagtacattggtatgaacacattttactgcagcaattctcctgcctcagcctcccaagtagctggatctacaggcttgtaccaccgtgtctggctaatttttaaattgtttgtacagatgggctctcaccatgttgcccaggctagtcttgaactcctaggctcaagtgatcctcccacctcagcctcccaaagtgctgcaattacaggagtgagccactgcacacagccacctaacccattttggatcttgggtgtatcataatctatggctctcttttctgggatatacaaatttacaatatgctgtcaaagaagaaaacacaaccatggaatcaatgttggctttagagttatactcgagctcagattttgtttctatggtctaatttctttttcttttcttttttttttttttgagatggagtcttgctctgtcgcccaagctggagtgcagtggcacggtctcggctcactgtaagctcagcgtcccaggttcatgccattgtcctgcctcagcctcccaagtagctgggactacaggtgcctgccaccatgcctggctaattttttgtatttttagtggagacagggtttcaccatgttagccaggatggtctcgatctcctgacctcatgatccgcccgcctcagcctcccaaagtgctgggattacaggcgtgagccactgcacccggccactggtctaatttctaactgtgtgaactcagtaaatttatagtcatctctgaacttcagttactttatctgtaaaataaagataatacaaactgtcttacagggttattgcgaaaattaaataacatgtatactaagtgactcagcatttagcaggttctcattaaactgaaactgttcattttttctgccccttttgtgaaattttcttttttcttccattatttagtgtttagttttgataatataaacgtatatttaggctggcatagtggatcatgtctggaatcccagtactttgaggtgctgagttgggaggattgcttgaagccaggactttgaaaccagcctgagcaacatagtgagacccgcctctctacaaaaatttaaaaattcagacacaatggcatgtgcctgttgtctcagctattcaggaagctgaggtggaaggatcgcctgagcctaagagtttgagactgcagtgagctatgatcacactactgcactccagactgggcaacagcattagatcctgtcttgaaaaaacgtatatttaaaggtaatattgagcaaatgtcttcttcactgagaaggcatttttatgtcacattcttaaatactttggtgcccttagtgaaccaaatttttataaaggaagaaaagatccctgccatttattgaaaacctgtcatgtgtcaagcactgcttactgctgtacaggtaaggcctggactgtgtacttgttttctgttgaaatgaaggctccaggccatcaggccagaaccagatcttctgatgttttgttctttgttgcacactggtacaactaatttgtatttagaggctgacaccatttgacttccttattgaatttcaggagtggagaattctggaaaggtggacatctctaccaaggaccttcttcctcatcaagaattgcgaattaagtctggtctggagaaggctatcaagcataaagacaaactgttagagtttgacagaactaggtatgaaagggttagaataacaaatgctaagaaataaactagtccacagattctggccattattttggtacttgataccttctcaaagtggagtgtgaaagagtttatagcaaaagaagagccagatgctctacataggaggcctacatcttgttttttaatccacggttgaataatataggctcctatgaaaagaatcctgtcctgtagcattttttgattcctgacaaatgttagtatatcccctggacagttatgtgagttgacagaattcaccacttgttttacttgtagccattcattcagtcacctgtattagagtacgtgttatttgcaaactgttaggctgggctctggagaatctgtaaggaattgcctctgggagaacacaggttatgccctatcataggagggcatgatttacccttctcctttactttgactaaatttgttttttgattcaataatcggtatattaaaatacaactaaattagctttatactactgcattattattgtttagcccattgacttctgtttaggagatagatttatgataattctgtttttgacttcctccttacttacatttttttttcttttgaaaaaaatacttgttgaaaaccagttagtggtaaaaaatgtttggataggatttatatgctcccttctcaaatgactctgagggtcctcagagagaccctgaatctcttgtaacctgagagtctgttgctgacagtgtaatcttttgatgggacattcctgctacttccaaaccatttgctatgaatacatgagataagatttagaaaactattccttaaataaacccatcacaaggtgtataactcatattcactcttcatcctttcagtatcacatttcaccctactcagtagaacgtattattagaaatagaaatggaagccgggcacggtggctcacacctgtaatcccggcacttggggaggccgaggcaggtggatcacgagatcaggagatccagaccatcctggctaacacagtgaaaccccatctcactaaaaatacaaaaaaattagccaagcgtggtggcaggtgcctgtagtcccaggtactcgggaggctgaggcaggagaatggcatgaacccaggaggcggagcttgcagtgagccaagattgtgccactgcactccagcctgggcaacagagtgagactctgtctcaaaaaaaaaataataataatagaaatagaatgcacttactttttgataaacagaaagtggaaaagggtctctccctattgttgctgttttgctggtgtattcatggataccagtttcattatctaggtttttgtataagaccaatttccaccaggcacagtggctcacgcctgtaatcctagcactttgggaggccaaggcagacggattgcttgagcctgtaagtttgagagcagcctgggcagcatagcaaaaccctgtctgtacaaaaaatacagaaattagccaggagtaatgttacatgcctgtaatcccagctacttgggaggctgaggtgggagtattgattgagactgggaggtggaggttacagtgaggcgagattaatccagtgcactccagcctgggtgtcacagcgagattgtctcaaaaaaaaaaaaaaaattcctccagagtactgttaaaaaagtttctactctaagtctgctttatttttgttttttttttttgatccgccagcctcggcctcccaaagtgctggaattacaggtgtgagccaccgtgcctggcctaagaagacaaatttttttttttttttttttttttttttgagatggagtcttgctctgtcgcctgggctgcagtgcagtggcgccatctcggcttactgcaagctccgccccctggactcacgccattctcccgcctcagcctcctgagtagctgggactacaggcgcccgccactacgcccagctaatttttttgtatttttagtagagacggggtttcaccgtgttagccaggatggtctcgatctcctgaccttgtgatccgtccgcctcagcctcccaaagtgttgggattacaggtgttgagccactgtgcccggctgacaaaatttttttataattctagctgagtatgaaaatttgaagccaatatatgaatctaacttcagtatttcccttatgtctatttatgtcactatttgtaattatggggaaacgtaatcttaactggatttatgacattggagtaatcactcaacttctatgagccccaggtttataatatgtagaattagagagttagaccatcaagattccttccaggttttagtgtctctgtcagtatgatcttagagataggcctaattgtcatattttggaacttggccccagtgcattagtgagagcctgcaaagtggggtataggtaatgacatatagtagtagggtaatagaatgtcttaagagtaaatagttggccaggcacagtggctcacacctgtaatcctagcactttgggaggccaaggtgggtggatcacgaggtcaggagttcaagaccagccaagccaagatggtgaaaccccatccctactaaaaatacaaaaattagccaggcatggtgttgcgcctataatcccagctactcaggtggctgaggcagagaactgcttgaactgaggaggcagtcacaccactgcactccagcctgagcgacagaacgagactctgtctcaaaaaaaaaaaaaaggtaaatagttaagctacagaactgagacttaagcatagaactccagtaagcaaataagcctagcaagaataggctggatcccagttacagagggactaggatatttagtaagctgtcaaacttgaactcagatgcagcaaaaccaggctgaagcccagctttcagaaggtagaggctggactaatatgaaaggtagaaggaaaatgtattatggtgctgtgtcttttcttgcctgaggttgagataagttctaggagctgagcctacactggagataaaacatatgcagagcttgacctgattttggaacatatttgagatattaagttaccttgaaactgttttccaataatcggtccttatttgtcaacagatgacctaattaccatgtgttccctttttctcagtattcgaaggacccaagtcattgatgatgagtcagattactttgccagtgattctaaccaatggttgtccaaacttgagcgggaaaccttgcagaagcgagaggaggagctgagagaacttcgacacgcctctcgactttctaagaaggtcaccattgactttgcaggaaggaagatcctggaagaagaaaat

SEQ ID NO: 14629 - DNA, 1039 bp, Homo sapiens
taattccatcactcactagtaatcgttttggtgtataacgttgtttttttcctacacataagtgtatgtatgtatacattcataccagttaggatcgtatcgtatttctagcacctagcatagtacttggctcaaagtaaacactctaatagattaatgaatggtttttactacctagatctctgttaagattactgagaaacagtgtaagttagtcttgtttcaacaacttatatctttgcctcctgaggtacgttttgtcaattgagagtgctgaagagatacgagaatatgttactgatctcctccagggaaatgaaggcaaaaaaggtcaattcatagaagaacttataaccaaatggcaaaagaatgatcaggagttgatttcggatcctttgcagcagtgcttcaaaaaagatgaaattttagatgggcagaaatcaggcgaccatctaaagcggggtaggaagaaagggagaaacagacaggaagttcctgcatttactgaacctgacacgactgcagaggttaaaacaccttttgatttggccaaggcacaagagaacagcaactccgtaaagaagaagacaaagtttgtcaatttatacacaagagagggacaggacaggcttgcagtcctgctccctggtcgtcacccttgtgattgcctgggccagaagcacaagctcatcaataactgtctgatctgtgggcgcattgtctgtgaacaagaaggctcaggcccttgcttattctgtggcactctggtgtgtactcatgaggaacaagatattttacagcgtgactcaaacaagagccagaaactgctaaagaaactcatgtcagtattcgaaggacccaagtcattgatgatgagtcagattactttgccagtgattctaaccaatggttgtccaaacttgagcgggaaaccttgcagaagcgagaggaggagctgagagaacttcgacacgcctctcgactttctaagaaggtcaccattgactttgcaggaaggaagatcctggaagaagaaaat

SEQ ID NO: 14630 - DNA, 5352 bp, Homo sapiens
atagagacgctcggcctccgccgcacgcgctggcggactaagagtggctggcgaagcgagcggccggcgcgggcccctggcgggcgggcggtacagccccaagcctgagacccggacctgagcatcgcaggttcgagtcccgccccgcctggggcgaagccgggggtggcggcgacctcgcggcgttgcaccggctctgtgagcacctcccctctgagcacttcccttgtgacaggccacttcccttgtgacaggcccaggacgaggtggccaggcggcccccatggcgtccctggtctaggcggagaaccgcctgggcgatgagtgagaacctcgacaacgaggtagagtgcggggagacgctgggtagagacggggatggggtgggaggaggcggggtgggtcaggaaacctgccagagaataggtggggacgaggcaggtgcgataggggaggaaaggagacgggaatggggtcgggagggtagactgggggaggggcagggctgagtgcagagtgcaccgacggaggtctgggtgtcccataaggaagcttggggggccaggcccccagggcctagtcctcaccctagcaccccatctgtccccacacagggcccgaagcccatggagagctgtggccaggagagcagcagtgccctgagctgccctaccgtctcggtgccccctgcagccccggcagccctggaggaggtggagaaagagggcgctggggcggctacagggccggggcctcagcccgggctctacagctacatcagggatgacttgtttacctctgagatctttaaactggagctgcagaacgtgcctcgccacgccagcttcagcgacgtccggcgcttcctgggccgctttggtctgcagccccacaaaaccaaactctttgggcaaccaccctgcgcctttgtgacattccgcagcgctgcagagagggacaaggccctgcgcgttttgcatggtgccctctggaaaggccgcccactcagtgtgcgcctggcccggcccaaggccgaccccatggccaggaggaggcgacaggagggtgagagtgagccaccagtaacacgagtggccgacgtggtgacccctctatggacagtgccctatgctgagcagcttgagcggaagcagctggagtgcgagcaggtgctgcagaaacttgccaagtgagtgtgggcgcaagacgcccctcttggccagggctctgcccggcctgtgcttcctcagcctgtccatgcaccagttgggaggcccagcacaggatctggcggcccctttgggagctagccagcaagacacccacgtcacagtgggcacaatgacatcccaaaggaggggtcaggagcctggacatttggggagtggcctggcatgggtcgggggcagtaggtggagtccaaccaccgatctgctcctcttacagggaaatcgggagcaccaaccgtgccttgctgccctggctgctcgagcagaggcacaagcacaacaaggcctgctgcccgctggagggggtcaggccatcaccccagcaggtcagactagacttcggtggccacaaacccctatcctgggttttgaaaaactttgcttttgctcacccttcctgttgatctccctgctttgtgttttcttctggtaacatcacatagttgtcagctgttcctcttgtttgactgccagcccctgtggggaaatcagggtttccaggcccaagcgctgggcagccagggtaaggtgcagctctctctccctgcagactgagtatcgtaataagtgtgagtttctggttggcgtcggggtggatggggaggataacaccgtgggctgtcggctcggcaagtacaagggcgggacgtgtgctgtggcagccccgtttgacaccgtgcacatccccgaagccaccaagcaggtggtgaaggccttccaggagttcatccggtgaggacctgtgacggggctcccgggaagtcctatgcggtgtgggagcagagggtggtgatcctgccccgggaattctggagtgcctgccatttcagccagatgaaggaaggtgtggccagaggagagagcagggggactgcttgcccagttgtgggcacttgggccagctcgtgattcccacaggtccactccatactcggcatacgacccagagacgtacacaggccactggaagcagctgactgtgcgcaccagccgccgccaccaggccatggccattgcctacttccacccccaggtctcaacgggggccctgctgggggagggtgcctagcctaggtgggcctcagcacagcctgatgggaacttttcaccacttactccagaagctgagccctgaggagctggcagagctgaagacctccctagcgcagcacttcacagcagggccaggcagggccagtggagtgacctgcctctacttcgtggaggagggacagcggtaaggagcccgagtggggcggggcaggtccctgcagggactgtgacactgaaggacctgcaccttcgcccacagaaagactcctagccaggagggcctgcccctggagcatgtggctggggaccggtgcatccacgaggacctgctagggctgaccttccggatctctccacacgccttcttccaggtagccatgagtccctggtgggcatggggacatgttgagggaggcctgacgcaccatcaggacgtgatgggaacagtgggctcaggcggtgagatttgggggagtatccaggcaggtgagccacaggggagggtgaagtaagaaagaggttggtcatcactgatttgactcgggataacctagaggtacacacggcagtggcccttgtcacagggaggatgaggagtggccctcagtgcattaccacagggcactgctctgggctcggcaggagggaggccatggtggcctctgggctgggaaatactgtttcactgtttgctcactgctgcaggaaggctgtggggacctggagcggccgtttttggagacaggcctggcaggacctcctggagggctaggtgtgggggtgggagctgcagttgggtgattccaggggccccggtgtgagttgtgggaggcaaagcccccttgctggggcagggaaggtacagcctattggcctgcggggcctcatgagccctcaaccaagtggggcaaggaggaggctgtgcttagcacgggcttggcttttaaagccaggggctggatgagggcatcagcaaggctggtccaaggtggggtcagggaagacgttgggcaccaaggtggggagtgggcgccggaggtcccggcaggatggagggaccaggaatgtgggcgtcggggcaccagtggcaccacaggagaggagccactgacatcctgggcaccgcctgcccccaggtgaacacacccgcagccgaggtgctctacacagtcatccaggactgggcccaattggatgcggggagcatggtgctggacgtgtgctgtggcaccggcaccattggcctggccctggcccgggtgagccctcctgccctgctgagggcaccctctccccaccccaagacccccattgaccccagctcaaagtcaccacagctgactccatcatgccccaggcccagctcctctttgctgcccacagggccccatgtactcccctccctgggtggggcgacaccacgctttcctgtttcagaaggtaaagagggtcattggggtcgagctatgcccagaggctgtggaggacgcccgggtgaacgcccaggacaatggtgagtggcaaggccgtgggtgggggtggggatgggggcagccgccacccctgctgcaagcctcagccacagccagggcttgggggctgcccgacaggtagagcaagtgagcaagctctttggctaggggttccccagggctggccctgctgggagggcatgtggccctctgacaggccacggtgccatctcttcagagttgagtaatgtggagttccactgcgggagggccgaggacctggtgcccaccctggtgagcagactggcctcccagcacctcgtggccatcctggacccaccccgtgctggcttgcgtgagtggcttttgcttaaggaggtggcacgggaacgaggacacatggggtggctcaccatgttatgcactctctggctgtggggacccagctggtgtttgcctcctcagattccaaggtgatcctggccatccggagagctaagaacctcaggcggctgctgtacgtctcatgcaacccccgggcagccatgggcaactttgtggagtgagtgtctgcaggggcctgggtgggggctaggcctgctaccaagcccccagctcccacaggagcccctgattagcctatcggctgaccttagcgccccccttttccccccacagcctctgcagagccccatctaaccgggtgaagggcattcccttccggccggtcaaggctgtggcagtggacctgttcccgcagaccccgcactgtgagatgctcatcctgtttgagagggtggagcaccccaatggcacaggggtcttggggccccacagccctccagctcaacccacaccaggacccccagataacaccctacaagaaactgggaccttcccctcatcctaggcccaggacccattatggggacaggagctgaagggctcccagggccccaggggcggggaaggcatggcttgctggccaggatattcagaggtaggcagccaaagggcacagaaccctgtgccccaccaggattggcctgctgctaggggccaggggccctgaccaggaagacaggtgggttcctgtagcctgttgcccatccccagggcctttgtggactagccaaggctgtgagggccagaataaacaactgctcaacaaagggtgtttctgtgatgagagccaggggtctgaacacagggcctgggtgccagggaaagggccaaactaggcctaggcagctctgcaagcctctctgcatggctgggggagtcagggcagagcttactttaaaaaagaatgttcgatttgatacttaaacttgaggagaggcagagagaggtctgggaactgcaccagctgggggcatggggtggagaacactgggcagagttggcccctctgtggccagcctggccctcagcccagcagagagggcatcaaccaaggaaggggccatgctggggtgctgctcagctgttacaaaggcagggtccagcctgcagggaggccccaggaggggatctggccagtcaagggtccacagggtgccagcctctcaccctcagaataaagacatcagccattc

SEQ ID NO: 14631 - DNA, 2886 bp, Homo sapiens
atagagacgctcggcctccgccgcacgcgctggcggactaagagtggctggcgaagcgagcggccggcgcgggcccctggcgggcgggcggtacagccccaagcctgagacccggacctgagcatcgcaggttcgagtcccgccccgcctggggcgaagccgggggtggcggcgacctcgcggcgttgcaccggctctgtgagcacctcccctctgagcacttcccttgtgacaggccacttcccttgtgacaggcccaggacgaggtggccaggcggcccccatggcgtccctggtctaggcggagaaccgcctgggcgatgagtgagaacctcgacaacgagggcccgaagcccatggagagctgtggccaggagagcagcagtgccctgagctgccctaccgtctcggtgccccctgcagccccggcagccctggaggaggtggagaaagagggcgctggggcggctacagggccggggcctcagcccgggctctacagctacatcagggatgacttgtttacctctgagatctttaaactggagctgcagaacgtgcctcgccacgccagcttcagcgacgtccggcgcttcctgggccgctttggtctgcagccccacaaaaccaaactctttgggcaaccaccctgcgcctttgtgacattccgcagcgctgcagagagggacaaggccctgcgcgttttgcatggtgccctctggaaaggccgcccactcagtgtgcgcctggcccggcccaaggccgaccccatggccaggaggaggcgacaggagggtgagagtgagccaccagtaacacgagtggccgacgtggtgacccctctatggacagtgccctatgctgagcagcttgagcggaagcagctggagtgcgagcaggtgctgcagaaacttgccaaggaaatcgggagcaccaaccgtgccttgctgccctggctgctcgagcagaggcacaagcacaacaaggcctgctgcccgctggagggggtcaggccatcaccccagcagactgagtatcgtaataagtgtgagtttctggttggcgtcggggtggatggggaggataacaccgtgggctgtcggctcggcaagtacaagggcgggacgtgtgctgtggcagccccgtttgacaccgtgcacatccccgaagccaccaagcaggtggtgaaggccttccaggagttcatccggtccactccatactcggcatacgacccagagacgtacacaggccactggaagcagctgactgtgcgcaccagccgccgccaccaggccatggccattgcctacttccacccccagaagctgagccctgaggagctggcagagctgaagacctccctagcgcagcacttcacagcagggccaggcagggccagtggagtgacctgcctctacttcgtggaggagggacagcgaaagactcctagccaggagggcctgcccctggagcatgtggctggggaccggtgcatccacgaggacctgctagggctgaccttccggatctctccacacgccttcttccaggtgaacacacccgcagccgaggtgctctacacagtcatccaggactgggcccaattggatgcggggagcatggtgctggacgtgtgctgtggcaccggcaccattggcctggccctggcccggaaggtaaagagggtcattggggtcgagctatgcccagaggctgtggaggacgcccgggtgaacgcccaggacaatgagttgagtaatgtggagttccactgcgggagggccgaggacctggtgcccaccctggtgagcagactggcctcccagcacctcgtggccatcctggacccaccccgtgctggcttgcattccaaggtgatcctggccatccggagagctaagaacctcaggcggctgctgtacgtctcatgcaacccccgggcagccatgggcaactttgtggacctctgcagagccccatctaaccgggtgaagggcattcccttccggccggtcaaggctgtggcagtggacctgttcccgcagaccccgcactgtgagatgctcatcctgtttgagagggtggagcaccccaatggcacaggggtcttggggccccacagccctccagctcaacccacaccaggacccccagataacaccctacaagaaactgggaccttcccctcatcctaggcccaggacccattatggggacaggagctgaagggctcccagggccccaggggcggggaaggcatggcttgctggccaggatattcagaggtaggcagccaaagggcacagaaccctgtgccccaccaggattggcctgctgctaggggccaggggccctgaccaggaagacaggtgggttcctgtagcctgttgcccatccccagggcctttgtggactagccaaggctgtgagggccagaataaacaactgctcaacaaagggtgtttctgtgatgagagccaggggtctgaacacagggcctgggtgccagggaaagggccaaactaggcctaggcagctctgcaagcctctctgcatggctgggggagtcagggcagagcttactttaaaaaagaatgttcgatttgatacttaaacttgaggagaggcagagagaggtctgggaactgcaccagctgggggcatggggtggagaacactgggcagagttggcccctctgtggccagcctggccctcagcccagcagagagggcatcaaccaaggaaggggccatgctggggtgctgctcagctgttacaaaggcagggtccagcctgcagggaggccccaggaggggatctggccagtcaagggtccacagggtgccagcctctcaccctcagaataaagacatcagccattc

SEQ ID NO: 14632 - DNA, 5518 bp, Homo sapiens; identical to SEQ ID NO: 1287

SEQ ID NO: 14633 - DNA, 2928 bp, Homo sapiens
aaaacgcccgcggcgcatgcccggcccgcccgtcagccagaggagcgcgcactcccggcgacacccgcgcgcacttccgtcccggccacgcgcgcctctagagctggctaaagtggttgggggttggatccggcgcgtgacgatgacgttgccagaagccaggatcatagagacgctcggcctccgccgcacgcgctggcggactaagagtggctggcgaagcgagcggccggcgcgggcccctggcgggcgggcggtacagccccaagcctgagacccggacctgagcatcgcaggcccaggacgaggtggccaggcggcccccatggcgtccctggtctaggcggagaaccgcctgggcgatgagtgagaacctcgacaacgagggcccgaagcccatggagagctgtggccaggagagcagcagtgccctgagctgccctaccgtctcggtgccccctgcagccccggcagccctggaggaggtggagaaagagggcgctggggcggctacagggccggggcctcagcccgggctctacagctacatcagggatgacttgtttacctctgagatctttaaactggagctgcagaacgtgcctcgccacgccagcttcagcgacgtccggcgcttcctgggccgctttggtctgcagccccacaaaaccaaactctttgggcaaccaccctgcgcctttgtgacattccgcagcgctgcagagagggacaaggccctgcgcgttttgcatggtgccctctggaaaggccgcccactcagtgtgcgcctggcccggcccaaggccgaccccatggccaggaggaggcgacaggagggtgagagtgagccaccagtaacacgagtggccgacgtggtgacccctctatggacagtgccctatgctgagcagcttgagcggaagcagctggagtgcgagcaggtgctgcagaaacttgccaaggaaatcgggagcaccaaccgtgccttgctgccctggctgctcgagcagaggcacaagcacaacaaggcctgctgcccgctggagggggtcaggccatcaccccagcagactgagtatcgtaataagtgtgagtttctggttggcgtcggggtggatggggaggataacaccgtgggctgtcggctcggcaagtacaagggcgggacgtgtgctgtggcagccccgtttgacaccgtgcacatccccgaagccaccaagcaggtggtgaaggccttccaggagttcatccggtccactccatactcggcatacgacccagagacgtacacaggccactggaagcagctgactgtgcgcaccagccgccgccaccaggccatggccattgcctacttccacccccagaagctgagccctgaggagctggcagagctgaagacctccctagcgcagcacttcacagcagggccaggcagggccagtggagtgacctgcctctacttcgtggaggagggacagcgaaagactcctagccaggagggcctgcccctggagcatgtggctggggaccggtgcatccacgaggacctgctagggctgaccttccggatctctccacacgccttcttccaggtgaacacacccgcagccgaggtgctctacacagtcatccaggactgggcccaattggatgcggggagcatggtgctggacgtgtgctgtggcaccggcaccattggcctggccctggcccggaaggtaaagagggtcattggggtcgagctatgcccagaggctgtggaggacgcccgggtgaacgcccaggacaatgagttgagtaatgtggagttccactgcgggagggccgaggacctggtgcccaccctggtgagcagactggcctcccagcacctcgtggccatcctggacccaccccgtgctggcttgcattccaaggtgatcctggccatccggagagctaagaacctcaggcggctgctgtacgtctcatgcaacccccgggcagccatgggcaactttgtggacctctgcagagccccatctaaccgggtgaagggcattcccttccggccggtcaaggctgtggcagtggacctgttcccgcagaccccgcactgtgagatgctcatcctgtttgagagggtggagcaccccaatggcacaggggtcttggggccccacagccctccagctcaacccacaccaggacccccagataacaccctacaagaaactgggaccttcccctcatcctaggcccaggacccattatggggacaggagctgaagggctcccagggccccaggggcggggaaggcatggcttgctggccaggatattcagaggtaggcagccaaagggcacagaaccctgtgccccaccaggattggcctgctgctaggggccaggggccctgaccaggaagacaggtgggttcctgtagcctgttgcccatccccagggcctttgtggactagccaaggctgtgagggccagaataaacaactgctcaacaaagggtgtttctgtgatgagagccaggggtctgaacacagggcctgggtgccagggaaagggccaaactaggcctaggcagctctgcaagcctctctgcatggctgggggagtcagggcagagcttactttaaaaaagaatgttcgatttgatacttaaacttgaggagaggcagagagaggtctgggaactgcaccagctgggggcatggggtggagaacactgggcagagttggcccctctgtggccagcctggccctcagcccagcagagagggcatcaaccaaggaaggggccatgctggggtgctgctcagctgttacaaaggcagggtccagcctgcagggaggccccaggaggggatctggccagtcaagggtccacagggtgccagcctctcaccctcagaataaagacatcagccattc

SEQ ID NO: 14634 - DNA, 4942 bp, Homo sapiens
gttgccagaagccaggatcatagagacgctcggcctccgccgcacgcgctggcggactaagagtggctggcgaagcgagcggccggcgcgggcccctggcgggcgggcggtacagccccaagcctgagacccggacctgagcatcgcaggttcgagtcccgccccgcctggggcgaagccgggggtggcggcgacctcgcggcgttgcaccggctctgtgagcacctcccctctgagcacttcccttgtgacaggccacttcccttgtgacaggcccaggacgaggtggccaggcggcccccatggcgtccctggtctaggcggagaaccgcctgggcgatgagtgagaacctcgacaacgaggtagagtgcggggagacgctgggtagagacggggatggggtgggaggaggcggggtgggtcaggaaacctgccagagaataggtggggacgaggcaggtgcgataggggaggaaaggagacgggaatggggtcgggagggtagactgggggaggggcagggctgagtgcagagtgcaccgacggaggtctgggtgtcccataaggaagcttggggggccaggcccccagggcctagtcctcaccctagcaccccatctgtccccacacagggcccgaagcccatggagagctgtggccaggagagcagcagtgccctgagctgccctaccgtctcggtgccccctgcagccccggcagccctggaggaggtggagaaagagggcgctggggcggctacagggccggggcctcagcccgggctctacagctacatcagggatgacttgtttacctctgagatctttaaactggagctgcagaacgtgcctcgccacgccagcttcagcgacgtccggcgcttcctgggccgctttggtctgcagccccacaaaaccaaactctttgggcaaccaccctgcgcctttgtgacattccgcagcgctgcagagagggacaaggccctgcgcgttttgcatggtgccctctggaaaggccgcccactcagtgtgcgcctggcccggcccaaggccgaccccatggccaggaggaggcgacaggagggtgagagtgagccaccagtaacacgagtggccgacgtggtgacccctctatggacagtgccctatgctgagcagcttgagcggaagcagctggagtgcgagcaggtgctgcagaaacttgccaagtgagtgtgggcgcaagacgcccctcttggccagggctctgcccggcctgtgcttcctcagcctgtccatgcaccagttgggaggcccagcacaggatctggcggcccctttgggagctagccagcaagacacccacgtcacagtgggcacaatgacatcccaaaggaggggtcaggagcctggacatttggggagtggcctggcatgggtcgggggcagtaggtggagtccaaccaccgatctgctcctcttacagggaaatcgggagcaccaaccgtgccttgctgccctggctgctcgagcagaggcacaagcacaacaaggcctgctgcccgctggagggggtcaggccatcaccccagcaggtcagactagacttcggtggccacaaacccctatcctgggttttgaaaaactttgcttttgctcacccttcctgttgatctccctgctttgtgttttcttctggtaacatcacatagttgtcagctgttcctcttgtttgactgccagcccctgtggggaaatcagggtttccaggcccaagcgctgggcagccagggtaaggtgcagctctctctccctgcagactgagtatcgtaataagtgtgagtttctggttggcgtcggggtggatggggaggataacaccgtgggctgtcggctcggcaagtacaagggcgggacgtgtgctgtggcagccccgtttgacaccgtgcacatccccgaagccaccaagcaggtggtgaaggccttccaggagttcatccggtgaggacctgtgacggggctcccgggaagtcctatgcggtgtgggagcagagggtggtgatcctgccccgggaattctggagtgcctgccatttcagccagatgaaggaaggtgtggccagaggagagagcagggggactgcttgcccagttgtgggcacttgggccagctcgtgattcccacaggtccactccatactcggcatacgacccagagacgtacacaggccactggaagcagctgactgtgcgcaccagccgccgccaccaggccatggccattgcctacttccacccccaggtctcaacgggggccctgctgggggagggtgcctagcctaggtgggcctcagcacagcctgatgggaacttttcaccacttactccagaagctgagccctgaggagctggcagagctgaagacctccctagcgcagcacttcacagcagggccaggcagggccagtggagtgacctgcctctacttcgtggaggagggacagcggtaaggagcccgagtggggcggggcaggtccctgcagggactgtgacactgaaggacctgcaccttcgcccacagaaagactcctagccaggagggcctgcccctggagcatgtggctggggaccggtgcatccacgaggacctgctagggctgaccttccggatctctccacacgccttcttccaggtagccatgagtccctggtgggcatggggacatgttgagggaggcctgacgcaccatcaggacgtgatgggaacagtgggctcaggcggtgagatttgggggagtatccaggcaggtgagccacaggggagggtgaagtaagaaagaggttggtcatcactgatttgactcgggataacctagaggtacacacggcagtggcccttgtcacagggaggatgaggagtggccctcagtgcattaccacagggcactgctctgggctcggcaggagggaggccatggtggcctctgggctgggaaatactgtttcactgtttgctcactgctgcaggaaggctgtggggacctggagcggccgtttttggagacaggcctggcaggacctcctggagggctaggtgtgggggtgggagctgcagttgggtgattccaggggccccggtgtgagttgtgggaggcaaagcccccttgctggggcagggaaggtacagcctattggcctgcggggcctcatgagccctcaaccaagtggggcaaggaggaggctgtgcttagcacgggcttggcttttaaagccaggggctggatgagggcatcagcaaggctggtccaaggtggggtcagggaagacgttgggcaccaaggtggggagtgggcgccggaggtcccggcaggatggagggaccaggaatgtgggcgtcggggcaccagtggcaccacaggagaggagccactgacatcctgggcaccgcctgcccccaggtgaacacacccgcagccgaggtgctctacacagtcatccaggactgggcccaattggatgcggggagcatggtgctggacgtgtgctgtggcaccggcaccattggcctggccctggcccgggtgagccctcctgccctgctgagggcaccctctccccaccccaagacccccattgaccccagctcaaagtcaccacagctgactccatcatgccccaggcccagctcctctttgctgcccacagggccccatgtactcccctccctgggtggggcgacaccacgctttcctgtttcagaaggtaaagagggtcattggggtcgagctatgcccagaggctgtggaggacgcccgggtgaacgcccaggacaatggtgagtggcaaggccgtgggtgggggtggggatgggggcagccgccacccctgctgcaagcctcagccacagccagggcttgggggctgcccgacaggtagagcaagtgagcaagctctttggctaggggttccccagggctggccctgctgggagggcatgtggccctctgacaggccacggtgccatctcttcagagttgagtaatgtggagttccactgcgggagggccgaggacctggtgcccaccctggtgagcagactggcctcccagcacctcgtggccatcctggacccaccccgtgctggcttgcgtgagtggcttttgcttaaggaggtggcacgggaacgaggacacatggggtggctcaccatgttatgcactctctggctgtggggacccagctggtgtttgcctcctcagattccaaggtgatcctggccatccggagagctaagaacctcaggcggctgctgtacgtctcatgcaacccccgggcagccatgggcaactttgtggagtgagtgtctgcaggggcctgggtgggggctaggcctgctaccaagcccccagctcccacaggagcccctgattagcctatcggctgaccttagcgccccccttttccccccacagcctctgcagagccccatctaaccgggtgaagggcattcccttccggccggtcaaggctgtggcagtggacctgttcccgcagaccccgcactgtgagatgctcatcctgtttgagagggtggagcaccccaatggcacaggggtcttggggccccacagccctccagctcaacccacaccaggacccccagataacaccctacaagaaactgggaccttcccctcatcctaggcccaggacccattatggggacaggagctgaagggctcccagggccccaggggcggggaaggcatggcttgctggccaggatattcagaggtaggcagccaaagggcacagaaccctgtgccccaccaggattggcctgctgctaggggccaggggccctgaccaggaagacaggtgggttcctgtagcctgttgcccatccccagggcctttgtggactagccaaggctgtgagggccagaataaacaactgctcaac

SEQ ID NO: 14635 - DNA, 2498 bp, Homo sapiens
gttgccagaagccaggatcatagagacgctcggcctccgccgcacgcgctggcggactaagagtggctggcgaagcgagcggccggcgcgggcccctggcgggcgggcggtacagccccaagcctgagacccggacctgagcatcgcaggttcgagtcccgccccgcctggggcgaagccgggggtggcggcgacctcgcggcgttgcaccggctctgtgagcacctcccctctgagcacttcccttgtgacaggccacttcccttgtgacaggcccaggacgaggtggccaggcggcccccatggcgtccctggtctaggcggagaaccgcctgggcgatgagtgagaacctcgacaacgagggcccgaagcccatggagagctgtggccaggagagcagcagtgccctgagctgccctaccgtctcggtgccccctgcagccccggcagccctggaggaggtggagaaagagggcgctggggcggctacagggccggggcctcagcccgggctctacagctacatcagggatgacttgtttacctctgagatctttaaactggagctgcagaacgtgcctcgccacgccagcttcagcgacgtccggcgcttcctgggccgctttggtctgcagccccacaaaaccaaactctttgggcaaccaccctgcgcctttgtgacattccgcagcgctgcagagagggacaaggccctgcgcgttttgcatggtgccctctggaaaggccgcccactcagtgtgcgcctggcccggcccaaggccgaccccatggccaggaggaggcgacaggagggtgagagtgagccaccagtaacacgagtggccgacgtggtgacccctctatggacagtgccctatgctgagcagcttgagcggaagcagctggagtgcgagcaggtgctgcagaaacttgccaaggaaatcgggagcaccaaccgtgccttgctgccctggctgctcgagcagaggcacaagcacaacaaggcctgctgcccgctggagggggtcaggccatcaccccagcagactgagtatcgtaataagtgtgagtttctggttggcgtcggggtggatggggaggataacaccgtgggctgtcggctcggcaagtacaagggcgggacgtgtgctgtggcagccccgtttgacaccgtgcacatccccgaagccaccaagcaggtggtgaaggccttccaggagttcatccggtccactccatactcggcatacgacccagagacgtacacaggccactggaagcagctgactgtgcgcaccagccgccgccaccaggccatggccattgcctacttccacccccagaagctgagccctgaggagctggcagagctgaagacctccctagcgcagcacttcacagcagggccaggcagggccagtggagtgacctgcctctacttcgtggaggagggacagcgaaagactcctagccaggagggcctgcccctggagcatgtggctggggaccggtgcatccacgaggacctgctagggctgaccttccggatctctccacacgccttcttccaggtgaacacacccgcagccgaggtgctctacacagtcatccaggactgggcccaattggatgcggggagcatggtgctggacgtgtgctgtggcaccggcaccattggcctggccctggcccggaaggtaaagagggtcattggggtcgagctatgcccagaggctgtggaggacgcccgggtgaacgcccaggacaatgagttgagtaatgtggagttccactgcgggagggccgaggacctggtgcccaccctggtgagcagactggcctcccagcacctcgtggccatcctggacccaccccgtgctggcttgcattccaaggtgatcctggccatccggagagctaagaacctcaggcggctgctgtacgtctcatgcaacccccgggcagccatgggcaactttgtggacgccccccttttccccccacagcctctgcagagccccatctaaccgggtgaagggcattcccttccggccggtcaaggctgtggcagtggacctgttcccgcagaccccgcactgtgagatgctcatcctgtttgagagggtggagcaccccaatggcacaggggtcttggggccccacagccctccagctcaacccacaccaggacccccagataacaccctacaagaaactgggaccttcccctcatcctaggcccaggacccattatggggacaggagctgaagggctcccagggccccaggggcggggaaggcatggcttgctggccaggatattcagaggtaggcagccaaagggcacagaaccctgtgccccaccaggattggcctgctgctaggggccaggggccctgaccaggaagacaggtgggttcctgtagcctgttgcccatccccagggcctttgtggactagccaaggctgtgagggccagaataaacaactgctcaac

SEQ ID NO: 14636 - DNA, 4885 bp, Homo sapiens
agacgctcggcctccgccgcacgcgctggcggactaagagtggctggcgaagcgagcggccggcgcgggcccctggcgggcgggcggtacagccccaagcctgagacccggacctgagcatcgcaggttcgagtcccgccccgcctggggcgaagccgggggtggcggcgacctcgcggcgttgcaccggctctgtgagcacctcccctctgagcacttcccttgtgacaggccacttcccttgtgacaggcccaggacgaggtggccaggcggcccccatggcgtccctggtctaggcggagaaccgcctgggcgatgagtgagaacctcgacaacgaggtagagtgcggggagacgctgggtagagacggggatggggtgggaggaggcggggtgggtcaggaaacctgccagagaataggtggggacgaggcaggtgcgataggggaggaaaggagacgggaatggggtcgggagggtagactgggggaggggcagggctgagtgcagagtgcaccgacggaggtctgggtgtcccataaggaagcttggggggccaggcccccagggcctagtcctcaccctagcaccccatctgtccccacacagggcccgaagcccatggagagctgtggccaggagagcagcagtgccctgagctgccctaccgtctcggtgccccctgcagccccggcagccctggaggaggtggagaaagagggcgctggggcggctacagggccggggcctcagcccgggctctacagctacatcagggatgacttgtttacctctgagatctttaaactggagctgcagaacgtgcctcgccacgccagcttcagcgacgtccggcgcttcctgggccgctttggtctgcagccccacaaaaccaaactctttgggcaaccaccctgcgcctttgtgacattccgcagcgctgcagagagggacaaggccctgcgcgttttgcatggtgccctctggaaaggccgcccactcagtgtgcgcctggcccggcccaaggccgaccccatggccaggaggaggcgacaggagggtgagagtgagccaccagtaacacgagtggccgacgtggtgacccctctatggacagtgccctatgctgagcagcttgagcggaagcagctggagtgcgagcaggtgctgcagaaacttgccaagtgagtgtgggcgcaagacgcccctcttggccagggctctgcccggcctgtgcttcctcagcctgtccatgcaccagttgggaggcccagcacaggatctggcggcccctttgggagctagccagcaagacacccacgtcacagtgggcacaatgacatcccaaaggaggggtcaggagcctggacatttggggagtggcctggcatgggtcgggggcagtaggtggagtccaaccaccgatctgctcctcttacagggaaatcgggagcaccaaccgtgccttgctgccctggctgctcgagcagaggcacaagcacaacaaggcctgctgcccgctggagggggtcaggccatcaccccagcaggtcagactagacttcggtggccacaaacccctatcctgggttttgaaaaactttgcttttgctcacccttcctgttgatctccctgctttgtgttttcttctggtaacatcacatagttgtcagctgttcctcttgtttgactgccagcccctgtggggaaatcagggtttccaggcccaagcgctgggcagccagggtaaggtgcagctctctctccctgcagactgagtatcgtaataagtgtgagtttctggttggcgtcggggtggatggggaggataacaccgtgggctgtcggctcggcaagtacaagggcgggacgtgtgctgtggcagccccgtttgacaccgtgcacatccccgaagccaccaagcaggtggtgaaggccttccaggagttcatccggtgaggacctgtgacggggctcccgggaagtcctatgcggtgtgggagcagagggtggtgatcctgccccgggaattctggagtgcctgccatttcagccagatgaaggaaggtgtggccagaggagagagcagggggactgcttgcccagttgtgggcacttgggccagctcgtgattcccacaggtccactccatactcggcatacgacccagagacgtacacaggccactggaagcagctgactgtgcgcaccagccgccgccaccaggccatggccattgcctacttccacccccaggtctcaacgggggccctgctgggggagggtgcctagcctaggtgggcctcagcacagcctgatgggaacttttcaccacttactccagaagctgagccctgaggagctggcagagctgaagacctccctagcgcagcacttcacagcagggccaggcagggccagtggagtgacctgcctctacttcgtggaggagggacagcggtaaggagcccgagtggggcggggcaggtccctgcagggactgtgacactgaaggacctgcaccttcgcccacagaaagactcctagccaggagggcctgcccctggagcatgtggctggggaccggtgcatccacgaggacctgctagggctgaccttccggatctctccacacgccttcttccaggtagccatgagtccctggtgggcatggggacatgttgagggaggcctgacgcaccatcaggacgtgatgggaacagtgggctcaggcggtgagatttgggggagtatccaggcaggtgagccacaggggagggtgaagtaagaaagaggttggtcatcactgatttgactcgggataacctagaggtacacacggcagtggcccttgtcacagggaggatgaggagtggccctcagtgcattaccacagggcactgctctgggctcggcaggagggaggccatggtggcctctgggctgggaaatactgtttcactgtttgctcactgctgcaggaaggctgtggggacctggagcggccgtttttggagacaggcctggcaggacctcctggagggctaggtgtgggggtgggagctgcagttgggtgattccaggggccccggtgtgagttgtgggaggcaaagcccccttgctggggcagggaaggtacagcctattggcctgcggggcctcatgagccctcaaccaagtggggcaaggaggaggctgtgcttagcacgggcttggcttttaaagccaggggctggatgagggcatcagcaaggctggtccaaggtggggtcagggaagacgttgggcaccaaggtggggagtgggcgccggaggtcccggcaggatggagggaccaggaatgtgggcgtcggggcaccagtggcaccacaggagaggagccactgacatcctgggcaccgcctgcccccaggtgaacacacccgcagccgaggtgctctacacagtcatccaggactgggcccaattggatgcggggagcatggtgctggacgtgtgctgtggcaccggcaccattggcctggccctggcccgggtgagccctcctgccctgctgagggcaccctctccccaccccaagacccccattgaccccagctcaaagtcaccacagctgactccatcatgccccaggcccagctcctctttgctgcccacagggccccatgtactcccctccctgggtggggcgacaccacgctttcctgtttcagaaggtaaagagggtcattggggtcgagctatgcccagaggctgtggaggacgcccgggtgaacgcccaggacaatggtgagtggcaaggccgtgggtgggggtggggatgggggcagccgccacccctgctgcaagcctcagccacagccagggcttgggggctgcccgacaggtagagcaagtgagcaagctctttggctaggggttccccagggctggccctgctgggagggcatgtggccctctgacaggccacggtgccatctcttcagagttgagtaatgtggagttccactgcgggagggccgaggacctggtgcccaccctggtgagcagactggcctcccagcacctcgtggccatcctggacccaccccgtgctggcttgcgtgagtggcttttgcttaaggaggtggcacgggaacgaggacacatggggtggctcaccatgttatgcactctctggctgtggggacccagctggtgtttgcctcctcagattccaaggtgatcctggccatccggagagctaagaacctcaggcggctgctgtacgtctcatgcaacccccgggcagccatgggcaactttgtggagtgagtgtctgcaggggcctgggtgggggctaggcctgctaccaagcccccagctcccacaggagcccctgattagcctatcggctgaccttagcgccccccttttccccccacagcctctgcagagccccatctaaccgggtgaagggcattcccttccggccggtcaaggctgtggcagtggacctgttcccgcagaccccgcactgtgagatgctcatcctgtttgagagggtggagcaccccaatggcacaggggtcttggggccccacagccctccagctcaacccacaccaggacccccagataacaccctacaagaaactgggaccttcccctcatcctaggcccaggacccattatggggacaggagctgaagggctcccagggccccaggggcggggaaggcatggcttgctggccaggatattcagaggtaggcagccaaagggcacagaaccctgtgccccaccaggattggcctgctgctaggggccaggggccctgaccaggaagacaggtgggttcctgtagcctgttgcccatccccagggcctttgtggactagcca

SEQ ID NO: 14637 - DNA, 2473 bp, Homo sapiens
agacgctcggcctccgccgcacgcgctggcggactaagagtggctggcgaagcgagcggccggcgcgggcccctggcgggcgggcggtacagccccaagcctgagacccggacctgagcatcgcaggttcgagtcccgccccgcctggggcgaagccgggggtggcggcgacctcgcggcgttgcaccggctctgtgagcacctcccctctgagcacttcccttgtgacaggccacttcccttgtgacaggcccaggacgaggtggccaggcggcccccatggcgtccctggtctaggcggagaaccgcctgggcgatgagtgagaacctcgacaacgagggcccgaagcccatggagagctgtggccaggagagcagcagtgccctgagctgccctaccgtctcggtgccccctgcagccccggcagccctggaggaggtggagaaagagggcgctggggcggctacagggccggggcctcagcccgggctctacagctacatcagggatgacttgtttacctctgagatctttaaactggagctgcagaacgtgcctcgccacgccagcttcagcgacgtccggcgcttcctgggccgctttggtctgcagccccacaaaaccaaactctttgggcaaccaccctgcgcctttgtgacattccgcagcgctgcagagagggacaaggccctgcgcgttttgcatggtgccctctggaaaggccgcccactcagtgtgcgcctggcccggcccaaggccgaccccatggccaggaggaggcgacaggagggtgagagtgagccaccagtaacacgagtggccgacgtggtgacccctctatggacagtgccctatgctgagcagcttgagcggaagcagctggagtgcgagcaggtgctgcagaaacttgccaaggaaatcgggagcaccaaccgtgccttgctgccctggctgctcgagcagaggcacaagcacaacaaggcctgctgcccgctggagggggtcaggccatcaccccagcagactgagtatcgtaataagtgtgagtttctggttggcgtcggggtggatggggaggataacaccgtgggctgtcggctcggcaagtacaagggcgggacgtgtgctgtggcagccccgtttgacaccgtgcacatccccgaagccaccaagcaggtggtgaaggccttccaggagttcatccggtccactccatactcggcatacgacccagagacgtacacaggccactggaagcagctgactgtgcgcaccagccgccgccaccaggccatggccattgcctacttccacccccagaagctgagccctgaggagctggcagagctgaagacctccctagcgcagcacttcacagcagggccaggcagggccagtggagtgacctgcctctacttcgtggaggagggacagcgaaagactcctagccaggagggcctgcccctggagcatgtggctggggaccggtgcatccacgaggacctgctagggctgaccttccggatctctccacacgccttcttccaggtgaacacacccgcagccgaggtgctctacacagtcatccaggactgggcccaattggatgcggggagcatggtgctggacgtgtgctgtggcaccggcaccattggcctggccctggcccggggccccatgtactcccctccctgggtggggcgacaccacgctttcctgtttcagaaggtaaagagggtcattggggtcgagctatgcccagaggctgtggaggacgcccgggtgaacgcccaggacaatgagttgagtaatgtggagttccactgcgggagggccgaggacctggtgcccaccctggtgagcagactggcctcccagcacctcgtggccatcctggacccaccccgtgctggcttgcattccaaggtgatcctggccatccggagagctaagaacctcaggcggctgctgtacgtctcatgcaacccccgggcagccatgggcaactttgtggacctctgcagagccccatctaaccgggtgaagggcattcccttccggccggtcaaggctgtggcagtggacctgttcccgcagaccccgcactgtgagatgctcatcctgtttgagagggtggagcaccccaatggcacaggggtcttggggccccacagccctccagctcaacccacaccaggacccccagataacaccctacaagaaactgggaccttcccctcatcctaggcccaggacccattatggggacaggagctgaagggctcccagggccccaggggcggggaaggcatggcttgctggccaggatattcagaggtaggcagccaaagggcacagaaccctgtgccccaccaggattggcctgctgctaggggccaggggccctgaccaggaagacaggtgggttcctgtagcctgttgcccatccccagggcctttgtggactagcca

SEQ ID NO: 14638 - DNA, 1241 bp, Homo sapiens
gtgaacacacccgcagccgaggtgctctacacagtcatccaggactgggcccaattggatgcggggagcatggtgctggacgtgtgctgtggcaccggcaccattggcctggccctggcccgggtgagccctcctgccctgctgagggcaccctctccccaccccaagacccccattgaccccagctcaaagtcaccacagctgactccatcatgccccaggcccagctcctctttgctgcccacagggccccatgtactcccctccctgggtggggcgacaccacgctttcctgtttcagaaggtaaagagggtcattggggtcgagctatgcccagaggctgtggaggacgcccgggtgaacgcccaggacaatggtgagtggcaaggccgtgggtgggggtggggatgggggcagccgccacccctgctgcaagcctcagccacagccagggcttgggggctgcccgacaggtagagcaagtgagcaagctctttggctaggggttccccagggctggccctgctgggagggcatgtggccctctgacaggccacggtgccatctcttcagagttgagtaatgtggagttccactgcgggagggccgaggacctggtgcccaccctggtgagcagactggcctcccagcacctcgtggccatcctggacccaccccgtgctggcttgcgtgagtggcttttgcttaaggaggtggcacgggaacgaggacacatggggtggctcaccatgttatgcactctctggctgtggggacccagctggtgtttgcctcctcagattccaaggtgatcctggccatccggagagctaagaacctcaggcggctgctgtacgtctcatgcaacccccgggcagccatgggcaactttgtggagtgagtgtctgcaggggcctgggtgggggctaggcctgctaccaagcccccagctcccacaggagcccctgattagcctatcggctgaccttagcgccccccttttccccccacagcctctgcagagccccatctaaccgggtgaagggcattcccttccggccggtcaaggctgtggcagtggacctgttcccgcagaccccgcactgtgagatgctcatcctgtttgagagggtggagcaccccaatggcacaggggtcttggggccccacagccctccagctcaacccacaccaggacccccagataacaccctacaagaaactgggaccttcccctcat

SEQ ID NO: 14639 - DNA, 426 bp, Homo sapiens
gtgaacacacccgcagccgaggtgctctacacagtcatccaggactgggcccaattggatgcggggagcatggtgctggacgtgtgctgtggcaccggcaccattggcctggccctggcccggaaggtaaagagggtcattggggtcgagctatgcccagaggctgtggaggacgcccgggtgaacgcccaggacaatgcctctgcagagccccatctaaccgggtgaagggcattcccttccggccggtcaaggctgtggcagtggacctgttcccgcagaccccgcactgtgagatgctcatcctgtttgagagggtggagcaccccaatggcacaggggtcttggggccccacagccctccagctcaacccacaccaggacccccagataacaccctacaagaaactgggaccttcccctcat

SEQ ID NO: 14640 - DNA, 1207 bp, Homo sapiens
aaggtaaagagggtcattggggtcgagctatgcccagaggctgtggaggacgcccgggtgaacgcccaggacaatggtgagtggcaaggccgtgggtgggggtggggatgggggcagccgccacccctgctgcaagcctcagccacagccagggcttgggggctgcccgacaggtagagcaagtgagcaagctctttggctaggggttccccagggctggccctgctgggagggcatgtggccctctgacaggccacggtgccatctcttcagagttgagtaatgtggagttccactgcgggagggccgaggacctggtgcccaccctggtgagcagactggcctcccagcacctcgtggccatcctggacccaccccgtgctggcttgcgtgagtggcttttgcttaaggaggtggcacgggaacgaggacacatggggtggctcaccatgttatgcactctctggctgtggggacccagctggtgtttgcctcctcagattccaaggtgatcctggccatccggagagctaagaacctcaggcggctgctgtacgtctcatgcaacccccgggcagccatgggcaactttgtggagtgagtgtctgcaggggcctgggtgggggctaggcctgctaccaagcccccagctcccacaggagcccctgattagcctatcggctgaccttagcgccccccttttccccccacagcctctgcagagccccatctaaccgggtgaagggcattcccttccggccggtcaaggctgtggcagtggacctgttcccgcagaccccgcactgtgagatgctcatcctgtttgagagggtggagcaccccaatggcacaggggtcttggggccccacagccctccagctcaacccacaccaggacccccagataacaccctacaagaaactgggaccttcccctcatcctaggcccaggacccattatggggacaggagctgaagggctcccagggccccaggggcggggaaggcatggcttgctggccaggatattcagaggtaggcagccaaagggcacagaaccctgtgccccaccaggattggcctgctgctaggggccaggggccctgaccaggaagacaggtgggttcctgtagcctgttgcccatccccagggcctttgtggactagccaaggctgtgagggccagaataaacaactgctcaacaaa

SEQ ID NO: 14641 - DNA, 739 bp, Homo sapiens
aaggtaaagagggtcattggggtcgagctatgcccagaggctgtggaggacgcccgggtgaacgcccaggacaatgagttgagtaatgtggagttccactgcgggagggccgaggacctggtgcccaccctggtgagcagactggcctcccagcacctcgtggccatcctggacccaccccgtgctggcttgcattccaaggtgatcctggccatccggagagctaagaacctcaggcggctgctcctctgcagagccccatctaaccgggtgaagggcattcccttccggccggtcaaggctgtggcagtggacctgttcccgcagaccccgcactgtgagatgctcatcctgtttgagagggtggagcaccccaatggcacaggggtcttggggccccacagccctccagctcaacccacaccaggacccccagataacaccctacaagaaactgggaccttcccctcatcctaggcccaggacccattatggggacaggagctgaagggctcccagggccccaggggcggggaaggcatggcttgctggccaggatattcagaggtaggcagccaaagggcacagaaccctgtgccccaccaggattggcctgctgctaggggccaggggccctgaccaggaagacaggtgggttcctgtagcctgttgcccatccccagggcctttgtggactagccaaggctgtgagggccagaataaacaactgctcaacaaa

SEQ ID NO: 14642 - DNA, 998 bp, Homo sapiens
agaagccaggatcatagagacgctcggcctccgccgcacgcgctggcggactaagagtggctggcgaagcgagcggccggcgcgggcccctggcgggcgggcggtacagccccaagcctgagacccggacctgagcatcgcaggttcgagtcccgccccgcctggggcgaagccgggggtggcggcgacctcgcggcgttgcaccggctctgtgagcacctcccctctgagcacttcccttgtgacaggccacttcccttgtgacaggcccaggacgaggtggccaggcggcccccatggcgtccctggtctaggcggagaaccgcctgggcgatgagtgagaacctcgacaacgaggtagagtgcggggagacgctgggtagagacggggatggggtgggaggaggcggggtgggtcaggaaacctgccagagaataggtggggacgaggcaggtgcgataggggaggaaaggagacgggaatggggtcgggagggtagactgggggaggggcagggctgagtgcagagtgcaccgacggaggtctgggtgtcccataaggaagcttggggggccaggcccccagggcctagtcctcaccctagcaccccatctgtccccacacagggcccgaagcccatggagagctgtggccaggagagcagcagtgccctgagctgccctaccgtctcggtgccccctgcagccccggcagccctggaggaggtggagaaagagggcgctggggcggctacagggccggggcctcagcccgggctctacagctacatcagggatgacttgtttacctctgagatctttaaactggagctgcagaacgtgcctcgccacgccagcttcagcgacgtccggcgcttcctgggccgctttggtctgcagccccacaaaaccaaactctttgggcaaccaccctgcgcctttgtgacattccgcagcgctgcagagagggacaaggccctgcgcgttttgcatggtgc

SEQ ID NO: 14643 - DNA, 582 bp, Homo sapiens
agaagccaggatcatagagacgctcggcctccgccgcacgcgctggcggactaagagtggctggcgaagcgagcggccggcgcgggcccctggcgggcgggcggtacagccccaagcctgagacccggacctgagcatcgcaggttcgagtcccgccccgcctggggcgaagccgggggtggcggcgacctcgcggcgttgcaccggctctggcccgaagcccatggagagctgtggccaggagagcagcagtgccctgagctgccctaccgtctcggtgccccctgcagccccggcagccctggaggaggtggagaaagagggcgctggggcggctacagggccggggcctcagcccgggctctacagctacatcagggatgacttgtttacctctgagatctttaaactggagctgcagaacgtgcctcgccacgccagcttcagcgacgtccggcgcttcctgggccgctttggtctgcagccccacaaaaccaaactctttgggcaaccaccctgcgcctttgtgacattccgcagcgctgcagagagggacaaggccctgcgcgttttgcatggtgc

SEQ ID NO: 14644 - DNA, 856 bp, Homo sapiens
actttgcttttgctcacccttcctgttgatctccctgctttgtgttttcttctggtaacatcacatagttgtcagctgttcctcttgtttgactgccagcccctgtggggaaatcagggtttccaggcccaagcgctgggcagccagggtaaggtgcagctctctctccctgcagactgagtatcgtaataagtgtgagtttctggttggcgtcggggtggatggggaggataacaccgtgggctgtcggctcggcaagtacaagggcgggacgtgtgctgtggcagccccgtttgacaccgtgcacatccccgaagccaccaagcaggtggtgaaggccttccaggagttcatccggtgaggacctgtgacggggctcccgggaagtcctatgcggtgtgggagcagagggtggtgatcctgccccgggaattctggagtgcctgccatttcagccagatgaaggaaggtgtggccagaggagagagcagggggactgcttgcccagttgtgggcacttgggccagctcgtgattcccacaggtccactccatactcggcatacgacccagagacgtacacaggccactggaagcagctgactgtgcgcaccagccgccgccaccaggccatggccattgcctacttccacccccaggtctcaacgggggccctgctgggggagggtgcctagcctaggtgggcctcagcacagcctgatgggaacttttcaccacttactccagaagctgagccctgaggagctggcagagctgaagacctccctagcgcagcacttcacagcagggccaggcagggccagtggagtgacctgcctctacttcgtggaggaggg

SEQ ID NO: 14645 - DNA, 582 bp, Homo sapiens
actttgcttttgctcacccttcctgttgatctccctgctttgtgttttcttctggtaacatcacatagttgtcagctgttcctcttgtttgactgccagcccctgtggggaaatcagggtttccaggcccaagcgctgggcagccagggtaaggtgcagctctctctccctgcagactgagtatcgtaataagtgtgagtttctggttggcgtcggggtggatggggaggataacaccgtgggctgtcggctcggcaagtacaagggcgggacgtgtgctgtggcagccccgtttgacaccgtgcacatccccgaagccaccaagcaggtggtgaaggccttccaggagttcatccggtccactccatactcggcatacgacccagagacgtacacaggccactggaagcagctgactgtgcgcaccagccgccgccaccaggccatggccattgcctacttccacccccagaagctgagccctgaggagctggcagagctgaagacctccctagcgcagcacttcacagcagggccaggcagggccagtggagtgacctgcctctacttcgtggaggaggg

SEQ ID NO: 14646 - DNA, 1689 bp, Homo sapiens
ataacaccgtgggctgtcggctcggcaagtacaagggcgggacgtgtgctgtggcagccccgtttgacaccgtgcacatccccgaagccaccaagcaggtggtgaaggccttccaggagttcatccggtgaggacctgtgacggggctcccgggaagtcctatgcggtgtgggagcagagggtggtgatcctgccccgggaattctggagtgcctgccatttcagccagatgaaggaaggtgtggccagaggagagagcagggggactgcttgcccagttgtgggcacttgggccagctcgtgattcccacaggtccactccatactcggcatacgacccagagacgtacacaggccactggaagcagctgactgtgcgcaccagccgccgccaccaggccatggccattgcctacttccacccccaggtctcaacgggggccctgctgggggagggtgcctagcctaggtgggcctcagcacagcctgatgggaacttttcaccacttactccagaagctgagccctgaggagctggcagagctgaagacctccctagcgcagcacttcacagcagggccaggcagggccagtggagtgacctgcctctacttcgtggaggagggacagcggtaaggagcccgagtggggcggggcaggtccctgcagggactgtgacactgaaggacctgcaccttcgcccacagaaagactcctagccaggagggcctgcccctggagcatgtggctggggaccggtgcatccacgaggacctgctagggctgaccttccggatctctccacacgccttcttccaggtagccatgagtccctggtgggcatggggacatgttgagggaggcctgacgcaccatcaggacgtgatgggaacagtgggctcaggcggtgagatttgggggagtatccaggcaggtgagccacaggggagggtgaagtaagaaagaggttggtcatcactgatttgactcgggataacctagaggtacacacggcagtggcccttgtcacagggaggatgaggagtggccctcagtgcattaccacagggcactgctctgggctcggcaggagggaggccatggtggcctctgggctgggaaatactgtttcactgtttgctcactgctgcaggaaggctgtggggacctggagcggccgtttttggagacaggcctggcaggacctcctggagggctaggtgtgggggtgggagctgcagttgggtgattccaggggccccggtgtgagttgtgggaggcaaagcccccttgctggggcagggaaggtacagcctattggcctgcggggcctcatgagccctcaaccaagtggggcaaggaggaggctgtgcttagcacgggcttggcttttaaagccaggggctggatgagggcatcagcaaggctggtccaaggtggggtcagggaagacgttgggcaccaaggtggggagtgggcgccggaggtcccggcaggatggagggaccaggaatgtgggcgtcggggcaccagtggcaccacaggagaggagccactgacatcctgggcaccgcctgcccccaggtgaacacacccgcagccgaggtgctctacacagtcatccaggactgggcccaattggatgcggggagcatggtgctggacgtgtgctgtggcaccggcaccatt

SEQ ID NO: 14647 - DNA, 757 bp, Homo sapiens
ataacaccgtgggctgtcggctcggcaagtacaagggcgggacgtgtgctgtggcagccccgtttgacaccgtgcacatccccgaagccaccaagcaggtggtgaaggccttccaggagttcatccggtgaggacctgtgacggggctcccgggaagtcctatgcggtgtgggagcagagggtggtgatcctgccccgggaattctggagtgcctgccatttcagccagatgaaggaaggtgtggccagaggagagagcagggggactgcttgcccagttgtgggcacttgggccagctcgtgattcccacaggtccactccatactcggcatacgacccagagacgtacacaggccactggaagcagctgactgtgcgcaccagccgccgccaccaggccatggccattgcctacttccacccccagaagctgagccctgaggagctggcagagctgaagacctccctagcgcagcacttcacagcagggccaggcagggccagtggagtgacctgcctctacttcgtggaggagggacagcgactcctagccaggagggcctgcccctggagcatgtggctggggaccggtgcatccacgaggacctgctagggctgaccttccggatctctccacacgccttcttccaggtgaacacacccgcagccgaggtgctctacacagtcatccaggactgggcccaattggatgcggggagcatggtgctggacgtgtgctgtggcaccggcaccatt

SEQ ID NO: 14648 - DNA, 1594 bp, Homo sapiens
cacgcgctggcggactaagagtggctggcgaagcgagcggccggcgcgggcccctggcgggcgggcggtacagccccaagcctgagacccggacctgagcatcgcaggttcgagtcccgccccgcctggggcgaagccgggggtggcggcgacctcgcggcgttgcaccggctctgtgagcacctcccctctgagcacttcccttgtgacaggccacttcccttgtgacaggcccaggacgaggtggccaggcggcccccatggcgtccctggtctaggcggagaaccgcctgggcgatgagtgagaacctcgacaacgaggtagagtgcggggagacgctgggtagagacggggatggggtgggaggaggcggggtgggtcaggaaacctgccagagaataggtggggacgaggcaggtgcgataggggaggaaaggagacgggaatggggtcgggagggtagactgggggaggggcagggctgagtgcagagtgcaccgacggaggtctgggtgtcccataaggaagcttggggggccaggcccccagggcctagtcctcaccctagcaccccatctgtccccacacagggcccgaagcccatggagagctgtggccaggagagcagcagtgccctgagctgccctaccgtctcggtgccccctgcagccccggcagccctggaggaggtggagaaagagggcgctggggcggctacagggccggggcctcagcccgggctctacagctacatcagggatgacttgtttacctctgagatctttaaactggagctgcagaacgtgcctcgccacgccagcttcagcgacgtccggcgcttcctgggccgctttggtctgcagccccacaaaaccaaactctttgggcaaccaccctgcgcctttgtgacattccgcagcgctgcagagagggacaaggccctgcgcgttttgcatggtgccctctggaaaggccgcccactcagtgtgcgcctggcccggcccaaggccgaccccatggccaggaggaggcgacaggagggtgagagtgagccaccagtaacacgagtggccgacgtggtgacccctctatggacagtgccctatgctgagcagcttgagcggaagcagctggagtgcgagcaggtgctgcagaaacttgccaagtgagtgtgggcgcaagacgcccctcttggccagggctctgcccggcctgtgcttcctcagcctgtccatgcaccagttgggaggcccagcacaggatctggcggcccctttgggagctagccagcaagacacccacgtcacagtgggcacaatgacatcccaaaggaggggtcaggagcctggacatttggggagtggcctggcatgggtcgggggcagtaggtggagtccaaccaccgatctgctcctcttacagggaaatcgggagcaccaaccgtgccttgctgccctggctgctcgagcagaggcacaagcacaacaaggcctgctgcccgctggagggggtcaggccatcaccccagcaggtcagactagacttcggtggccacaaacccctatcctgggttttgaaaaactttgcttttgc

SEQ ID NO: 14649 - DNA, 943 bp, Homo sapiens
cacgcgctggcggactaagagtggctggcgaagcgagcggccggcgcgggcccctggcgggcgggcggtacagccccaagcctgagacccggacctgagcatcgcaggcccaggacgaggtggccaggcggcccccatggcgtccctggtctaggcggagaaccgcctgggcgatgagtgagaacctcgacaacgagggcccgaagcccatggagagctgtggccaggagagcagcagtgccctgagctgccctaccgtctcggtgccccctgcagccccggcagccctggaggaggtggagaaagagggcgctggggcggctacagggccggggcctcagcccgggctctacagctacatcagggatgacttgtttacctctgagatctttaaactggagctgcagaacgtgcctcgccacgccagcttcagcgacgtccggcgcttcctgggccgctttggtctgcagccccacaaaaccaaactctttgggcaaccaccctgcgcctttgtgacattccgcagcgctgcagagagggacaaggccctgcgcgttttgcatggtgccctctggaaaggccgcccactcagtgtgcgcctggcccggcccaaggccgaccccatggccaggaggaggcgacaggagggtgagagtgagccaccagtaacacgagtggccgacgtggtgacccctctatggacagtgccctatgctgagcagcttgagcggaagcagctggagtgcgagcaggtgctgcagaaacttgccaaggaaatcgggagcaccaaccgtgccttgctgccctggctgctcgagcagaggcacaagcacaacaaggcctgctgcccgctggagggggtcaggccatcaccccagcaggtcagactagacttcggtggccacaaacccctatcctgggttttgaaaaactttgcttttgc

SEQ ID NO: 14650 - DNA, 1214 bp, Homo sapiens
ctcggtgccccctgcagccccggcagccctggaggaggtggagaaagagggcgctggggcggctacagggccggggcctcagcccgggctctacagctacatcagggatgacttgtttacctctgagatctttaaactggagctgcagaacgtgcctcgccacgccagcttcagcgacgtccggcgcttcctgggccgctttggtctgcagccccacaaaaccaaactctttgggcaaccaccctgcgcctttgtgacattccgcagcgctgcagagagggacaaggccctgcgcgttttgcatggtgccctctggaaaggccgcccactcagtgtgcgcctggcccggcccaaggccgaccccatggccaggaggaggcgacaggagggtgagagtgagccaccagtaacacgagtggccgacgtggtgacccctctatggacagtgccctatgctgagcagcttgagcggaagcagctggagtgcgagcaggtgctgcagaaacttgccaagtgagtgtgggcgcaagacgcccctcttggccagggctctgcccggcctgtgcttcctcagcctgtccatgcaccagttgggaggcccagcacaggatctggcggcccctttgggagctagccagcaagacacccacgtcacagtgggcacaatgacatcccaaaggaggggtcaggagcctggacatttggggagtggcctggcatgggtcgggggcagtaggtggagtccaaccaccgatctgctcctcttacagggaaatcgggagcaccaaccgtgccttgctgccctggctgctcgagcagaggcacaagcacaacaaggcctgctgcccgctggagggggtcaggccatcaccccagcaggtcagactagacttcggtggccacaaacccctatcctgggttttgaaaaactttgcttttgctcacccttcctgttgatctccctgctttgtgttttcttctggtaacatcacatagttgtcagctgttcctcttgtttgactgccagcccctgtggggaaatcagggtttccaggcccaagcgctgggcagccagggtaaggtgcagctctctctccctgcagactgagtatcgtaataagtgtgagtttctggttggcgtcggggtggatggggaggataacaccgtgggctgtcggctcggcaagtacaagggcgggacgtgtgctgtggca

SEQ ID NO: 14651 - DNA, 957 bp, Homo sapiens
ctcggtgccccctgcagccccggcagccctggaggaggtggagaaagagggcgctggggcggctacagggccggggcctcagcccgggctctacagctacatcagggatgacttgtttacctctgagatctttaaactggagctgcagaacgtgcctcgccacgccagcttcagcgacgtccggcgcttcctgggccgctttggtctgcagccccacaaaaccaaactctttgggcaaccaccctgcgcctttgtgacattccgcagcgctgcagagagggacaaggccctgcgcgttttgcatggtgccctctggaaaggccgcccactcagtgtgcgcctggcccggcccaaggccgaccccatggccaggaggaggcgacaggagggtgagagtgagccaccagtaacacgagtggccgacgtggtgacccctctatggacagtgccctatgctgagcagcttgagcggaagcagctggagtgcgagcaggtgctgcagaaacttgccaaggaaatcgggagcaccaaccgtgccttgctgccctggctgctcgagcagaggcacaagcacaacaaggcctgctgcccgctggagggggtcaggccatcaccccagcaggtcagactagacttcggtggccacaaacccctatcctgggttttgaaaaactttgcttttgctcacccttcctgttgatctccctgctttgtgttttcttctggtaacatcacatagttgtcagctgttcctcttgtttgactgccagcccctgtggggaaatcagggtttccaggcccaagcgctgggcagccagggtaaggtgcagctctctctccctgcagactgagtatcgtaataagtgtgagtttctggttggcgtcggggtggatggggaggataacaccgtgggctgtcggctcggcaagtacaagggcgggacgtgtgctgtggca

SEQ ID NO: 14652 - DNA, 1954 bp, Homo sapiens
tcgtaataagtgtgagtttctggttggcgtcggggtggatggggaggataacaccgtgggctgtcggctcggcaagtacaagggcgggacgtgtgctgtggcagccccgtttgacaccgtgcacatccccgaagccaccaagcaggtggtgaaggccttccaggagttcatccggtgaggacctgtgacggggctcccgggaagtcctatgcggtgtgggagcagagggtggtgatcctgccccgggaattctggagtgcctgccatttcagccagatgaaggaaggtgtggccagaggagagagcagggggactgcttgcccagttgtgggcacttgggccagctcgtgattcccacaggtccactccatactcggcatacgacccagagacgtacacaggccactggaagcagctgactgtgcgcaccagccgccgccaccaggccatggccattgcctacttccacccccaggtctcaacgggggccctgctgggggagggtgcctagcctaggtgggcctcagcacagcctgatgggaacttttcaccacttactccagaagctgagccctgaggagctggcagagctgaagacctccctagcgcagcacttcacagcagggccaggcagggccagtggagtgacctgcctctacttcgtggaggagggacagcggtaaggagcccgagtggggcggggcaggtccctgcagggactgtgacactgaaggacctgcaccttcgcccacagaaagactcctagccaggagggcctgcccctggagcatgtggctggggaccggtgcatccacgaggacctgctagggctgaccttccggatctctccacacgccttcttccaggtagccatgagtccctggtgggcatggggacatgttgagggaggcctgacgcaccatcaggacgtgatgggaacagtgggctcaggcggtgagatttgggggagtatccaggcaggtgagccacaggggagggtgaagtaagaaagaggttggtcatcactgatttgactcgggataacctagaggtacacacggcagtggcccttgtcacagggaggatgaggagtggccctcagtgcattaccacagggcactgctctgggctcggcaggagggaggccatggtggcctctgggctgggaaatactgtttcactgtttgctcactgctgcaggaaggctgtggggacctggagcggccgtttttggagacaggcctggcaggacctcctggagggctaggtgtgggggtgggagctgcagttgggtgattccaggggccccggtgtgagttgtgggaggcaaagcccccttgctggggcagggaaggtacagcctattggcctgcggggcctcatgagccctcaaccaagtggggcaaggaggaggctgtgcttagcacgggcttggcttttaaagccaggggctggatgagggcatcagcaaggctggtccaaggtggggtcagggaagacgttgggcaccaaggtggggagtgggcgccggaggtcccggcaggatggagggaccaggaatgtgggcgtcggggcaccagtggcaccacaggagaggagccactgacatcctgggcaccgcctgcccccaggtgaacacacccgcagccgaggtgctctacacagtcatccaggactgggcccaattggatgcggggagcatggtgctggacgtgtgctgtggcaccggcaccattggcctggccctggcccgggtgagccctcctgccctgctgagggcaccctctccccaccccaagacccccattgaccccagctcaaagtcaccacagctgactccatcatgccccaggcccagctcctctttgctgcccacagggccccatgtactcccctccctgggtggggcgacaccacgctttcctgtttcagaaggtaaagagggtcattgggg

SEQ ID NO: 14653 - DNA, 848 bp, Homo sapiens
tcgtaataagtgtgagtttctggttggcgtcggggtggatggggaggataacaccgtgggctgtcggctcggcaagtacaagggcgggacgtgtgctgtggcagccccgtttgacaccgtgcacatccccgaagccaccaagcaggtggtgaaggccttccaggagttcatccggtgaggacctgtgacggggctcccgggaagtcctatgcggtgtgggagcagagggtggtgatcctgccccgggaattctggagtgcctgccatttcagccagatgaaggaaggtgtggccagaggagagagcagggggactgcttgcccagttgtgggcacttgggccagctcgtgattcccacaggtccactccatactcggcatacgacccagagacgtacacaggccactggaagcagctgactgtgcgcaccagccgccgccaccaggccatggccattgcctacttccacccccagaagctgagccctgaggagctggcagagctgaagacctccctagcgcagcacttcacagcagggccaggcagggccagtggagtgacctgcctctacttcgtggaggagggacagcgaaagactcctagccaggagggcctgcccctggagcatgtggctggggaccggtgcatccacgaggacctgctagggctgaccttccggatctctccacacgccttcttccaggtgaacacacccgcagccgaggtgctctacacagtcatccaggactgggcccaattggatgcggggagcatggtgctggacgtgtgctgtggcaccggcaccattggcctggccctggcccggaaggtaaagagggtcattgggg

SEQ ID NO: 14654 - DNA, 878 bp, Homo sapiens
gtgagcagactggcctcccagcacctcgtggccatcctggacccaccccgtgctggcttgcgtgagtggcttttgcttaaggaggtggcacgggaacgaggacacatggggtggctcaccatgttatgcactctctggctgtggggacccagctggtgtttgcctcctcagattccaaggtgatcctggccatccggagagctaagaacctcaggcggctgctgtacgtctcatgcaacccccgggcagccatgggcaactttgtggagtgagtgtctgcaggggcctgggtgggggctaggcctgctaccaagcccccagctcccacaggagcccctgattagcctatcggctgaccttagcgccccccttttccccccacagcctctgcagagccccatctaaccgggtgaagggcattcccttccggccggtcaaggctgtggcagtggacctgttcccgcagaccccgcactgtgagatgctcatcctgtttgagagggtggagcaccccaatggcacaggggtcttggggccccacagccctccagctcaacccacaccaggacccccagataacaccctacaagaaactgggaccttcccctcatcctaggcccaggacccattatggggacaggagctgaagggctcccagggccccaggggcggggaaggcatggcttgctggccaggatattcagaggtaggcagccaaagggcacagaaccctgtgccccaccaggattggcctgctgctaggggccaggggccctgaccaggaagacaggtgggttcctgtagcctgttgcccatccccagggcctttgtggactagccaaggctgtgagggccagaataaacaactgctcaacaaa

SEQ ID NO: 14655 - DNA, 762 bp, Homo sapiens
gtgagcagactggcctcccagcacctcgtggccatcctggacccaccccgtgctggcttgcgtgagtggcttttgcttaaggaggtggcacgggaacgaggacacatggggtggctcaccatgttatgcactctctggctgtggggacccagctggtgtttgcctcctcagattccaaggtgatcctggccatccggagagctaagaacctcaggcggctgctgtacgtctcatgcaacccccgggcagccatgggcaactttgtggacctctgcagagccccatctaaccgggtgaagggcattcccttccggccggtcaaggctgtggcagtggacctgttcccgcagaccccgcactgtgagatgctcatcctgtttgagagggtggagcaccccaatggcacaggggtcttggggccccacagccctccagctcaacccacaccaggacccccagataacaccctacaagaaactgggaccttcccctcatcctaggcccaggacccattatggggacaggagctgaagggctcccagggccccaggggcggggaaggcatggcttgctggccaggatattcagaggtaggcagccaaagggcacagaaccctgtgccccaccaggattggcctgctgctaggggccaggggccctgaccaggaagacaggtgggttcctgtagcctgttgcccatccccagggcctttgtggactagccaaggctgtgagggccagaataaacaactgctcaacaaa

SEQ ID NO: 14656 - DNA, 752 bp, Homo sapiens
ctatgctgagcagcttgagcggaagcagctggagtgcgagcaggtgctgcagaaacttgccaagtgagtgtgggcgcaagacgcccctcttggccagggctctgcccggcctgtgcttcctcagcctgtccatgcaccagttgggaggcccagcacaggatctggcggcccctttgggagctagccagcaagacacccacgtcacagtgggcacaatgacatcccaaaggaggggtcaggagcctggacatttggggagtggcctggcatgggtcgggggcagtaggtggagtccaaccaccgatctgctcctcttacagggaaatcgggagcaccaaccgtgccttgctgccctggctgctcgagcagaggcacaagcacaacaaggcctgctgcccgctggagggggtcaggccatcaccccagcaggtcagactagacttcggtggccacaaacccctatcctgggttttgaaaaactttgcttttgctcacccttcctgttgatctccctgctttgtgttttcttctggtaacatcacatagttgtcagctgttcctcttgtttgactgccagcccctgtggggaaatcagggtttccaggcccaagcgctgggcagccagggtaaggtgcagctctctctccctgcagactgagtatcgtaataagtgtgagtttctggttggcgtcggggtggatggggaggataacaccgtgggctgtcggctcggcaagtacaagggcgggacg

SEQ ID NO: 14657 - DNA, 378 bp, Homo sapiens
ctatgctgagcagcttgagcggaagcagctggagtgcgagcaggtgctgcagaaacttgccaaggaaatcgggagcaccaaccgtgccttgctgccctggctgctcgagcagaggcacaagcacaacaaggcctgctgcccgctggagggggtcaggccatcaccccagcagttgtcagctgttcctcttgtttgactgccagcccctgtggggaaatcagggtttccaggcccaagcgctgggcagccagggtaaggtgcagctctctctccctgcagactgagtatcgtaataagtgtgagtttctggttggcgtcggggtggatggggaggataacaccgtgggctgtcggctcggcaagtacaagggcgggacg

SEQ ID NO: 14658 - DNA, 880 bp, Homo sapiens
ctgcaagcctcagccacagccagggcttgggggctgcccgacaggtagagcaagtgagcaagctctttggctaggggttccccagggctggccctgctgggagggcatgtggccctctgacaggccacggtgccatctcttcagagttgagtaatgtggagttccactgcgggagggccgaggacctggtgcccaccctggtgagcagactggcctcccagcacctcgtggccatcctggacccaccccgtgctggcttgcgtgagtggcttttgcttaaggaggtggcacgggaacgaggacacatggggtggctcaccatgttatgcactctctggctgtggggacccagctggtgtttgcctcctcagattccaaggtgatcctggccatccggagagctaagaacctcaggcggctgctgtacgtctcatgcaacccccgggcagccatgggcaactttgtggagtgagtgtctgcaggggcctgggtgggggctaggcctgctaccaagcccccagctcccacaggagcccctgattagcctatcggctgaccttagcgccccccttttccccccacagcctctgcagagccccatctaaccgggtgaagggcattcccttccggccggtcaaggctgtggcagtggacctgttcccgcagaccccgcactgtgagatgctcatcctgtttgagagggtggagcaccccaatggcacaggggtcttggggccccacagccctccagctcaacccacaccaggacccccagataacaccctacaagaaactgggaccttcccctcatcctaggcccaggacccattatggggacaggagctgaagggctcccagggccccaggggcggggaaggca

SEQ ID NO: 14659 - DNA, 654 bp, Homo sapiens
ctgcaagcctcagccacagccagggcttgggggctgcccgacaggtagagcaagtgagcaagctctttggctaggggttccccagggctggccctgctgggagggcatgtggccctctgacaggccacggtgccatctcttcagagttgagtaatgtggagttccactgcgggagggccgaggacctggtgcccaccctggtgagcagactggcctcccagcacctcgtggccatcctggacccaccccgtgctggcttgcattccaaggtgatcctggccatccggagagctaagaacctcaggcggctgctgtacgtctcatgcaacccccgggcagccatgggcaactttgtggacctctgcagagccccatctaaccgggtgaagggcattcccttccggccggtcaaggctgtggcagtggacctgttcccgcagaccccgcactgtgagatgctcatcctgtttgagagggtggagcaccccaatggcacaggggtcttggggccccacagccctccagctcaacccacaccaggacccccagataacaccctacaagaaactgggaccttcccctcatcctaggcccaggacccattatggggacaggagctgaagggctcccagggccccaggggcggggaaggca

SEQ ID NO: 14660 - DNA, 1471 bp, Homo sapiens
ccgcagccgaggtgctctacacagtcatccaggactgggcccaattggatgcggggagcatggtgctggacgtgtgctgtggcaccggcaccattggcctggccctggcccgggtgagccctcctgccctgctgagggcaccctctccccaccccaagacccccattgaccccagctcaaagtcaccacagctgactccatcatgccccaggcccagctcctctttgctgcccacagggccccatgtactcccctccctgggtggggcgacaccacgctttcctgtttcagaaggtaaagagggtcattggggtcgagctatgcccagaggctgtggaggacgcccgggtgaacgcccaggacaatggtgagtggcaaggccgtgggtgggggtggggatgggggcagccgccacccctgctgcaagcctcagccacagccagggcttgggggctgcccgacaggtagagcaagtgagcaagctctttggctaggggttccccagggctggccctgctgggagggcatgtggccctctgacaggccacggtgccatctcttcagagttgagtaatgtggagttccactgcgggagggccgaggacctggtgcccaccctggtgagcagactggcctcccagcacctcgtggccatcctggacccaccccgtgctggcttgcgtgagtggcttttgcttaaggaggtggcacgggaacgaggacacatggggtggctcaccatgttatgcactctctggctgtggggacccagctggtgtttgcctcctcagattccaaggtgatcctggccatccggagagctaagaacctcaggcggctgctgtacgtctcatgcaacccccgggcagccatgggcaactttgtggagtgagtgtctgcaggggcctgggtgggggctaggcctgctaccaagcccccagctcccacaggagcccctgattagcctatcggctgaccttagcgccccccttttccccccacagcctctgcagagccccatctaaccgggtgaagggcattcccttccggccggtcaaggctgtggcagtggacctgttcccgcagaccccgcactgtgagatgctcatcctgtttgagagggtggagcaccccaatggcacaggggtcttggggccccacagccctccagctcaacccacaccaggacccccagataacaccctacaagaaactgggaccttcccctcatcctaggcccaggacccattatggggacaggagctgaagggctcccagggccccaggggcggggaaggcatggcttgctggccaggatattcagaggtaggcagccaaagggcacagaaccctgtgccccaccaggattggcctgctgctaggggccaggggccctgaccaggaagacaggtgggttcctgtagcctgttgcccatccccagggcctttgtggactagccaaggctgtgag

SEQ ID NO: 14661 - DNA, 1040 bp, Homo sapiens
ccgcagccgaggtgctctacacagtcatccaggactgggcccaattggatgcggggagcatggtgctggacgtgtgctgtggcaccggcaccattggcctggccctggcccggggccccatgtactcccctccctgggtggggcgacaccacgctttcctgtttcagaaggtaaagagggtcattggggtcgagctatgcccagaggctgtggaggacgcccgggtgaacgcccaggacaatgagttgagtaatgtggagttccactgcgggagggccgaggacctggtgcccaccctggtgagcagactggcctcccagcacctcgtggccatcctggacccaccccgtgctggcttgcattccaaggtgatcctggccatccggagagctaagaacctcaggcggctgctgtacgtctcatgcaacccccgggcagccatgggcaactttgtggagtgagtgtctgcaggggcctgggtgggggctaggcctgctaccaagcccccagctcccacaggagcccctgattagcctatcggctgaccttagcgccccccttttccccccacagcctctgcagagccccatctaaccgggtgaagggcattcccttccggccggtcaaggctgtggcagtggacctgttcccgcagaccccgcactgtgagatgctcatcctgtttgagagggtggagcaccccaatggcacaggggtcttggggccccacagccctccagctcaacccacaccaggacccccagataacaccctacaagaaactgggaccttcccctcatcctaggcccaggacccattatggggacaggagctgaagggctcccagggccccaggggcggggaaggcatggcttgctggccaggatattcagaggtaggcagccaaagggcacagaaccctgtgccccaccaggattggcctgctgctaggggccaggggccctgaccaggaagacaggtgggttcctgtagcctgttgcccatccccagggcctttgtggactagccaaggctgtgag

SEQ ID NO: 14662 - DNA, 1219 bp, Homo sapiens
ccctgaggagctggcagagctgaagacctccctagcgcagcacttcacagcagggccaggcagggccagtggagtgacctgcctctacttcgtggaggagggacagcggtaaggagcccgagtggggcggggcaggtccctgcagggactgtgacactgaaggacctgcaccttcgcccacagaaagactcctagccaggagggcctgcccctggagcatgtggctggggaccggtgcatccacgaggacctgctagggctgaccttccggatctctccacacgccttcttccaggtagccatgagtccctggtgggcatggggacatgttgagggaggcctgacgcaccatcaggacgtgatgggaacagtgggctcaggcggtgagatttgggggagtatccaggcaggtgagccacaggggagggtgaagtaagaaagaggttggtcatcactgatttgactcgggataacctagaggtacacacggcagtggcccttgtcacagggaggatgaggagtggccctcagtgcattaccacagggcactgctctgggctcggcaggagggaggccatggtggcctctgggctgggaaatactgtttcactgtttgctcactgctgcaggaaggctgtggggacctggagcggccgtttttggagacaggcctggcaggacctcctggagggctaggtgtgggggtgggagctgcagttgggtgattccaggggccccggtgtgagttgtgggaggcaaagcccccttgctggggcagggaaggtacagcctattggcctgcggggcctcatgagccctcaaccaagtggggcaaggaggaggctgtgcttagcacgggcttggcttttaaagccaggggctggatgagggcatcagcaaggctggtccaaggtggggtcagggaagacgttgggcaccaaggtggggagtgggcgccggaggtcccggcaggatggagggaccaggaatgtgggcgtcggggcaccagtggcaccacaggagaggagccactgacatcctgggcaccgcctgcccccaggtgaacacacccgcagccgaggtgctctacacagtcatccaggactgggcccaattggatgcggggagcatggtgctggacgtgtgctgtggcaccggcaccattggcctggccctggcccgggtgagccctcctgccctgctgagggcaccctctccc

SEQ ID NO: 14663 - DNA, 379 bp, Homo sapiens
ccctgaggagctggcagagctgaagacctccctagcgcagcacttcacagcagggccaggcagggccagtggagtgacctgcctctacttcgtggaggagggacagcgaaagactcctagccaggagggcctgcccctggagcatgtggctggggaccggtgcatccacgaggacctgctagggctgaccttccggatctctccacacgccttcttccaggtgaacacacccgcagccgaggtgctctacacagtcatccaggactgggcccaattggatgcggggagcatggtgctggacgtgtgctgtggcaccggcaccattggcctggccctggcccgggtgagccctcctgccctgctgagggcaccctctccc

SEQ ID NO: 14664 - DNA, 2571 bp, Homo sapiens
ggccatcaccccagcaggtcagactagacttcggtggccacaaacccctatcctgggttttgaaaaactttgcttttgctcacccttcctgttgatctccctgctttgtgttttcttctggtaacatcacatagttgtcagctgttcctcttgtttgactgccagcccctgtggggaaatcagggtttccaggcccaagcgctgggcagccagggtaaggtgcagctctctctccctgcagactgagtatcgtaataagtgtgagtttctggttggcgtcggggtggatggggaggataacaccgtgggctgtcggctcggcaagtacaagggcgggacgtgtgctgtggcagccccgtttgacaccgtgcacatccccgaagccaccaagcaggtggtgaaggccttccaggagttcatccggtgaggacctgtgacggggctcccgggaagtcctatgcggtgtgggagcagagggtggtgatcctgccccgggaattctggagtgcctgccatttcagccagatgaaggaaggtgtggccagaggagagagcagggggactgcttgcccagttgtgggcacttgggccagctcgtgattcccacaggtccactccatactcggcatacgacccagagacgtacacaggccactggaagcagctgactgtgcgcaccagccgccgccaccaggccatggccattgcctacttccacccccaggtctcaacgggggccctgctgggggagggtgcctagcctaggtgggcctcagcacagcctgatgggaacttttcaccacttactccagaagctgagccctgaggagctggcagagctgaagacctccctagcgcagcacttcacagcagggccaggcagggccagtggagtgacctgcctctacttcgtggaggagggacagcggtaaggagcccgagtggggcggggcaggtccctgcagggactgtgacactgaaggacctgcaccttcgcccacagaaagactcctagccaggagggcctgcccctggagcatgtggctggggaccggtgcatccacgaggacctgctagggctgaccttccggatctctccacacgccttcttccaggtagccatgagtccctggtgggcatggggacatgttgagggaggcctgacgcaccatcaggacgtgatgggaacagtgggctcaggcggtgagatttgggggagtatccaggcaggtgagccacaggggagggtgaagtaagaaagaggttggtcatcactgatttgactcgggataacctagaggtacacacggcagtggcccttgtcacagggaggatgaggagtggccctcagtgcattaccacagggcactgctctgggctcggcaggagggaggccatggtggcctctgggctgggaaatactgtttcactgtttgctcactgctgcaggaaggctgtggggacctggagcggccgtttttggagacaggcctggcaggacctcctggagggctaggtgtgggggtgggagctgcagttgggtgattccaggggccccggtgtgagttgtgggaggcaaagcccccttgctggggcagggaaggtacagcctattggcctgcggggcctcatgagccctcaaccaagtggggcaaggaggaggctgtgcttagcacgggcttggcttttaaagccaggggctggatgagggcatcagcaaggctggtccaaggtggggtcagggaagacgttgggcaccaaggtggggagtgggcgccggaggtcccggcaggatggagggaccaggaatgtgggcgtcggggcaccagtggcaccacaggagaggagccactgacatcctgggcaccgcctgcccccaggtgaacacacccgcagccgaggtgctctacacagtcatccaggactgggcccaattggatgcggggagcatggtgctggacgtgtgctgtggcaccggcaccattggcctggccctggcccgggtgagccctcctgccctgctgagggcaccctctccccaccccaagacccccattgaccccagctcaaagtcaccacagctgactccatcatgccccaggcccagctcctctttgctgcccacagggccccatgtactcccctccctgggtggggcgacaccacgctttcctgtttcagaaggtaaagagggtcattggggtcgagctatgcccagaggctgtggaggacgcccgggtgaacgcccaggacaatggtgagtggcaaggccgtgggtgggggtggggatgggggcagccgccacccctgctgcaagcctcagccacagccagggcttgggggctgcccgacaggtagagcaagtgagcaagctctttggctaggggttccccagggctggccctgctgggagggcatgtggccctctgacaggccacggtgccatctcttcagagttgagtaatgtggagttccactgcgggagggccgaggacctggtgcccaccctggtgagcagactggcctcccagcacctcgtggccatcctggacccaccccgtgctggcttgc

SEQ ID NO: 14665 - DNA, 854 bp, Homo sapiens
ggccatcaccccagcagactgagtatcgtaataagtgtgagtttctggttggcgtcggggtggatggggaggataacaccgtgggctgtcggctcggcaagtacaagggcgggacgtgtgctgtggcagccccgtttgacaccgtgcacatccccgaagccaccaagcaggtggtgaaggccttccaggagttcatccggtccactccatactcggcatacgacccagagacgtacacaggccactggaagcagctgactgtgcgcaccagccgccgccaccaggccatggccattgcctacttccacccccagaagctgagccctgaggagctggcagagctgaagacctccctagcgcagcacttcacagcagggccaggcagggccagtggagtgacctgcctctacttcgtggaggagggacagcgactcctagccaggagggcctgcccctggagcatgtggctggggaccggtgcatccacgaggacctgctagggctgaccttccggatctctccacacgccttcttccaggtgaacacacccgcagccgaggtgctctacacagtcatccaggactgggcccaattggatgcggggagcatggtgctggacgtgtgctgtggcaccggcaccattggcctggccctggcccggaaggtaaagagggtcattggggtcgagctatgcccagaggctgtggaggacgcccgggtgaacgcccaggacaatgagttgagtaatgtggagttccactgcgggagggccgaggacctggtgcccaccctggtgagcagactggcctcccagcacctcgtggccatcctggacccaccccgtgctggcttgc

SEQ ID NO: 14666 - DNA, 1607 bp, Homo sapiens
gtggctggcgaagcgagcggccggcgcgggcccctggcgggcgggcggtacagccccaagcctgagacccggacctgagcatcgcaggttcgagtcccgccccgcctggggcgaagccgggggtggcggcgacctcgcggcgttgcaccggctctgtgagcacctcccctctgagcacttcccttgtgacaggccacttcccttgtgacaggcccaggacgaggtggccaggcggcccccatggcgtccctggtctaggcggagaaccgcctgggcgatgagtgagaacctcgacaacgaggtagagtgcggggagacgctgggtagagacggggatggggtgggaggaggcggggtgggtcaggaaacctgccagagaataggtggggacgaggcaggtgcgataggggaggaaaggagacgggaatggggtcgggagggtagactgggggaggggcagggctgagtgcagagtgcaccgacggaggtctgggtgtcccataaggaagcttggggggccaggcccccagggcctagtcctcaccctagcaccccatctgtccccacacagggcccgaagcccatggagagctgtggccaggagagcagcagtgccctgagctgccctaccgtctcggtgccccctgcagccccggcagccctggaggaggtggagaaagagggcgctggggcggctacagggccggggcctcagcccgggctctacagctacatcagggatgacttgtttacctctgagatctttaaactggagctgcagaacgtgcctcgccacgccagcttcagcgacgtccggcgcttcctgggccgctttggtctgcagccccacaaaaccaaactctttgggcaaccaccctgcgcctttgtgacattccgcagcgctgcagagagggacaaggccctgcgcgttttgcatggtgccctctggaaaggccgcccactcagtgtgcgcctggcccggcccaaggccgaccccatggccaggaggaggcgacaggagggtgagagtgagccaccagtaacacgagtggccgacgtggtgacccctctatggacagtgccctatgctgagcagcttgagcggaagcagctggagtgcgagcaggtgctgcagaaacttgccaagtgagtgtgggcgcaagacgcccctcttggccagggctctgcccggcctgtgcttcctcagcctgtccatgcaccagttgggaggcccagcacaggatctggcggcccctttgggagctagccagcaagacacccacgtcacagtgggcacaatgacatcccaaaggaggggtcaggagcctggacatttggggagtggcctggcatgggtcgggggcagtaggtggagtccaaccaccgatctgctcctcttacagggaaatcgggagcaccaaccgtgccttgctgccctggctgctcgagcagaggcacaagcacaacaaggcctgctgcccgctggagggggtcaggccatcaccccagcaggtcagactagacttcggtggccacaaacccctatcctgggttttgaaaaactttgcttttgctcacccttcctgttgatctccctgctttgtgtt

SEQ ID NO: 14667 - DNA, 1060 bp, Homo sapiens
gtggctggcgaagcgagcggccggcgcgggcccctggcgggcgggcggtacagccccaagcctgagacccggacctgagcatcgcaggttcgagtcccgccccgcctggggcgaagccgggggtggcggcgacctcgcggcgttgcaccggctctgtgagcacctcccctctgagcacttcccttgtgacaggccacttcccttgtgacaggcccaggacgaggtggccaggcggcccccatggcgtccctggtctaggcggagaaccgcctgggcgatgagtgagaacctcgacaacgagggcccgaagcccatggagagctgtggccaggagagcagcagtgccctgagctgccctaccgtctcggtgccccctgcagccccggcagccctggaggaggtggagaaagagggcgctggggcggctacagggccggggcctcagcccgggctctacagctacatcagggatgacttgtttacctctgagatctttaaactggagctgcagaacgtgcctcgccacgccagcttcagcgacgtccggcgcttcctgggccgctttggtctgcagccccacaaaaccaaactctttgggcaaccaccctgcgcctttgtgacattccgcagcgctgcagagagggacaaggccctgcgcgttttgcatggtgccctctggaaaggccgcccactcagtgtgcgcctggcccggcccaaggccgaccccatggccaggaggaggcgacaggagggtgagagtgagccaccagtaacacgagtggccgacgtggtgacccctctatggacagtgccctatgctgagcagcttgagcggaagcagctggagtgcgagcagggaaatcgggagcaccaaccgtgccttgctgccctggctgctcgagcagaggcacaagcacaacaaggcctgctgcccgctggagggggtcaggccatcaccccagcaggtcagactagacttcggtggccacaaacccctatcctgggttttgaaaaactttgcttttgctcacccttcctgttgatctccctgctttgtgtt

SEQ ID NO: 14668 - DNA, 2921 bp, Homo sapiens
ggagtccaaccaccgatctgctcctcttacagggaaatcgggagcaccaaccgtgccttgctgccctggctgctcgagcagaggcacaagcacaacaaggcctgctgcccgctggagggggtcaggccatcaccccagcaggtcagactagacttcggtggccacaaacccctatcctgggttttgaaaaactttgcttttgctcacccttcctgttgatctccctgctttgtgttttcttctggtaacatcacatagttgtcagctgttcctcttgtttgactgccagcccctgtggggaaatcagggtttccaggcccaagcgctgggcagccagggtaaggtgcagctctctctccctgcagactgagtatcgtaataagtgtgagtttctggttggcgtcggggtggatggggaggataacaccgtgggctgtcggctcggcaagtacaagggcgggacgtgtgctgtggcagccccgtttgacaccgtgcacatccccgaagccaccaagcaggtggtgaaggccttccaggagttcatccggtgaggacctgtgacggggctcccgggaagtcctatgcggtgtgggagcagagggtggtgatcctgccccgggaattctggagtgcctgccatttcagccagatgaaggaaggtgtggccagaggagagagcagggggactgcttgcccagttgtgggcacttgggccagctcgtgattcccacaggtccactccatactcggcatacgacccagagacgtacacaggccactggaagcagctgactgtgcgcaccagccgccgccaccaggccatggccattgcctacttccacccccaggtctcaacgggggccctgctgggggagggtgcctagcctaggtgggcctcagcacagcctgatgggaacttttcaccacttactccagaagctgagccctgaggagctggcagagctgaagacctccctagcgcagcacttcacagcagggccaggcagggccagtggagtgacctgcctctacttcgtggaggagggacagcggtaaggagcccgagtggggcggggcaggtccctgcagggactgtgacactgaaggacctgcaccttcgcccacagaaagactcctagccaggagggcctgcccctggagcatgtggctggggaccggtgcatccacgaggacctgctagggctgaccttccggatctctccacacgccttcttccaggtagccatgagtccctggtgggcatggggacatgttgagggaggcctgacgcaccatcaggacgtgatgggaacagtgggctcaggcggtgagatttgggggagtatccaggcaggtgagccacaggggagggtgaagtaagaaagaggttggtcatcactgatttgactcgggataacctagaggtacacacggcagtggcccttgtcacagggaggatgaggagtggccctcagtgcattaccacagggcactgctctgggctcggcaggagggaggccatggtggcctctgggctgggaaatactgtttcactgtttgctcactgctgcaggaaggctgtggggacctggagcggccgtttttggagacaggcctggcaggacctcctggagggctaggtgtgggggtgggagctgcagttgggtgattccaggggccccggtgtgagttgtgggaggcaaagcccccttgctggggcagggaaggtacagcctattggcctgcggggcctcatgagccctcaaccaagtggggcaaggaggaggctgtgcttagcacgggcttggcttttaaagccaggggctggatgagggcatcagcaaggctggtccaaggtggggtcagggaagacgttgggcaccaaggtggggagtgggcgccggaggtcccggcaggatggagggaccaggaatgtgggcgtcggggcaccagtggcaccacaggagaggagccactgacatcctgggcaccgcctgcccccaggtgaacacacccgcagccgaggtgctctacacagtcatccaggactgggcccaattggatgcggggagcatggtgctggacgtgtgctgtggcaccggcaccattggcctggccctggcccgggtgagccctcctgccctgctgagggcaccctctccccaccccaagacccccattgaccccagctcaaagtcaccacagctgactccatcatgccccaggcccagctcctctttgctgcccacagggccccatgtactcccctccctgggtggggcgacaccacgctttcctgtttcagaaggtaaagagggtcattggggtcgagctatgcccagaggctgtggaggacgcccgggtgaacgcccaggacaatggtgagtggcaaggccgtgggtgggggtggggatgggggcagccgccacccctgctgcaagcctcagccacagccagggcttgggggctgcccgacaggtagagcaagtgagcaagctctttggctaggggttccccagggctggccctgctgggagggcatgtggccctctgacaggccacggtgccatctcttcagagttgagtaatgtggagttccactgcgggagggccgaggacctggtgcccaccctggtgagcagactggcctcccagcacctcgtggccatcctggacccaccccgtgctggcttgcgtgagtggcttttgcttaaggaggtggcacgggaacgaggacacatggggtggctcaccatgttatgcactctctggctgtggggacccagctggtgtttgcctcctcagattccaaggtgatcctggccatccggagagctaagaacctcaggcggctgctgtacgtctcatgcaacccccgggcagccatgggcaactttgtggagtgagtgtctgcaggggcc

SEQ ID NO: 14669 - DNA, 1098 bp, Homo sapiens
ggagtccaaccaccgatctgctcctcttacagggaaatcgggagcaccaaccgtgccttgctgccctggctgctcgagcagaggcacaagcacaacaaggcctgctgcccgctggagggggtcaggccatcaccccagcagactgagtatcgtaataagtgtgagtttctggttggcgtcggggtggatggggaggataacaccgtgggctgtcggctcggcaagtacaagggcgggacgtgtgctgtggcagccccgtttgacaccgtgcacatccccgaagccaccaagcaggtggtgaaggccttccaggagttcatccggtccactccatactcggcatacgacccagagacgtacacaggccactggaagcagctgactgtgcgcaccagccgccgccaccaggccatggccattgcctacttccacccccagaagctgagccctgaggagctggcagagctgaagacctccctagcgcagcacttcacagcagggccaggcagggccagtggagtgacctgcctctacttcgtggaggagggacagcgaaagactcctagccaggagggcctgcccctggagcatgtggctggggaccggtgcatccacgaggacctgctagggctgaccttccggatctctccacacgccttcttccaggtgaacacacccgcagccgaggtgctctacacagtcatccaggactgggcccaattggatgcggggagcatggtgctggacgtgtgctgtggcaccggcaccattggcctggccctggcccggaaggtaaagagggtcattggggtcgagctatgcccagaggctgtggaggacgcccgggtgaacgcccaggacaatgagttgagtaatgtggagttccactgcgggagggccgaggacctggtgcccaccctggtgagcagactggcctcccagcacctcgtggccatcctggacccaccccgtgctggcttgcattccaaggtgatcctggccatccggagagctaagaacctcaggcggctgctgtacgtctcatgcaacccccgggcagccatgggcaactttgtggagtgagtgtctgcaggggcc

SEQ ID NO: 14670 - DNA, 21440 bp, Homo sapiens
cgaagttgggcgactggcggatgcaggccttgcggcacgtcgtgtgcgccctgtccggcggcgtggacagcgccgtggccgcgctgctgctgaggcggagaggtgaggcgtccgaggctcccgccccccgccgagcgaatgtgtccccggaaacctgtccccgtccgtcgtggcgttgtgcacgtctcctccctccctgggccgctggttgcgcgcgggtcggcaggaggataccccgtcctctgactttggttcggaggctcctcgccctccacctgtgtagtcggaggtgtgcgcgactgcagctccgactacctgggagcagttccgcgcccctctccacccacgcgcgcccacccacagtgagaagccggcgggccggggtggggtggggagggaagggtttctcacggatctgcggcgtccacattcacctgtgagaccgtggacactggtgaggggagctgggatcgccgggccgggggcctgacctctgcacacgctgtggccgcccggtgggaggtccttgtcctccccactcagcagactggacaactgccgcgcggcgggtctgcttgttcagcgtctcctgtgttctccgctcgctggaggacaaagttttctccaggagcatttgcatttcttccggcatctaaacggagccccacgggtgcttagcattcctcgggcccggcgctgaaatgagcacttgtttaacttcacctgtgtggctccccgcgggaggcctcattcacagagtcacgtttgtggagctctgctttgcgccatctttggctcctgaccttgggcaagtgaattaagccgtcccctgtaaaattcggctaacacctgcctcacggggtgactggagggattagatgacatagtacatactgatgagtacgtgctcagcacatacgaggtacgcagaaaacagtagtggctattagtttatattgttaataaccatagctattatggtaggtacagtaagtgccaaagagaagggtaggcggaccataagcagaaatagttgtgaggaagggagagtggaggaaagcatcctagagatggaggtgctcagctgagtcgaaagaagagtaggatgtcactaagcagagacttggaggtggaggcggccctcccggcacagtcagcagtgcaagcagaatcacagaggcctgcaagtgtgggctggttctggccagatggagatggaaggagaggagcctggagcacgtttagccctgattatggaagatgctataccaggggctttagactgttaggtagacattagtctggttgatctgggataggggtggtctttcgcgtgtggtggtgtagttttgacaaagctttgtcatcaaatttctgttgttttgggtactatatgaagccttcttcagcagtcatttgccctgtctttcattacattcagcctacctaaacgaaccagctttctcatacagggtctgcacctgtgtagtttgctaaggtggtgtagggctaaagttggcctttccaatatttgggtgaatattttgttacaatcgaaaaggtagaaaataggtcataaactaggtggtacagctcttacaaaatatcgaaaattttaattatctttatatctgatcacttagaatctaagtcttagatagtaactagaaataacttttgaaaagagtttccttttttgataactgaatggtgctttgaaaaattttgttgagtttcgactattccttcgtgtattccacacacactggctgatcccctcctgctaggtattgtgctgatacatagatggggacacaaagatgagaaaataccacctcgttaatcttggggactcaggcaccaagatggaaaccggatccctgaagccacatggcaaagcagggactgcccggcaggccaggcacagaggcacaggagcacagcgtgtggggaacttctcagagctcagaaatcactgccgttttaccgaaggttgatttatgtattctctttaattgaccttcccgcccgcaggttaccaggtgacaggggtgtttatgaagaactgggactcactggatgaacatggggtctgtactgccgacaaagactgtgaagatgcttacagagtttgccagatcttagacatccctttccatcaagtgtcctacgtaaaggagtattggaatgatgtgttcaggtgagtgcgggtcacagcacaaaggaagcttcctcacactgtggatccttgcagtggaaggatccggtaaccagccagaccgacgcctgtgctgcagcccagcgctctccctccacggtggtgctgaagactgcaagaggcctcagccaccctcggggctctgtgttagaggcgaggcctggaccccacagcacacccagctctctcactcctgtcattttgccacttgcctgaagtctctttaatgctttcttggaccttgagctgtttctgttgcccagttaggataggggagctaaggctgagggctcccctggaaggtgagcaccaatgcctgtgtgctatgtgggtcagcgattaggggatttctgagaaagaggtgatacatggcctgtgcctctgaaaacaagaaacaaacaaaaacttttctaaaatccaatataatctcaataattaagtgctgtgtgctaggcgtgtgccacatctaggaacattaagatgtcttcactgtgacctggctctgtaggagtttgcggtctagttgggaggacattatcttcacaagaggtgacagtgatgcgtggcacgcaggaagtaccagtgatgctatcagtcactgaacccagaggagggagaaacttgcagtgtggagtaatcaagaaggcttcaccggagaggaggggttgcaaacaaagttgtagagaagggactccaaatggggtaacgagagcagcgtgaaggggagaagaaatgctgattgtgtatttcaggaccgttgtaaagtttggctggacttttgttcctgcagtggaaggagtgtagggctcatcctctggtgagccctgactgtgatgaatgtcgggcagttgtcgaaggcgtctgacacagcaggccatgtgcgcgggacaggctgcccctgcctgagtgggctttaggggcagaagagccttgggttgagtcctgactgtagcttattatatgaccttgggcaatttacttgactttgtttttttaattgaaaaaaattctctttttttcctgccaacaaagacccagaagagatacttgacttttctaagccccaattttctcatctttaaaatgaggataacactgatgcctcacagggttatgaaagaattgagattaggttctagtatgtatgcctggtatattagtaagcagtcaataaacatagctgtttttcttttctatttttttttgagacagagcctcgctctgttgcccaggctggagtgcagtggcgcaatcttggctcactgcaacatctgcctcccaggttcaagcgattctcatgcctcagcctcccaagtagctgggattataggcatgcaccaccacgcccggataatttttgtatttttagtagagacagggtttcgccatgttggccgggctagtctcagactcctgacctcagaagatccactcgtctcagcctcccaaagtgctgggattacaggcgtgagccaccacgccagcctgctatttttattttcattattaaaaagatgagtctggggagctaagctatgaggacgcaaaggcataaaaatgatataatggactctggggtgagggataaaagactacacatcgggtacaatgtccactgcttgggtgacgggtacaccaaaatctcagaagtcaccactgaagaacttatccatgtgaccaaataccagctgttgcccaaaaaaccattgaaataacaataaaacgaaatttagagagattaagtaaattgactatggtcacctaaataatcaacggaagagcttgaatatgaaccctctgtgactctatgctataacatatgggtgtcgtatatattaacaacatggacaaaactgatggctgaattttcctggggaaagttacctgtagaatgcatgataaatgcattaaaaacttatctgtagaatgcatgataaatgcattaaaaacttctgcagttttctcggggacataagaaaaaaaaaagagtgtggcggccaaatacaggataaatctgggggaagaccaaaggcagagagtctcaggaagtgctgttgctggagatttggacttcatggggagggagtgtgggagtggaaggtgagggctggcttgttggacccagaggacaagtccaccgggcagtagatctgaggtgcttgttaaacacagacctggaccgaggtctgggggcggccctggaatctgctttaataagcacttcagctgtgctggtggtgtggggggttgtcagggtctttctttgagaaaaggtgtgatgcggcttagggactgatgtgtgtgggagaccagagaggagaggagtcagcagtagtttcaagatcaaggctgggtggctggggaaagctggtttaggggattcctcatgagtactgtagagtttgaggggacaacagggaatccaagtgagcttacacttcacctgccagcacagctttttcagaacgtacgagtggatgcgatttttgaagtttagctcagctgaggccagataggaagagtgacttgaatagtatggcaaattaggagcggagctgggattaaaccccagaattaggagcggagctgggattaaaacccagaattaggagcggagctgggattaaaccccagaattaggagcggagctgggattaaaccccagaattaggagcggagctgggattaaaccccagaattaggagcggagctgggattaaaccccagaattaggagcggagctgggattaaaccccagaattaggagcggagctgggattaaaccccagaattaggagcggagctgggattaaaacccagctttccaggccagtgcttgctgccgccttctggcgctgcttgatagggactgagagaaggaggcggccgggtagagtcttttcccatctctggggctgcccccgaggtcgcccctggctccagccagcctgccctctgccctcgcccagtaccagctgcccgtggaggcattggtctttccgctgaagactcacttctctagtagggctctctagctcagagatttcttttgcattctttcattcaagacccactggccttcaaggatcagagtccagatacgttttagctgctgagtcttttaaatctgtctccctcccgaggcacatgaaaggcttctcttctttccagttagagaagaggctgggctactccattgtttttgctaatgccaaaacacacgccttcccatctgctgtttacgaaagggttaacagtgtgtcttttcagaaactgattttaatgttcagcctcttcaacatttattgatgactgtgatatagaaagtttgttgggtctaggacacagacacagattgcaccttaagtagtttatagtttaatgagcttcctggtaactttctaataattaaagcaaaatggaaagagtgtaataatatcaagtgttgttgcaaatgtggaaaaacatgagtttttatgaacttctagggggactgagaagtaggaaaacagtttggtgcctgctaaagtggaagatatccaaggaacctctgaccctgtgcagatctgtgatatgtctgcaaaacacaaacctcttgatcagcactggttttttttttaacccttgttgattaatagagagttttaggttaaatgaaaaaaatcacttataccaaaaatacacccatttttaaactcccaaaataggcatcataaccctcttgaagtgaatcctcgaagactatgaaattcttggtaagttttgctggtatcatggcatctttttcccatgttcagtcagtctgttagagcagaagttcactgaattaggatagcctgatccactttaagcacccaagagtttgctagttctcagaagtgtgtgtttgtcacctgaggatagtatttttggtatatttgcccagtgacgcagcattccaggctgagattgcagaatggctcatggagcccttgtgtagggaagcctctgactgtgtttctcctctgttctcatcacggcagtcatcctcacggaagaaggcttctgtgacaaaggtgtggggggttttccccatacagcaagcagtggacaccgactgggtgtcctctgattcagttccgataccatctacttggagatagtgctggatcccaaaggttgggggttcagtcccccagacggactccccccacaacagcagtcgaaagtatgggcctctagaacttatgaccaactggcttccagttgggattcccataacttcctctttgggttcaattattaataatttgctggagtggttcacagaactcagaaaaacacatttaccagtttattataaaggatgttgcaaaggatacagatgaagagacgggttgggtgaggtatggggaaagggtcatggagtgtccacaccctccctggggaccaccctccaggagcctccacaagtgtagctgtgcagaagctctctgaacccagtactcctgggtttttatggaggcttcatgacatcgccattccttcccccaggatatacagtgggactgtgtctggggagggtcttaagacccacagtcagaaaggtagacgcttgtaatcctagcactttaggaggctgaggcaggagacttgcttgaggcctggagttcagtatcagcatgggcaacatggcaagacctcatctctataaaaaaagaaaaggttgcagtgggccaggtgcggtggctcacgcctctaattccagcattttgggaggctgaggcgggcagatcacttgaggccaggagttggagaccagcctggccaacatggtgaaaccccgtctctactaaaaatacaaaaattatctgggcatggtgctgcgcacctgtaatcacagctattcggaaggctgaggtgggagaatctgcaagggaagtctaaaggatttcatttccactgtcactcaggcatcttctcttcctcacctaagccctgctgtgttggaggagtcccagaggcagggttttagtgagaccctcacggccactccccactcctgaccccataagccctgtgagcctacacagagacggtggctcctgagccgtagtggcagagaataacaccttgtcgggtggcccatgcagcaggttataaacaaatgttcgatgactgacgttctcctgttttgcagaaaattatagttttggtatgacaaggggaaattacattaaacaagcaatttagtgaactttttttttttttttgaggaatgtttcacacttggaactgaagtcattttcttttattctagtgactttttgaatgagtatgaaaaaggaaggactcccaatcctgacatagtttgcaacaagcacatcaaatttagttgcttttttcattatgctgtggataatcttggtaagtaatttgggtttaaaacatttttttttttaaagacagggtctcgctctgtcacccaggctggattgcagtggtgcgatcatgactcactgcagcctcgacctcctgggctcaagagattctcccaccccaggctcctgagtagcttggaccacaggcatgccaccatggtggctaattttttgtggagatggtgtcacaactgtattgtccaggctggtctcagatttctggccttaagcagtcctcctgcctcggccttccaaagtgctgagattacaagcgtgagcccctgtgcctagcctgtttcttcttgtggaacctcctgatactgaattgcttgcttagaccacctcttgatgtctgtggctatgctttatgaattttaggttcttcttcctgtcccctgccattggggtcaccataatgagtttctgaagttctggctcaggcttcttggtttgctctgtcccactgcagctcaccctgttgtgtgttgctacgagataccattgtaagccaggggcccagtagtgtcggcactttcagcaatgatgtagattaggcttgcagattcaatatgtcagcaacctaaagctgagttgatgataatgatgaaagttagtttgtggagttaggaataaacaaatgcctacaaaaacaaaaaatcaaaaagaaaaatcttaaatttcaacattgggctaacaccaaaaacatgaaacttaatagagataaatgcaaagtttgctaactaggttcagtaattctcctaggacaagattggaaagacctagcttggttgccattgaatcttctgccattggttgcagaaaatctgggggatttaggtgcccccaggctgactgagccagtagtgtgatgtcttttgtcagagccagcacagacggagctcaccttgatgatcatagaatgtctaggaaggggtgatgcgtcccctgtggtccgtcctggttagaccgtattagttattcaggaaaagagtgatagactgatagaatgtgaattgatttttattttcagggtatctggaaatatgtcctccctgaactgttgaaattactttgggtcgtagtggcagtggtcaagcgtgtgagttaggatgacattctttgtgtgacaccagcagacagttaggactggcaggagaaagagttccctgaggtggaggcgcaggcagctgttcaggaagggaaggcttgcctttggagagcattaagctgtcacgaaagctttttagggagcccctaggtggctggctgtcaggcacgctgtggaaggaacttctgcagtgaatgtttccacacctggaagaaaggcatgaaccgtgcagcacaggatgagaggacatgacgcccagacttctgaactcaccgcgcttctcagaggcatcctgcgctttttctagtataagtgctgttctttgaggacacagatgtaaagtggattgttttctctaggagaacctcagtcaagatgagattatgtgtctctaaagtgcctttttcaggtcgttaatatgcagcagctaattcttgctgtgtcttctgtttacatggagctagtgtggctggtccaggatggctgtgtcttctgtttacactgagctagtgtggttggtccaggatggaatccattttgctgcacctttcataaaagtctcttgcaatactaaatatctgtaattttttctttttttgagatggagtctcactctgtctcccaggctggagtgcagtggtgtgatctcggctcactgcaacctccacctcctgagttcaagcaattctcctgcctcagcctcccaagtagctgggattacaggtgcccaccaacatgtctagctaatttttgtactttttttgtagagacggggtttcatcatgttggccaggctggtctcaaactcctgacctcaagtgatccacccacatcggcctcctaaaagtgctgggatgacaggcgtgagccgctgcgcctggcccaaatatctggaatttttacacaatgaaaaggttctggattcatatgcaccttgttaggctctttggctttgtgtaatatgaaaagaagaaacagtgtgctggatgattcttcactctgatgaaaataatacatatttattacagaaaatttaaaagaggagaaacgacacctataatttcactctcagaatcaaaggaatagacctgagatttttcttcaactgtttctgtacagtaaaaaccgtggaatcatggtgttacatcctcgccctgctgaacagtgccgggcattttcccgtgttagtaaacattctctgtaaggacccccattgttacggcagtgcattgtcattcacttcacattctcccagtgttgaacattttggttcttttttttttttttttcctcctgagacagcatcttgctctgttgcccagactagagtgctgtggtgcagtcttggcttcctgcagcctcaacctcccaggttgaagcaatcctcccacctcagcctcccaagtggctgggactacaggtgtgccccaccacgcctggctaatttttgtattttttgtaaaggtgggatttcaccatgttgcccaggctggtcttgaactcctgagcacaagcaatcatctgcccgcctcggcctcccagagtgctaggattacaggcatgagccaccgcgcctggcctcccttcgtattatcacaaaccctgaaaggaatattttgtgtttaaatctttctgtgcctttcagactgtttccttaagccagaaattaactttggaaaggctcttaaaggtgcaataacactttaagtagcaaggttgtatcagcttaagagttcaaggctgcttgtttgatgaaattggatgtgtgcgtctgttccctgggatctctatgtttgggtgcagggtggattgtgcagcccctcagcctaagacttggggtctatactcttcttttgtgccttggtttatgctgatcaaggcctgcaagtatgagtctaaaacctgatccttgtgttctaaaaacctcacaggggcagatgccattgccacaggtcactatgcaagaacttccctggaagatgaagaagtctttgagcagaagcacgttaagaagcccgaagggcttttcagaaatcggtttgaagttagaaatggtaagttcatgtgcccaggtcagagccaaattcttgtgaacagattgaaatctttggaggaatgacagtgggttgtgcctgaggatcactgccacccctccctctgtgctccagagtagcttgtatgggattcacatttgaaaaggtgcagttaccaagaggacattttcccggagggcctgtgattgggtagtaaacagtgtccctgccggccatggtgagggctggtggaaagtgacatcagatactgataatccagctctcgacactgtgtggtgatttgaatgttccaaaaatatctgggtaaatatttgacagtgataattggggtgctgtcagtctagccaaggacctgtacttagcaacaagttctcaagggcgtgcggttcaggcagactttcaacgtgctgtgagcacaggacctgctgtggatcgcatgggctcagcagtcaggctttgtagccgtatttacacgttagtttatgcgtgttagggagccaagtttcacctttctagaaaaaagtcaatggcagacagtgagctgggaagctgctggcctgtcctggtgtacattcgtgtgtagaaaagaggaattccctgtattgttgagtgaaaaaccaagtggggctcagagccgtgtttccgcacggagcgtccgtccatcagtggggacccctgaagggcagccttgctcttttgtccggaagttcagatgttggagggagccttgtcccgccatctggggaataggggtctctggggctggggcagggctttacatacacacatttcttttttaattattattattaattttatttttttgagagaggatctcactctgtcaaccgggctggagtacagtggcccgatcttggctcgctgcagcctccacctcctgggctcaagtgatcctcccacctcagccccaccaagtagctgggaccacaggtgtgcgccactatgctcggctttttcattttttgtagagatgaggtctcgttaatgttgtccgtgctggtcttgaattcctgggctcaagcgatcctcccacctcggcctctcaaagtgttgggattacaggtgtgagccaccaagcccggcctcacacgtttcacatcactcctcttagcagtccatgaggtgtatgctctcatcccgtttcacagatgaggaaaccgaggcccggatgaagccatctgacctgggtccctcgggtggcagagctggatttcagtgcacttccgctcactccccagcccctgctgcttctgctgggtcaggccccagctgagttctttcctcagcgttgctgagcccatcctgaaggctgcagtgatggggcagggccgtgcttggtcaagggagccctgagtgtgccaacagtcgtctgccgccctctgttccctcctcgccttccttccttatgccacagggtgatcaggtaactgtactgacttgagcccagagaagagcagcccactcccgtaagacagccccccatttcaggaagacatgggtttgaatgcagataagacagccccccatttcaggaagacatgggttggaatgcagagtcctgccacttgggaactccagggtggaattcaccaagtaattgtgcatttacggggcctgaggagatggagggttaatttccatgttgaatagatgcgcctgcttacctcctagaacattacctcctagaacactgtgtgccctgcagagccatcgacctttattataggccacgtgccctcggaaacttgggacagtactgatgcgttctgttgagtgcgtttggcatgtgggaattgtgatggtgcacagtgtcttggccttcactgggttttgtaggcacactaaggtttccatttcattcttcttcagttgccctggcccagcctgggtctctgggtagagcacctgcaggggcagtggacggcctgggctcagggtcggtcagcacctgagaccagcgctcctaggcctggcctgtgactgggctgattttcccccacacagcgtgctaccaccggcctggcagagccagcacggcagccggcgtgtcagtgaggctccagcacaggcagcctcctccaaatgttgttcattcctttctgtgctttttcctctatagcagttcagttagggtcgccagcttgcttttttgaaaatcatagatttttagtttgttttaaaatgacgcagaactaggagaaaatgcaaatggctcctagttttctgaggcttttacacacatgcagtgtttgactgcagttagtttgggattgaaagtggactctgaggccaggtgcggtggctcatgcctgtaatcacagcactttgggaagccaaggcaggcggatcatgaggtcaggagttccagaccagcctggccaacatggtgaaaccccatctctactacaaatacaaaaaaaaaagttagccgagtatggtggcacatgcctgtagtcccaggtactctggaggctgagacaggagaatcacttgaacccaggaggcggagattgccgtgagccgagatgtgccactgcactccagcctgggcgacagagcgagactccatctcaaaaaaaaaaaaaaaagtggactctggaaagtgctctgcttccgtggcgactggtcggctgaacttggtctcacttgtcactcagttctgctgtttgtacctgccaagtaagggagggggactcgggaggctgggcagcctccagccccaccgcctccacctgcatcactttgggcgagtcatatgtgatgaactgggccggctccagtctcccctctgtaacgtggggagaattctccctctcacggctaacgtgggaatcggcagatggaaaacactagctacgcagagtgtgtactgtacacgtggctctgccaagccaggaagggtaggtgtgctgtctgaccgtcacggcatgtggcgtgctctgagtgtaactcgaaaggagaagtttatgagaaagattgaaagaagccagaaaactgacgttcgtcttagttttttgccattgatcattgaactcgagagtggagaactggacggttctaagccaggtttactcacacctctgctccgttgccttaaagccagaaatggttctttacaatcacatagggaatgtcggaggaactgcagggtcacctaacagatgtcagctgagactctcaacaaaaaaacgtttttaccaagaaagctaatgccttcacaggtagggcgctgctggaggcatgtgctggccgccgggcagtgaacctggaaagtgtagagtccttgaaaccactgtggcacgaacacatcctgtggttgttggaagaaggcacagctgacactatatcagtggaattttctgccagcaactagcttactccattttccaagatttggctgaatttattttaggtgtttttttttttttttcttatcacttgagaacattttttcatgtgatgtttcatctttgaaaatattataatctgaagtatgagctggaataatttctttgtcatgtaaaatccttgtttttttttttggaggtgcgaatttttcttacattaacccgtggtggtcttttccctagtagttgctattgagtgttgatgtctgcctctgacaggctaggggtagtctgtctaagtgaacagaaggacattgttgaaagtgaagtatcattatttttattcctgcatcgtcttttgttctttattcttggcagcggtaaaactcctccaggcagctgacagctttaaagaccagaccttctttctcagccaggtttcccaggatgccctgaggagaaccatcttccctctggggggattaacgaaagagtttgtaaagaaaatcgctgctgagaatagacttcatcatgtgcttcagaagaaagaggtacgagtgagcagttgcctttgattagtgcctgtttccctttcccgactgcatggcacggagcagctggacctgtgggtcccgcaccacttccccttctccaggacctaacatcaaaggcgggccttggagcaatagatggaggagtttgctgaggcgcacggtacagggctctgctgacatcgggagcagcctatacgagactccttgcttttttcctctcctctgcccctatgtggtaggcagctttccccacagccttagcagctggtggggtgctcttgggatggcctgcctgccaggtgagtgccaggcagtgtgatgcagccccgagacccctggaggggcaggtgctgtgccgccgtctgcacactcatgtgccctgtcacccgcttgcccggcacagactcgttcggtgccatctgttcgggcgctgtgctgctgggccgcgaggaattggtgacgcgcacacagttccatcttcgcctccatggagcccgcccgcgagtgggggacacaggcaggaggccaatcagtgtaaacctagaaaatgtctacggagggaggtgtaggaccctgggtgggaagcaccagtggggtctgagagtagggaatggagatgccaaaaacggcctcaaaagaagtcacatggaacctgagacctgaaggaggagaggatccggtgtcccagagagggctgggaaagtccagatgagggaacggcagtgcaaaggccttgaggcgaggagaagccagggagccgctgtgggggtgcctgcctgtggccccagctcctcaggaggatcgagcgcacccaggagtttgaggacagcctgggcaacacagcgaaactcgtctcaaaaagagagaacccggagtgttggcggaactaggatgaagcccgtgggagggccttggggatggagggcgagggcgctgtgggatgagcctcacctcttcaggggccagtgcggtgggagctgttgctccttcgtgtctcttcctggtaatggaaacggccatacctttcatcagagccatcttccctgaagagcacgcccaccgcccgtcctcctctcctcttgttttccgtttccggtgtcgctctgtggtgggagccgcagggatggaagggcagtcttgagagacacaaaccagagtaaacgatgcagcccctgatggggccacggtggagagcgcacgccacccaggctccccagctagggcagatgtgcttgaggaaggcgcctctctcctctgactcccctggagccctcccctaaggccttagcttcaggcctggctttcctgctacctgccccttctctggtccctgtctctcccccactcctcgcaggacagtggcctgaaggacctgaccgggttctgctttcttccccggggcagctggtgtgagggtctcccgcgcagggtcagaccccgcgggccgagacaatgaggcgttctctaaggctctggcatcgtgtgcgccggctgtgactggcggccgagggtgccggtgggcagccgggcccctaccctggaagcaaagtgtggggtgaggccgggaggccccagggcccgctcaggacgtctgggtacagcttgggccaccgccacttctgctcctctcacggctgccgtcttctcatttcagagcatgggcatgtgtttcatcgggaagaggaattttgaacatttccttcttcaggtgcgtgctgctctttgacacaaagagatggggctgcgtgtctgccctgggcctagatctccgtcggtaatgacatgtttgttttccagtatctgcagcctcgacctggtcactttatttccatagaagacaataaggttctgggaacacataaaggtgaggtgcagactctgccacttgtcatctgaaatgcctagagctgtggcgtttcagctctgggagactagaccagagttcctgtcgtcccttccacttggctggagaattgtagaaggctctgtggggcggccgggggcgggcacggcctagggtggaacagttgccttgatggtggctgggtgcacttccagatgtggcctcagctgagatgctggagttcatgaaaagcgcgcctctgacttggaaggactatactctgtgagttacgtatcaagtccctgtaaaaagaatgatttccttcctgtgtaaggaaaatgttaaactacacaaaactccactctgattcagggagtaaggtggacgtcccggcatggtgtgaatgattaaggaccacatgcagcgatgggatcaggcgtccgcgctggccagagtgctgctcgctcatgtgcagacccttactgcggtgaggcctgcgtgagcctgtgctgtgcctggtgtcaggggacaggctccgagtcagtcacagtgtgcagtcctgctgtggggacagagtgcagccattgttgggttagtacagtggcggggatgtgcctgccggcgtgatgatcaggcaggtcttgacacagcacagacctgagctgtgggactggccaggagagccaggctgcagctcaggtgtagggcgtcttgcagtgaattgcacttggagatcttccacctcttgtggaggggagacggcaggcggagccggggctaggcattcctgagacaggtggaggtgacagctttgcttgggacagaactgccagacaggattgcccatgtatctgccagccctggccccagcaggagccagttggatgactcatggcttccacctgcagttcacttcactgaagaaggctgccggcccaggccacgtggtaaatcccatgaggttctctctgcctgtgtgccccactgcaggggagggaggcagtgagtttgccatctgctgtgtgacattgtgagggtgcgcagagcagctgggggtagccctgatgcagttactgcattagatggacactgtgaagacgtgcagctatgtcatgggctcagcaagaagggcccctggcgtcacacagggcacccagccgcatcctgggcctagggtcaggggctcctacagctggaacctgcaccttctggggcacaaggtgccttctttgtggccaccacaccccatgtccagcccaggcctggacaatgatgagatgtgctcaggtgcttggtcagggctggctttggtggttggagaatcgtatcttcctagtgagttacaccattgctgggcctgctctgggctgccctcccagcatctgccttcatgatgaggcgtgacatgtgggctgtaacttgttgcccagcctcatggagaaactgtctttctgtaggttggttcctgtataccttgggccagagagcaaacataggtggcctgagagagccctggtacgtggtggagaaggacagcgtcaagggtgacgtgtttgtggtgagtgggccggcctctgagacagcactggggctggttctggcagggccagcagtgcttccagaccagggcttgagaaggcctccagcagccgtggcttcctggaggctgtgactaactctgttcctgtccttggtcccctgcctttcctgggactggccatggtggcaggagagttttaaggtattcattaggctgagttgtatgctggtctcttaatcatccctgaaccccgatacacagatacagtttctccaattttatgaaagaggacagcgacgcccagagcttgggtggctcatccggtggagagggcatggcctcagtgccaaggatggtgcccaccatggtaggatccagtgagttgttgtcaggcaggtgcagatggccaagccaggatcaaaccaagccttccaccacagtggggaccttaccactgtgaccctggcctcaaagcagggccgctcagtggcggcaagctcaccccaccttcaggggaccttgccagtgtctagaggcatttttggttgtcacagcttgggtggaaaagcaaggacgcgggtgctgctgcatctgtgggtcaggccggggatgctgcttgccgtgttcagcacagcctcttccctgagtgacccggcctccaccttggcgcgtggagctgagaaggcccactctcagcaccctggctgccggctcatgttctggcacgaatgctggggcgccttctcttagacggaggcgggggccagcaggccccacccaccgattccaggacatctccttactaggaagacctgtggggagaaaagcctggctgcgaatgaattaaatgatctagatttcagtttgctgtgagaagaccagaagggttaaccaacggcctcctgtccctggacgggtcttggtgcctgcttagaacccaaagcccttaacttcatgctcctcgtcctgcttcaggggcggggcttggcacaatcccaggaggtgccaggtctcaatggcccgaggccatgggtgggtgacagggagcaggggcctcagaaccaacctagggtatctggggccccccagaccagggccagtcctggggcacctgtgggaagccagcagctaccagtccctcctttctcctcagccatttggtgtgtggaggaattcctggggtggccttgagagaagagcccgtggtgtggctggcccctgtccctgcgaatagaaaaaccagtcctcgaggggggccgtgctgctgccccacaggtggttgcaggtagagggcctgagtcagacttgaacctgcagcattcactgtcatgggctcggatctcacccctgcctcttgcccactctgacatggtacttccttcctgggccttagtctcctcatctgtaaaatggggattcaaaggcccggcgggtgatgagatgaatttctgtgggtagaacacttcgagcggtgccagcaccgttacctgtgtgtgtgtgtgctggtaggacagttgttcccagggaccacactgaggccggccttggggccaggtgcccctcggcgtccccaccttcacattccattctgcaggccccccggacagaccacccagccctgtacagggacctgctgaggaccagccgcgtgcactggattgcggaggagcctcccgcagcactggtccgggacaagatgatggagtgccacttccgattccgccaccagatggcactaggtgactgacgggagggctcctgaggacgggccccttgaagctgagcttcctgaggccagatttgggccagggatgggagaccctggggtaggaaagtcccgttgtggagatcatttggagattacctaaagtatttagaactcccgtgtcctgtgcctgccctgagcgaggcctgggggtgctgggagcagatgcaggcaggccccggcgtgttgggctgaagcaagtgtgtacactgccccgcagtgtcctgctgcgtccagggcccaggctggtgccctgcccttcccctctaagcaggggtttttgaccccgtgggctggtgctcctttctccctgggggcctgaggtcgaccaggaaaggcctgtgccccctccaagggcccctctcttctacccagtgccctgtgtgctgaccctcaatcaagatggcaccgtgtgggtgacagctgtgcaggctgtgcgtgcccttgccacaggacaggtgcgtggggtgtgggggtgagcccggggaggactgtactgctctgcaccctgccagggcacccgggttacagaggaaggggctgaggcccaggagtagggtgtgctcgggtcacacagctggtgagggcagagtgccaccagccctgccctgggggctcctcccacagtgacaactgtgagaggatttccactctggtgtcaccaaccagccagttcctgctcgggccctgagaggctcagctgctgcccgggccccagaagcgaggacagaaaatggaaggggcatgaggacagtgctcaaagaggcagagggtcggggcccctgtgggccgagtgtgcaggagctcccagggtgggcgcctggtgggtgtaggcctgaggaatctccaggggcaggtggtgggagggaacctggggtgagggaagcggaagcatcctctggctgccaccatgctccttcctgtcacagctccacattcccaaggggtgcagagacctgccagtcccttggagtcccaggagaggcccctgtgactgtcccactcagggagaggtaccctgaagaccctccctagtgaagccactgggtgccccaggcctctcctctcctgttcagcagcagcagcagcagcaaaaccctgctcccctgggagctcagtgcctggtgctccgagcacaggccaggccccataggggagcactctgcccctgcctgccctcggctggctccctgtggcacccctgatgccagggtctctcccctacagtttgctgtgttctacaagggggacgagtgcctgggcagcgggaagatcctgcggctggggccgtctgcctacacgctccagaagggccagcgcagagctgggatggccactgagagccccagtgacagcccagaagatggtccaggcctgagtcccttgctctgacagagatggatctgctagaaggaacctggagagcaggacccatggctgggcggctggtgagcagtccaggtgcccaagggccagcttgctgctgcccaaagcagaggaagccgggctggctgagggtccgaaaagcctgcaggggcccggcgagccccaggaagagcctcagctccag

SEQ ID NO: 14671 - DNA, 1381 bp, Homo sapiens
cgaagttgggcgactggcggatgcaggccttgcggcacgtcgtgtgcgccctgtccggcggcgtggacagcgccgtggccgcgctgctgctgaggcggagaggttaccaggtgacaggggtgtttatgaagaactgggactcactggatgaacatggggtctgtactgccgacaaagactgtgaagatgcttacagagtttgccagatcttagacatccctttccatcaagtgtcctacgtaaaggagtattggaatgatgtgttcagtgactttttgaatgagtatgaaaaaggaaggactcccaatcctgacatagtttgcaacaagcacatcaaatttagttgcttttttcattatgctgtggataatcttggggcagatgccattgccacaggtcactatgcaagaacttccctggaagatgaagaagtctttgagcagaagcacgttaagaagcccgaagggcttttcagaaatcggtttgaagttagaaatgcggtaaaactcctccaggcagctgacagctttaaagaccagaccttctttctcagccaggtttcccaggatgccctgaggagaaccatcttccctctggggggattaacgaaagagtttgtaaagaaaatcgctgctgagaatagacttcatcatgtgcttcagaagaaagagagcatgggcatgtgtttcatcgggaagaggaattttgaacatttccttcttcagtatctgcagcctcgacctggtcactttatttccatagaagacaataaggttctgggaacacataaaggttggttcctgtataccttgggccagagagcaaacataggtggcctgagagagccctggtacgtggtggagaaggacagcgtcaagggtgacgtgtttgtggccccccggacagaccacccagccctgtacagggacctgctgaggaccagccgcgtgcactggattgcggaggagcctcccgcagcactggtccgggacaagatgatggagtgccacttccgattccgccaccagatggcactagtttgctgtgttctacaagggggacgagtgcctgggcagcgggaagatcctgcggctggggccgtctgcctacacgctccagaagggccagcgcagagctgggatggccactgagagccccagtgacagcccagaagatggtccaggcctgagtcccttgctctgacagagatggatctgctagaaggaacctggagagcaggacccatggctgggcggctggtgagcagtccaggtgcccaagggccagcttgctgctgcccaaagcagaggaagccgggctggctgagggtccgaaaagcctgcaggggcccggcgagccccaggaagagcctcagctccag

SEQ ID NO: 14672 - DNA, 21913 bp, Homo sapiens
ggctggggggcttagaattttatttttggtttacagcgcagaagaagagcagtgaggccggggcgcgggtggggagggcaaggcggcggctcaaaaaaaaagccagcccctcgcggcccgacagagtctcggcgccccgcgggtcggtggagcctcaggggtgagcgcaggccggagacaggggaacccgccgcgggacaggggaaggccggacggaacgcgggtaagctgccgcagcttccggccgggccactagcgcggaccctacggccggggcgggacttccggcaaggcgcggaagcggcggtagctgcagctggcgaagttgggcgactggcggatgcaggccttgcggcacgtcgtgtgcgccctgtccggcggcgtggacagcgccgtggccgcgctgctgctgaggcggagaggtgaggcgtccgaggctcccgccccccgccgagcgaatgtgtccccggaaacctgtccccgtccgtcgtggcgttgtgcacgtctcctccctccctgggccgctggttgcgcgcgggtcggcaggaggataccccgtcctctgactttggttcggaggctcctcgccctccacctgtgtagtcggaggtgtgcgcgactgcagctccgactacctgggagcagttccgcgcccctctccacccacgcgcgcccacccacagtgagaagccggcgggccggggtggggtggggagggaagggtttctcacggatctgcggcgtccacattcacctgtgagaccgtggacactggtgaggggagctgggatcgccgggccgggggcctgacctctgcacacgctgtggccgcccggtgggaggtccttgtcctccccactcagcagactggacaactgccgcgcggcgggtctgcttgttcagcgtctcctgtgttctccgctcgctggaggacaaagttttctccaggagcatttgcatttcttccggcatctaaacggagccccacgggtgcttagcattcctcgggcccggcgctgaaatgagcacttgtttaacttcacctgtgtggctccccgcgggaggcctcattcacagagtcacgtttgtggagctctgctttgcgccatctttggctcctgaccttgggcaagtgaattaagccgtcccctgtaaaattcggctaacacctgcctcacggggtgactggagggattagatgacatagtacatactgatgagtacgtgctcagcacatacgaggtacgcagaaaacagtagtggctattagtttatattgttaataaccatagctattatggtaggtacagtaagtgccaaagagaagggtaggcggaccataagcagaaatagttgtgaggaagggagagtggaggaaagcatcctagagatggaggtgctcagctgagtcgaaagaagagtaggatgtcactaagcagagacttggaggtggaggcggccctcccggcacagtcagcagtgcaagcagaatcacagaggcctgcaagtgtgggctggttctggccagatggagatggaaggagaggagcctggagcacgtttagccctgattatggaagatgctataccaggggctttagactgttaggtagacattagtctggttgatctgggataggggtggtctttcgcgtgtggtggtgtagttttgacaaagctttgtcatcaaatttctgttgttttgggtactatatgaagccttcttcagcagtcatttgccctgtctttcattacattcagcctacctaaacgaaccagctttctcatacagggtctgcacctgtgtagtttgctaaggtggtgtagggctaaagttggcctttccaatatttgggtgaatattttgttacaatcgaaaaggtagaaaataggtcataaactaggtggtacagctcttacaaaatatcgaaaattttaattatctttatatctgatcacttagaatctaagtcttagatagtaactagaaataacttttgaaaagagtttccttttttgataactgaatggtgctttgaaaaattttgttgagtttcgactattccttcgtgtattccacacacactggctgatcccctcctgctaggtattgtgctgatacatagatggggacacaaagatgagaaaataccacctcgttaatcttggggactcaggcaccaagatggaaaccggatccctgaagccacatggcaaagcagggactgcccggcaggccaggcacagaggcacaggagcacagcgtgtggggaacttctcagagctcagaaatcactgccgttttaccgaaggttgatttatgtattctctttaattgaccttcccgcccgcaggttaccaggtgacaggggtgtttatgaagaactgggactcactggatgaacatggggtctgtactgccgacaaagactgtgaagatgcttacagagtttgccagatcttagacatccctttccatcaagtgtcctacgtaaaggagtattggaatgatgtgttcaggtgagtgcgggtcacagcacaaaggaagcttcctcacactgtggatccttgcagtggaaggatccggtaaccagccagaccgacgcctgtgctgcagcccagcgctctccctccacggtggtgctgaagactgcaagaggcctcagccaccctcggggctctgtgttagaggcgaggcctggaccccacagcacacccagctctctcactcctgtcattttgccacttgcctgaagtctctttaatgctttcttggaccttgagctgtttctgttgcccagttaggataggggagctaaggctgagggctcccctggaaggtgagcaccaatgcctgtgtgctatgtgggtcagcgattaggggatttctgagaaagaggtgatacatggcctgtgcctctgaaaacaagaaacaaacaaaaacttttctaaaatccaatataatctcaataattaagtgctgtgtgctaggcgtgtgccacatctaggaacattaagatgtcttcactgtgacctggctctgtaggagtttgcggtctagttgggaggacattatcttcacaagaggtgacagtgatgcgtggcacgcaggaagtaccagtgatgctatcagtcactgaacccagaggagggagaaacttgcagtgtggagtaatcaagaaggcttcaccggagaggaggggttgcaaacaaagttgtagagaagggactccaaatggggtaacgagagcagcgtgaaggggagaagaaatgctgattgtgtatttcaggaccgttgtaaagtttggctggacttttgttcctgcagtggaaggagtgtagggctcatcctctggtgagccctgactgtgatgaatgtcgggcagttgtcgaaggcgtctgacacagcaggccatgtgcgcgggacaggctgcccctgcctgagtgggctttaggggcagaagagccttgggttgagtcctgactgtagcttattatatgaccttgggcaatttacttgactttgtttttttaattgaaaaaaattctctttttttcctgccaacaaagacccagaagagatacttgacttttctaagccccaattttctcatctttaaaatgaggataacactgatgcctcacagggttatgaaagaattgagattaggttctagtatgtatgcctggtatattagtaagcagtcaataaacatagctgtttttcttttctatttttttttgagacagagcctcgctctgttgcccaggctggagtgcagtggcgcaatcttggctcactgcaacatctgcctcccaggttcaagcgattctcatgcctcagcctcccaagtagctgggattataggcatgcaccaccacgcccggataatttttgtatttttagtagagacagggtttcgccatgttggccgggctagtctcagactcctgacctcagaagatccactcgtctcagcctcccaaagtgctgggattacaggcgtgagccaccacgccagcctgctatttttattttcattattaaaaagatgagtctggggagctaagctatgaggacgcaaaggcataaaaatgatataatggactctggggtgagggataaaagactacacatcgggtacaatgtccactgcttgggtgacgggtacaccaaaatctcagaagtcaccactgaagaacttatccatgtgaccaaataccagctgttgcccaaaaaaccattgaaataacaataaaacgaaatttagagagattaagtaaattgactatggtcacctaaataatcaacggaagagcttgaatatgaaccctctgtgactctatgctataacatatgggtgtcgtatatattaacaacatggacaaaactgatggctgaattttcctggggaaagttacctgtagaatgcatgataaatgcattaaaaacttatctgtagaatgcatgataaatgcattaaaaacttctgcagttttctcggggacataagaaaaaaaaaagagtgtggcggccaaatacaggataaatctgggggaagaccaaaggcagagagtctcaggaagtgctgttgctggagatttggacttcatggggagggagtgtgggagtggaaggtgagggctggcttgttggacccagaggacaagtccaccgggcagtagatctgaggtgcttgttaaacacagacctggaccgaggtctgggggcggccctggaatctgctttaataagcacttcagctgtgctggtggtgtggggggttgtcagggtctttctttgagaaaaggtgtgatgcggcttagggactgatgtgtgtgggagaccagagaggagaggagtcagcagtagtttcaagatcaaggctgggtggctggggaaagctggtttaggggattcctcatgagtactgtagagtttgaggggacaacagggaatccaagtgagcttacacttcacctgccagcacagctttttcagaacgtacgagtggatgcgatttttgaagtttagctcagctgaggccagataggaagagtgacttgaatagtatggcaaattaggagcggagctgggattaaaccccagaattaggagcggagctgggattaaaacccagaattaggagcggagctgggattaaaccccagaattaggagcggagctgggattaaaccccagaattaggagcggagctgggattaaaccccagaattaggagcggagctgggattaaaccccagaattaggagcggagctgggattaaaccccagaattaggagcggagctgggattaaaccccagaattaggagcggagctgggattaaaacccagctttccaggccagtgcttgctgccgccttctggcgctgcttgatagggactgagagaaggaggcggccgggtagagtcttttcccatctctggggctgcccccgaggtcgcccctggctccagccagcctgccctctgccctcgcccagtaccagctgcccgtggaggcattggtctttccgctgaagactcacttctctagtagggctctctagctcagagatttcttttgcattctttcattcaagacccactggccttcaaggatcagagtccagatacgttttagctgctgagtcttttaaatctgtctccctcccgaggcacatgaaaggcttctcttctttccagttagagaagaggctgggctactccattgtttttgctaatgccaaaacacacgccttcccatctgctgtttacgaaagggttaacagtgtgtcttttcagaaactgattttaatgttcagcctcttcaacatttattgatgactgtgatatagaaagtttgttgggtctaggacacagacacagattgcaccttaagtagtttatagtttaatgagcttcctggtaactttctaataattaaagcaaaatggaaagagtgtaataatatcaagtgttgttgcaaatgtggaaaaacatgagtttttatgaacttctagggggactgagaagtaggaaaacagtttggtgcctgctaaagtggaagatatccaaggaacctctgaccctgtgcagatctgtgatatgtctgcaaaacacaaacctcttgatcagcactggttttttttttaacccttgttgattaatagagagttttaggttaaatgaaaaaaatcacttataccaaaaatacacccatttttaaactcccaaaataggcatcataaccctcttgaagtgaatcctcgaagactatgaaattcttggtaagttttgctggtatcatggcatctttttcccatgttcagtcagtctgttagagcagaagttcactgaattaggatagcctgatccactttaagcacccaagagtttgctagttctcagaagtgtgtgtttgtcacctgaggatagtatttttggtatatttgcccagtgacgcagcattccaggctgagattgcagaatggctcatggagcccttgtgtagggaagcctctgactgtgtttctcctctgttctcatcacggcagtcatcctcacggaagaaggcttctgtgacaaaggtgtggggggttttccccatacagcaagcagtggacaccgactgggtgtcctctgattcagttccgataccatctacttggagatagtgctggatcccaaaggttgggggttcagtcccccagacggactccccccacaacagcagtcgaaagtatgggcctctagaacttatgaccaactggcttccagttgggattcccataacttcctctttgggttcaattattaataatttgctggagtggttcacagaactcagaaaaacacatttaccagtttattataaaggatgttgcaaaggatacagatgaagagacgggttgggtgaggtatggggaaagggtcatggagtgtccacaccctccctggggaccaccctccaggagcctccacaagtgtagctgtgcagaagctctctgaacccagtactcctgggtttttatggaggcttcatgacatcgccattccttcccccaggatatacagtgggactgtgtctggggagggtcttaagacccacagtcagaaaggtagacgcttgtaatcctagcactttaggaggctgaggcaggagacttgcttgaggcctggagttcagtatcagcatgggcaacatggcaagacctcatctctataaaaaaagaaaaggttgcagtgggccaggtgcggtggctcacgcctctaattccagcattttgggaggctgaggcgggcagatcacttgaggccaggagttggagaccagcctggccaacatggtgaaaccccgtctctactaaaaatacaaaaattatctgggcatggtgctgcgcacctgtaatcacagctattcggaaggctgaggtgggagaatctgcaagggaagtctaaaggatttcatttccactgtcactcaggcatcttctcttcctcacctaagccctgctgtgttggaggagtcccagaggcagggttttagtgagaccctcacggccactccccactcctgaccccataagccctgtgagcctacacagagacggtggctcctgagccgtagtggcagagaataacaccttgtcgggtggcccatgcagcaggttataaacaaatgttcgatgactgacgttctcctgttttgcagaaaattatagttttggtatgacaaggggaaattacattaaacaagcaatttagtgaactttttttttttttttgaggaatgtttcacacttggaactgaagtcattttcttttattctagtgactttttgaatgagtatgaaaaaggaaggactcccaatcctgacatagtttgcaacaagcacatcaaatttagttgcttttttcattatgctgtggataatcttggtaagtaatttgggtttaaaacatttttttttttaaagacagggtctcgctctgtcacccaggctggattgcagtggtgcgatcatgactcactgcagcctcgacctcctgggctcaagagattctcccaccccaggctcctgagtagcttggaccacaggcatgccaccatggtggctaattttttgtggagatggtgtcacaactgtattgtccaggctggtctcagatttctggccttaagcagtcctcctgcctcggccttccaaagtgctgagattacaagcgtgagcccctgtgcctagcctgtttcttcttgtggaacctcctgatactgaattgcttgcttagaccacctcttgatgtctgtggctatgctttatgaattttaggttcttcttcctgtcccctgccattggggtcaccataatgagtttctgaagttctggctcaggcttcttggtttgctctgtcccactgcagctcaccctgttgtgtgttgctacgagataccattgtaagccaggggcccagtagtgtcggcactttcagcaatgatgtagattaggcttgcagattcaatatgtcagcaacctaaagctgagttgatgataatgatgaaagttagtttgtggagttaggaataaacaaatgcctacaaaaacaaaaaatcaaaaagaaaaatcttaaatttcaacattgggctaacaccaaaaacatgaaacttaatagagataaatgcaaagtttgctaactaggttcagtaattctcctaggacaagattggaaagacctagcttggttgccattgaatcttctgccattggttgcagaaaatctgggggatttaggtgcccccaggctgactgagccagtagtgtgatgtcttttgtcagagccagcacagacggagctcaccttgatgatcatagaatgtctaggaaggggtgatgcgtcccctgtggtccgtcctggttagaccgtattagttattcaggaaaagagtgatagactgatagaatgtgaattgatttttattttcagggtatctggaaatatgtcctccctgaactgttgaaattactttgggtcgtagtggcagtggtcaagcgtgtgagttaggatgacattctttgtgtgacaccagcagacagttaggactggcaggagaaagagttccctgaggtggaggcgcaggcagctgttcaggaagggaaggcttgcctttggagagcattaagctgtcacgaaagctttttagggagcccctaggtggctggctgtcaggcacgctgtggaaggaacttctgcagtgaatgtttccacacctggaagaaaggcatgaaccgtgcagcacaggatgagaggacatgacgcccagacttctgaactcaccgcgcttctcagaggcatcctgcgctttttctagtataagtgctgttctttgaggacacagatgtaaagtggattgttttctctaggagaacctcagtcaagatgagattatgtgtctctaaagtgcctttttcaggtcgttaatatgcagcagctaattcttgctgtgtcttctgtttacatggagctagtgtggctggtccaggatggctgtgtcttctgtttacactgagctagtgtggttggtccaggatggaatccattttgctgcacctttcataaaagtctcttgcaatactaaatatctgtaattttttctttttttgagatggagtctcactctgtctcccaggctggagtgcagtggtgtgatctcggctcactgcaacctccacctcctgagttcaagcaattctcctgcctcagcctcccaagtagctgggattacaggtgcccaccaacatgtctagctaatttttgtactttttttgtagagacggggtttcatcatgttggccaggctggtctcaaactcctgacctcaagtgatccacccacatcggcctcctaaaagtgctgggatgacaggcgtgagccgctgcgcctggcccaaatatctggaatttttacacaatgaaaaggttctggattcatatgcaccttgttaggctctttggctttgtgtaatatgaaaagaagaaacagtgtgctggatgattcttcactctgatgaaaataatacatatttattacagaaaatttaaaagaggagaaacgacacctataatttcactctcagaatcaaaggaatagacctgagatttttcttcaactgtttctgtacagtaaaaaccgtggaatcatggtgttacatcctcgccctgctgaacagtgccgggcattttcccgtgttagtaaacattctctgtaaggacccccattgttacggcagtgcattgtcattcacttcacattctcccagtgttgaacattttggttcttttttttttttttttcctcctgagacagcatcttgctctgttgcccagactagagtgctgtggtgcagtcttggcttcctgcagcctcaacctcccaggttgaagcaatcctcccacctcagcctcccaagtggctgggactacaggtgtgccccaccacgcctggctaatttttgtattttttgtaaaggtgggatttcaccatgttgcccaggctggtcttgaactcctgagcacaagcaatcatctgcccgcctcggcctcccagagtgctaggattacaggcatgagccaccgcgcctggcctcccttcgtattatcacaaaccctgaaaggaatattttgtgtttaaatctttctgtgcctttcagactgtttccttaagccagaaattaactttggaaaggctcttaaaggtgcaataacactttaagtagcaaggttgtatcagcttaagagttcaaggctgcttgtttgatgaaattggatgtgtgcgtctgttccctgggatctctatgtttgggtgcagggtggattgtgcagcccctcagcctaagacttggggtctatactcttcttttgtgccttggtttatgctgatcaaggcctgcaagtatgagtctaaaacctgatccttgtgttctaaaaacctcacaggggcagatgccattgccacaggtcactatgcaagaacttccctggaagatgaagaagtctttgagcagaagcacgttaagaagcccgaagggcttttcagaaatcggtttgaagttagaaatggtaagttcatgtgcccaggtcagagccaaattcttgtgaacagattgaaatctttggaggaatgacagtgggttgtgcctgaggatcactgccacccctccctctgtgctccagagtagcttgtatgggattcacatttgaaaaggtgcagttaccaagaggacattttcccggagggcctgtgattgggtagtaaacagtgtccctgccggccatggtgagggctggtggaaagtgacatcagatactgataatccagctctcgacactgtgtggtgatttgaatgttccaaaaatatctgggtaaatatttgacagtgataattggggtgctgtcagtctagccaaggacctgtacttagcaacaagttctcaagggcgtgcggttcaggcagactttcaacgtgctgtgagcacaggacctgctgtggatcgcatgggctcagcagtcaggctttgtagccgtatttacacgttagtttatgcgtgttagggagccaagtttcacctttctagaaaaaagtcaatggcagacagtgagctgggaagctgctggcctgtcctggtgtacattcgtgtgtagaaaagaggaattccctgtattgttgagtgaaaaaccaagtggggctcagagccgtgtttccgcacggagcgtccgtccatcagtggggacccctgaagggcagccttgctcttttgtccggaagttcagatgttggagggagccttgtcccgccatctggggaataggggtctctggggctggggcagggctttacatacacacatttcttttttaattattattattaattttatttttttgagagaggatctcactctgtcaaccgggctggagtacagtggcccgatcttggctcgctgcagcctccacctcctgggctcaagtgatcctcccacctcagccccaccaagtagctgggaccacaggtgtgcgccactatgctcggctttttcattttttgtagagatgaggtctcgttaatgttgtccgtgctggtcttgaattcctgggctcaagcgatcctcccacctcggcctctcaaagtgttgggattacaggtgtgagccaccaagcccggcctcacacgtttcacatcactcctcttagcagtccatgaggtgtatgctctcatcccgtttcacagatgaggaaaccgaggcccggatgaagccatctgacctgggtccctcgggtggcagagctggatttcagtgcacttccgctcactccccagcccctgctgcttctgctgggtcaggccccagctgagttctttcctcagcgttgctgagcccatcctgaaggctgcagtgatggggcagggccgtgcttggtcaagggagccctgagtgtgccaacagtcgtctgccgccctctgttccctcctcgccttccttccttatgccacagggtgatcaggtaactgtactgacttgagcccagagaagagcagcccactcccgtaagacagccccccatttcaggaagacatgggtttgaatgcagataagacagccccccatttcaggaagacatgggttggaatgcagagtcctgccacttgggaactccagggtggaattcaccaagtaattgtgcatttacggggcctgaggagatggagggttaatttccatgttgaatagatgcgcctgcttacctcctagaacattacctcctagaacactgtgtgccctgcagagccatcgacctttattataggccacgtgccctcggaaacttgggacagtactgatgcgttctgttgagtgcgtttggcatgtgggaattgtgatggtgcacagtgtcttggccttcactgggttttgtaggcacactaaggtttccatttcattcttcttcagttgccctggcccagcctgggtctctgggtagagcacctgcaggggcagtggacggcctgggctcagggtcggtcagcacctgagaccagcgctcctaggcctggcctgtgactgggctgattttcccccacacagcgtgctaccaccggcctggcagagccagcacggcagccggcgtgtcagtgaggctccagcacaggcagcctcctccaaatgttgttcattcctttctgtgctttttcctctatagcagttcagttagggtcgccagcttgcttttttgaaaatcatagatttttagtttgttttaaaatgacgcagaactaggagaaaatgcaaatggctcctagttttctgaggcttttacacacatgcagtgtttgactgcagttagtttgggattgaaagtggactctgaggccaggtgcggtggctcatgcctgtaatcacagcactttgggaagccaaggcaggcggatcatgaggtcaggagttccagaccagcctggccaacatggtgaaaccccatctctactacaaatacaaaaaaaaaagttagccgagtatggtggcacatgcctgtagtcccaggtactctggaggctgagacaggagaatcacttgaacccaggaggcggagattgccgtgagccgagatgtgccactgcactccagcctgggcgacagagcgagactccatctcaaaaaaaaaaaaaaaagtggactctggaaagtgctctgcttccgtggcgactggtcggctgaacttggtctcacttgtcactcagttctgctgtttgtacctgccaagtaagggagggggactcgggaggctgggcagcctccagccccaccgcctccacctgcatcactttgggcgagtcatatgtgatgaactgggccggctccagtctcccctctgtaacgtggggagaattctccctctcacggctaacgtgggaatcggcagatggaaaacactagctacgcagagtgtgtactgtacacgtggctctgccaagccaggaagggtaggtgtgctgtctgaccgtcacggcatgtggcgtgctctgagtgtaactcgaaaggagaagtttatgagaaagattgaaagaagccagaaaactgacgttcgtcttagttttttgccattgatcattgaactcgagagtggagaactggacggttctaagccaggtttactcacacctctgctccgttgccttaaagccagaaatggttctttacaatcacatagggaatgtcggaggaactgcagggtcacctaacagatgtcagctgagactctcaacaaaaaaacgtttttaccaagaaagctaatgccttcacaggtagggcgctgctggaggcatgtgctggccgccgggcagtgaacctggaaagtgtagagtccttgaaaccactgtggcacgaacacatcctgtggttgttggaagaaggcacagctgacactatatcagtggaattttctgccagcaactagcttactccattttccaagatttggctgaatttattttaggtgtttttttttttttttcttatcacttgagaacattttttcatgtgatgtttcatctttgaaaatattataatctgaagtatgagctggaataatttctttgtcatgtaaaatccttgtttttttttttggaggtgcgaatttttcttacattaacccgtggtggtcttttccctagtagttgctattgagtgttgatgtctgcctctgacaggctaggggtagtctgtctaagtgaacagaaggacattgttgaaagtgaagtatcattatttttattcctgcatcgtcttttgttctttattcttggcagcggtaaaactcctccaggcagctgacagctttaaagaccagaccttctttctcagccaggtttcccaggatgccctgaggagaaccatcttccctctggggggattaacgaaagagtttgtaaagaaaatcgctgctgagaatagacttcatcatgtgcttcagaagaaagaggtacgagtgagcagttgcctttgattagtgcctgtttccctttcccgactgcatggcacggagcagctggacctgtgggtcccgcaccacttccccttctccaggacctaacatcaaaggcgggccttggagcaatagatggaggagtttgctgaggcgcacggtacagggctctgctgacatcgggagcagcctatacgagactccttgcttttttcctctcctctgcccctatgtggtaggcagctttccccacagccttagcagctggtggggtgctcttgggatggcctgcctgccaggtgagtgccaggcagtgtgatgcagccccgagacccctggaggggcaggtgctgtgccgccgtctgcacactcatgtgccctgtcacccgcttgcccggcacagactcgttcggtgccatctgttcgggcgctgtgctgctgggccgcgaggaattggtgacgcgcacacagttccatcttcgcctccatggagcccgcccgcgagtgggggacacaggcaggaggccaatcagtgtaaacctagaaaatgtctacggagggaggtgtaggaccctgggtgggaagcaccagtggggtctgagagtagggaatggagatgccaaaaacggcctcaaaagaagtcacatggaacctgagacctgaaggaggagaggatccggtgtcccagagagggctgggaaagtccagatgagggaacggcagtgcaaaggccttgaggcgaggagaagccagggagccgctgtgggggtgcctgcctgtggccccagctcctcaggaggatcgagcgcacccaggagtttgaggacagcctgggcaacacagcgaaactcgtctcaaaaagagagaacccggagtgttggcggaactaggatgaagcccgtgggagggccttggggatggagggcgagggcgctgtgggatgagcctcacctcttcaggggccagtgcggtgggagctgttgctccttcgtgtctcttcctggtaatggaaacggccatacctttcatcagagccatcttccctgaagagcacgcccaccgcccgtcctcctctcctcttgttttccgtttccggtgtcgctctgtggtgggagccgcagggatggaagggcagtcttgagagacacaaaccagagtaaacgatgcagcccctgatggggccacggtggagagcgcacgccacccaggctccccagctagggcagatgtgcttgaggaaggcgcctctctcctctgactcccctggagccctcccctaaggccttagcttcaggcctggctttcctgctacctgccccttctctggtccctgtctctcccccactcctcgcaggacagtggcctgaaggacctgaccgggttctgctttcttccccggggcagctggtgtgagggtctcccgcgcagggtcagaccccgcgggccgagacaatgaggcgttctctaaggctctggcatcgtgtgcgccggctgtgactggcggccgagggtgccggtgggcagccgggcccctaccctggaagcaaagtgtggggtgaggccgggaggccccagggcccgctcaggacgtctgggtacagcttgggccaccgccacttctgctcctctcacggctgccgtcttctcatttcagagcatgggcatgtgtttcatcgggaagaggaattttgaacatttccttcttcaggtgcgtgctgctctttgacacaaagagatggggctgcgtgtctgccctgggcctagatctccgtcggtaatgacatgtttgttttccagtatctgcagcctcgacctggtcactttatttccatagaagacaataaggttctgggaacacataaaggtgaggtgcagactctgccacttgtcatctgaaatgcctagagctgtggcgtttcagctctgggagactagaccagagttcctgtcgtcccttccacttggctggagaattgtagaaggctctgtggggcggccgggggcgggcacggcctagggtggaacagttgccttgatggtggctgggtgcacttccagatgtggcctcagctgagatgctggagttcatgaaaagcgcgcctctgacttggaaggactatactctgtgagttacgtatcaagtccctgtaaaaagaatgatttccttcctgtgtaaggaaaatgttaaactacacaaaactccactctgattcagggagtaaggtggacgtcccggcatggtgtgaatgattaaggaccacatgcagcgatgggatcaggcgtccgcgctggccagagtgctgctcgctcatgtgcagacccttactgcggtgaggcctgcgtgagcctgtgctgtgcctggtgtcaggggacaggctccgagtcagtcacagtgtgcagtcctgctgtggggacagagtgcagccattgttgggttagtacagtggcggggatgtgcctgccggcgtgatgatcaggcaggtcttgacacagcacagacctgagctgtgggactggccaggagagccaggctgcagctcaggtgtagggcgtcttgcagtgaattgcacttggagatcttccacctcttgtggaggggagacggcaggcggagccggggctaggcattcctgagacaggtggaggtgacagctttgcttgggacagaactgccagacaggattgcccatgtatctgccagccctggccccagcaggagccagttggatgactcatggcttccacctgcagttcacttcactgaagaaggctgccggcccaggccacgtggtaaatcccatgaggttctctctgcctgtgtgccccactgcaggggagggaggcagtgagtttgccatctgctgtgtgacattgtgagggtgcgcagagcagctgggggtagccctgatgcagttactgcattagatggacactgtgaagacgtgcagctatgtcatgggctcagcaagaagggcccctggcgtcacacagggcacccagccgcatcctgggcctagggtcaggggctcctacagctggaacctgcaccttctggggcacaaggtgccttctttgtggccaccacaccccatgtccagcccaggcctggacaatgatgagatgtgctcaggtgcttggtcagggctggctttggtggttggagaatcgtatcttcctagtgagttacaccattgctgggcctgctctgggctgccctcccagcatctgccttcatgatgaggcgtgacatgtgggctgtaacttgttgcccagcctcatggagaaactgtctttctgtaggttggttcctgtataccttgggccagagagcaaacataggtggcctgagagagccctggtacgtggtggagaaggacagcgtcaagggtgacgtgtttgtggtgagtgggccggcctctgagacagcactggggctggttctggcagggccagcagtgcttccagaccagggcttgagaaggcctccagcagccgtggcttcctggaggctgtgactaactctgttcctgtccttggtcccctgcctttcctgggactggccatggtggcaggagagttttaaggtattcattaggctgagttgtatgctggtctcttaatcatccctgaaccccgatacacagatacagtttctccaattttatgaaagaggacagcgacgcccagagcttgggtggctcatccggtggagagggcatggcctcagtgccaaggatggtgcccaccatggtaggatccagtgagttgttgtcaggcaggtgcagatggccaagccaggatcaaaccaagccttccaccacagtggggaccttaccactgtgaccctggcctcaaagcagggccgctcagtggcggcaagctcaccccaccttcaggggaccttgccagtgtctagaggcatttttggttgtcacagcttgggtggaaaagcaaggacgcgggtgctgctgcatctgtgggtcaggccggggatgctgcttgccgtgttcagcacagcctcttccctgagtgacccggcctccaccttggcgcgtggagctgagaaggcccactctcagcaccctggctgccggctcatgttctggcacgaatgctggggcgccttctcttagacggaggcgggggccagcaggccccacccaccgattccaggacatctccttactaggaagacctgtggggagaaaagcctggctgcgaatgaattaaatgatctagatttcagtttgctgtgagaagaccagaagggttaaccaacggcctcctgtccctggacgggtcttggtgcctgcttagaacccaaagcccttaacttcatgctcctcgtcctgcttcaggggcggggcttggcacaatcccaggaggtgccaggtctcaatggcccgaggccatgggtgggtgacagggagcaggggcctcagaaccaacctagggtatctggggccccccagaccagggccagtcctggggcacctgtgggaagccagcagctaccagtccctcctttctcctcagccatttggtgtgtggaggaattcctggggtggccttgagagaagagcccgtggtgtggctggcccctgtccctgcgaatagaaaaaccagtcctcgaggggggccgtgctgctgccccacaggtggttgcaggtagagggcctgagtcagacttgaacctgcagcattcactgtcatgggctcggatctcacccctgcctcttgcccactctgacatggtacttccttcctgggccttagtctcctcatctgtaaaatggggattcaaaggcccggcgggtgatgagatgaatttctgtgggtagaacacttcgagcggtgccagcaccgttacctgtgtgtgtgtgtgctggtaggacagttgttcccagggaccacactgaggccggccttggggccaggtgcccctcggcgtccccaccttcacattccattctgcaggccccccggacagaccacccagccctgtacagggacctgctgaggaccagccgcgtgcactggattgcggaggagcctcccgcagcactggtccgggacaagatgatggagtgccacttccgattccgccaccagatggcactaggtgactgacgggagggctcctgaggacgggccccttgaagctgagcttcctgaggccagatttgggccagggatgggagaccctggggtaggaaagtcccgttgtggagatcatttggagattacctaaagtatttagaactcccgtgtcctgtgcctgccctgagcgaggcctgggggtgctgggagcagatgcaggcaggccccggcgtgttgggctgaagcaagtgtgtacactgccccgcagtgtcctgctgcgtccagggcccaggctggtgccctgcccttcccctctaagcaggggtttttgaccccgtgggctggtgctcctttctccctgggggcctgaggtcgaccaggaaaggcctgtgccccctccaagggcccctctcttctacccagtgccctgtgtgctgaccctcaatcaagatggcaccgtgtgggtgacagctgtgcaggctgtgcgtgcccttgccacaggacaggtgcgtggggtgtgggggtgagcccggggaggactgtactgctctgcaccctgccagggcacccgggttacagaggaaggggctgaggcccaggagtagggtgtgctcgggtcacacagctggtgagggcagagtgccaccagccctgccctgggggctcctcccacagtgacaactgtgagaggatttccactctggtgtcaccaaccagccagttcctgctcgggccctgagaggctcagctgctgcccgggccccagaagcgaggacagaaaatggaaggggcatgaggacagtgctcaaagaggcagagggtcggggcccctgtgggccgagtgtgcaggagctcccagggtgggcgcctggtgggtgtaggcctgaggaatctccaggggcaggtggtgggagggaacctggggtgagggaagcggaagcatcctctggctgccaccatgctccttcctgtcacagctccacattcccaaggggtgcagagacctgccagtcccttggagtcccaggagaggcccctgtgactgtcccactcagggagaggtaccctgaagaccctccctagtgaagccactgggtgccccaggcctctcctctcctgttcagcagcagcagcagcagcaaaaccctgctcccctgggagctcagtgcctggtgctccgagcacaggccaggccccataggggagcactctgcccctgcctgccctcggctggctccctgtggcacccctgatgccagggtctctcccctacagtttgctgtgttctacaagggggacgagtgcctgggcagcgggaagatcctgcggctggggccgtctgcctacacgctccagaagggccagcgcagagctgggatggccactgagagccccagtgacagcccagaagatggtccaggcctgagtcccttgctctgacagagatggatctgctagaaggaacctggagagcaggacccatggctgggcggctggtgagcagtccaggtgcccaagggccagcttgctgctgcccaaagcagaggaagccgggctggctgagggtccgaaaagcctgcaggggcccggcgagccccaggaagagcctcagctccaggctggggctctggctgctggagcatctgctggctggtggggtggcccgagttccccttcaccgcccccagggagggtttcccacctcagagtacaccgaggggacctgcagagggggctgtcgggacagcgtggaataaacattatttcaagg

SEQ ID NO: 14673 - DNA, 1830 bp, Homo sapiens
ggctggggggcttagaattttatttttggtttacagcgcagaagaagagcagtgaggccggggcgcgggtggggagggcaaggcggcggctcaaaaaaaaagccagcccctcgcggcccgacagagtctcggcgccccgcgggtcggtggagcctcaggggtgagcgcaggccggagacaggggaacccgccgcgggacaggggaaggccggacggaacgcgggtaagctgccgcagcttccggccgggccactagcgcggaccctacggccggggcgggacttccggcaaggcgcggaagcggcggtagctgcagctggcgaagttgggcgactggcggatgcaggccttgcggcacgtcgtgtgcgccctgtccggcggcgtggacagcgccgtggccgcgctgctgctgaggcggagaggttaccaggtgacaggggtgtttatgaagaactgggactcactggatgaacatggggtctgtactgccgacaaagactgtgaagatgcttacagagtttgccagatcttagacatccctttccatcaagtgtcctacgtaaaggagtattggaatgatgtgttcaggggcagatgccattgccacaggtcactatgcaagaacttccctggaagatgaagaagtctttgagcagaagcacgttaagaagcccgaagggcttttcagaaatcggtttgaagttagaaatgcggtaaaactcctccaggcagctgacagctttaaagaccagaccttctttctcagccaggtttcccaggatgccctgaggagaaccatcttccctctggggggattaacgaaagagtttgtaaagaaaatcgctgctgagaatagacttcatcatgtgcttcagaagaaagagagcatgggcatgtgtttcatcgggaagaggaattttgaacatttccttcttcagtatctgcagcctcgacctggtcactttatttccatagaagacaataaggttctgggaacacataaaggttggttcctgtataccttgggccagagagcaaacataggtggcctgagagagccctggtacgtggtggagaaggacagcgtcaagggtgacgtgtttgtggccccccggacagaccacccagccctgtacagggacctgctgaggaccagccgcgtgcactggattgcggaggagcctcccgcagcactggtccgggacaagatgatggagtgccacttccgattccgccaccagatggcactagtgccctgtgtgctgaccctcaatcaagatggcaccgtgtgggtgacagctgtgcaggctgtgcgtgcccttgccacaggacagtttgctgtgttctacaagggggacgagtgcctgggcagcgggaagatcctgcggctggggccgtctgcctacacgctccagaagggccagcgcagagctgggatggccactgagagccccagtgacagcccagaagatggtccaggcctgagtcccttgctctgacagagatggatctgctagaaggaacctggagagcaggacccatggctgggcggctggtgagcagtccaggtgcccaagggccagcttgctgctgcccaaagcagaggaagccgggctggctgagggtccgaaaagcctgcaggggcccggcgagccccaggaagagcctcagctccaggctggggctctggctgctggagcatctgctggctggtggggtggcccgagttccccttcaccgcccccagggagggtttcccacctcagagtacaccgaggggacctgcagagggggctgtcgggacagcgtggaataaacattatttcaagg

SEQ ID NO: 14674 - DNA, 21935 bp, Homo sapiens
gccgagaggaggcctccaatggctggctggggggcttagaattttatttttggtttacagcgcagaagaagagcagtgaggccggggcgcgggtggggagggcaaggcggcggctcaaaaaaaaagccagcccctcgcggcccgacagagtctcggcgccccgcgggtcggtggagcctcaggggtgagcgcaggccggagacaggggaacccgccgcgggacaggggaaggccggacggaacgcgggtaagctgccgcagcttccggccgggccactagcgcggaccctacggccggggcgggacttccggcaaggcgcggaagcggcggtagctgcagctggcgaagttgggcgactggcggatgcaggccttgcggcacgtcgtgtgcgccctgtccggcggcgtggacagcgccgtggccgcgctgctgctgaggcggagaggtgaggcgtccgaggctcccgccccccgccgagcgaatgtgtccccggaaacctgtccccgtccgtcgtggcgttgtgcacgtctcctccctccctgggccgctggttgcgcgcgggtcggcaggaggataccccgtcctctgactttggttcggaggctcctcgccctccacctgtgtagtcggaggtgtgcgcgactgcagctccgactacctgggagcagttccgcgcccctctccacccacgcgcgcccacccacagtgagaagccggcgggccggggtggggtggggagggaagggtttctcacggatctgcggcgtccacattcacctgtgagaccgtggacactggtgaggggagctgggatcgccgggccgggggcctgacctctgcacacgctgtggccgcccggtgggaggtccttgtcctccccactcagcagactggacaactgccgcgcggcgggtctgcttgttcagcgtctcctgtgttctccgctcgctggaggacaaagttttctccaggagcatttgcatttcttccggcatctaaacggagccccacgggtgcttagcattcctcgggcccggcgctgaaatgagcacttgtttaacttcacctgtgtggctccccgcgggaggcctcattcacagagtcacgtttgtggagctctgctttgcgccatctttggctcctgaccttgggcaagtgaattaagccgtcccctgtaaaattcggctaacacctgcctcacggggtgactggagggattagatgacatagtacatactgatgagtacgtgctcagcacatacgaggtacgcagaaaacagtagtggctattagtttatattgttaataaccatagctattatggtaggtacagtaagtgccaaagagaagggtaggcggaccataagcagaaatagttgtgaggaagggagagtggaggaaagcatcctagagatggaggtgctcagctgagtcgaaagaagagtaggatgtcactaagcagagacttggaggtggaggcggccctcccggcacagtcagcagtgcaagcagaatcacagaggcctgcaagtgtgggctggttctggccagatggagatggaaggagaggagcctggagcacgtttagccctgattatggaagatgctataccaggggctttagactgttaggtagacattagtctggttgatctgggataggggtggtctttcgcgtgtggtggtgtagttttgacaaagctttgtcatcaaatttctgttgttttgggtactatatgaagccttcttcagcagtcatttgccctgtctttcattacattcagcctacctaaacgaaccagctttctcatacagggtctgcacctgtgtagtttgctaaggtggtgtagggctaaagttggcctttccaatatttgggtgaatattttgttacaatcgaaaaggtagaaaataggtcataaactaggtggtacagctcttacaaaatatcgaaaattttaattatctttatatctgatcacttagaatctaagtcttagatagtaactagaaataacttttgaaaagagtttccttttttgataactgaatggtgctttgaaaaattttgttgagtttcgactattccttcgtgtattccacacacactggctgatcccctcctgctaggtattgtgctgatacatagatggggacacaaagatgagaaaataccacctcgttaatcttggggactcaggcaccaagatggaaaccggatccctgaagccacatggcaaagcagggactgcccggcaggccaggcacagaggcacaggagcacagcgtgtggggaacttctcagagctcagaaatcactgccgttttaccgaaggttgatttatgtattctctttaattgaccttcccgcccgcaggttaccaggtgacaggggtgtttatgaagaactgggactcactggatgaacatggggtctgtactgccgacaaagactgtgaagatgcttacagagtttgccagatcttagacatccctttccatcaagtgtcctacgtaaaggagtattggaatgatgtgttcaggtgagtgcgggtcacagcacaaaggaagcttcctcacactgtggatccttgcagtggaaggatccggtaaccagccagaccgacgcctgtgctgcagcccagcgctctccctccacggtggtgctgaagactgcaagaggcctcagccaccctcggggctctgtgttagaggcgaggcctggaccccacagcacacccagctctctcactcctgtcattttgccacttgcctgaagtctctttaatgctttcttggaccttgagctgtttctgttgcccagttaggataggggagctaaggctgagggctcccctggaaggtgagcaccaatgcctgtgtgctatgtgggtcagcgattaggggatttctgagaaagaggtgatacatggcctgtgcctctgaaaacaagaaacaaacaaaaacttttctaaaatccaatataatctcaataattaagtgctgtgtgctaggcgtgtgccacatctaggaacattaagatgtcttcactgtgacctggctctgtaggagtttgcggtctagttgggaggacattatcttcacaagaggtgacagtgatgcgtggcacgcaggaagtaccagtgatgctatcagtcactgaacccagaggagggagaaacttgcagtgtggagtaatcaagaaggcttcaccggagaggaggggttgcaaacaaagttgtagagaagggactccaaatggggtaacgagagcagcgtgaaggggagaagaaatgctgattgtgtatttcaggaccgttgtaaagtttggctggacttttgttcctgcagtggaaggagtgtagggctcatcctctggtgagccctgactgtgatgaatgtcgggcagttgtcgaaggcgtctgacacagcaggccatgtgcgcgggacaggctgcccctgcctgagtgggctttaggggcagaagagccttgggttgagtcctgactgtagcttattatatgaccttgggcaatttacttgactttgtttttttaattgaaaaaaattctctttttttcctgccaacaaagacccagaagagatacttgacttttctaagccccaattttctcatctttaaaatgaggataacactgatgcctcacagggttatgaaagaattgagattaggttctagtatgtatgcctggtatattagtaagcagtcaataaacatagctgtttttcttttctatttttttttgagacagagcctcgctctgttgcccaggctggagtgcagtggcgcaatcttggctcactgcaacatctgcctcccaggttcaagcgattctcatgcctcagcctcccaagtagctgggattataggcatgcaccaccacgcccggataatttttgtatttttagtagagacagggtttcgccatgttggccgggctagtctcagactcctgacctcagaagatccactcgtctcagcctcccaaagtgctgggattacaggcgtgagccaccacgccagcctgctatttttattttcattattaaaaagatgagtctggggagctaagctatgaggacgcaaaggcataaaaatgatataatggactctggggtgagggataaaagactacacatcgggtacaatgtccactgcttgggtgacgggtacaccaaaatctcagaagtcaccactgaagaacttatccatgtgaccaaataccagctgttgcccaaaaaaccattgaaataacaataaaacgaaatttagagagattaagtaaattgactatggtcacctaaataatcaacggaagagcttgaatatgaaccctctgtgactctatgctataacatatgggtgtcgtatatattaacaacatggacaaaactgatggctgaattttcctggggaaagttacctgtagaatgcatgataaatgcattaaaaacttatctgtagaatgcatgataaatgcattaaaaacttctgcagttttctcggggacataagaaaaaaaaaagagtgtggcggccaaatacaggataaatctgggggaagaccaaaggcagagagtctcaggaagtgctgttgctggagatttggacttcatggggagggagtgtgggagtggaaggtgagggctggcttgttggacccagaggacaagtccaccgggcagtagatctgaggtgcttgttaaacacagacctggaccgaggtctgggggcggccctggaatctgctttaataagcacttcagctgtgctggtggtgtggggggttgtcagggtctttctttgagaaaaggtgtgatgcggcttagggactgatgtgtgtgggagaccagagaggagaggagtcagcagtagtttcaagatcaaggctgggtggctggggaaagctggtttaggggattcctcatgagtactgtagagtttgaggggacaacagggaatccaagtgagcttacacttcacctgccagcacagctttttcagaacgtacgagtggatgcgatttttgaagtttagctcagctgaggccagataggaagagtgacttgaatagtatggcaaattaggagcggagctgggattaaaccccagaattaggagcggagctgggattaaaacccagaattaggagcggagctgggattaaaccccagaattaggagcggagctgggattaaaccccagaattaggagcggagctgggattaaaccccagaattaggagcggagctgggattaaaccccagaattaggagcggagctgggattaaaccccagaattaggagcggagctgggattaaaccccagaattaggagcggagctgggattaaaacccagctttccaggccagtgcttgctgccgccttctggcgctgcttgatagggactgagagaaggaggcggccgggtagagtcttttcccatctctggggctgcccccgaggtcgcccctggctccagccagcctgccctctgccctcgcccagtaccagctgcccgtggaggcattggtctttccgctgaagactcacttctctagtagggctctctagctcagagatttcttttgcattctttcattcaagacccactggccttcaaggatcagagtccagatacgttttagctgctgagtcttttaaatctgtctccctcccgaggcacatgaaaggcttctcttctttccagttagagaagaggctgggctactccattgtttttgctaatgccaaaacacacgccttcccatctgctgtttacgaaagggttaacagtgtgtcttttcagaaactgattttaatgttcagcctcttcaacatttattgatgactgtgatatagaaagtttgttgggtctaggacacagacacagattgcaccttaagtagtttatagtttaatgagcttcctggtaactttctaataattaaagcaaaatggaaagagtgtaataatatcaagtgttgttgcaaatgtggaaaaacatgagtttttatgaacttctagggggactgagaagtaggaaaacagtttggtgcctgctaaagtggaagatatccaaggaacctctgaccctgtgcagatctgtgatatgtctgcaaaacacaaacctcttgatcagcactggttttttttttaacccttgttgattaatagagagttttaggttaaatgaaaaaaatcacttataccaaaaatacacccatttttaaactcccaaaataggcatcataaccctcttgaagtgaatcctcgaagactatgaaattcttggtaagttttgctggtatcatggcatctttttcccatgttcagtcagtctgttagagcagaagttcactgaattaggatagcctgatccactttaagcacccaagagtttgctagttctcagaagtgtgtgtttgtcacctgaggatagtatttttggtatatttgcccagtgacgcagcattccaggctgagattgcagaatggctcatggagcccttgtgtagggaagcctctgactgtgtttctcctctgttctcatcacggcagtcatcctcacggaagaaggcttctgtgacaaaggtgtggggggttttccccatacagcaagcagtggacaccgactgggtgtcctctgattcagttccgataccatctacttggagatagtgctggatcccaaaggttgggggttcagtcccccagacggactccccccacaacagcagtcgaaagtatgggcctctagaacttatgaccaactggcttccagttgggattcccataacttcctctttgggttcaattattaataatttgctggagtggttcacagaactcagaaaaacacatttaccagtttattataaaggatgttgcaaaggatacagatgaagagacgggttgggtgaggtatggggaaagggtcatggagtgtccacaccctccctggggaccaccctccaggagcctccacaagtgtagctgtgcagaagctctctgaacccagtactcctgggtttttatggaggcttcatgacatcgccattccttcccccaggatatacagtgggactgtgtctggggagggtcttaagacccacagtcagaaaggtagacgcttgtaatcctagcactttaggaggctgaggcaggagacttgcttgaggcctggagttcagtatcagcatgggcaacatggcaagacctcatctctataaaaaaagaaaaggttgcagtgggccaggtgcggtggctcacgcctctaattccagcattttgggaggctgaggcgggcagatcacttgaggccaggagttggagaccagcctggccaacatggtgaaaccccgtctctactaaaaatacaaaaattatctgggcatggtgctgcgcacctgtaatcacagctattcggaaggctgaggtgggagaatctgcaagggaagtctaaaggatttcatttccactgtcactcaggcatcttctcttcctcacctaagccctgctgtgttggaggagtcccagaggcagggttttagtgagaccctcacggccactccccactcctgaccccataagccctgtgagcctacacagagacggtggctcctgagccgtagtggcagagaataacaccttgtcgggtggcccatgcagcaggttataaacaaatgttcgatgactgacgttctcctgttttgcagaaaattatagttttggtatgacaaggggaaattacattaaacaagcaatttagtgaactttttttttttttttgaggaatgtttcacacttggaactgaagtcattttcttttattctagtgactttttgaatgagtatgaaaaaggaaggactcccaatcctgacatagtttgcaacaagcacatcaaatttagttgcttttttcattatgctgtggataatcttggtaagtaatttgggtttaaaacatttttttttttaaagacagggtctcgctctgtcacccaggctggattgcagtggtgcgatcatgactcactgcagcctcgacctcctgggctcaagagattctcccaccccaggctcctgagtagcttggaccacaggcatgccaccatggtggctaattttttgtggagatggtgtcacaactgtattgtccaggctggtctcagatttctggccttaagcagtcctcctgcctcggccttccaaagtgctgagattacaagcgtgagcccctgtgcctagcctgtttcttcttgtggaacctcctgatactgaattgcttgcttagaccacctcttgatgtctgtggctatgctttatgaattttaggttcttcttcctgtcccctgccattggggtcaccataatgagtttctgaagttctggctcaggcttcttggtttgctctgtcccactgcagctcaccctgttgtgtgttgctacgagataccattgtaagccaggggcccagtagtgtcggcactttcagcaatgatgtagattaggcttgcagattcaatatgtcagcaacctaaagctgagttgatgataatgatgaaagttagtttgtggagttaggaataaacaaatgcctacaaaaacaaaaaatcaaaaagaaaaatcttaaatttcaacattgggctaacaccaaaaacatgaaacttaatagagataaatgcaaagtttgctaactaggttcagtaattctcctaggacaagattggaaagacctagcttggttgccattgaatcttctgccattggttgcagaaaatctgggggatttaggtgcccccaggctgactgagccagtagtgtgatgtcttttgtcagagccagcacagacggagctcaccttgatgatcatagaatgtctaggaaggggtgatgcgtcccctgtggtccgtcctggttagaccgtattagttattcaggaaaagagtgatagactgatagaatgtgaattgatttttattttcagggtatctggaaatatgtcctccctgaactgttgaaattactttgggtcgtagtggcagtggtcaagcgtgtgagttaggatgacattctttgtgtgacaccagcagacagttaggactggcaggagaaagagttccctgaggtggaggcgcaggcagctgttcaggaagggaaggcttgcctttggagagcattaagctgtcacgaaagctttttagggagcccctaggtggctggctgtcaggcacgctgtggaaggaacttctgcagtgaatgtttccacacctggaagaaaggcatgaaccgtgcagcacaggatgagaggacatgacgcccagacttctgaactcaccgcgcttctcagaggcatcctgcgctttttctagtataagtgctgttctttgaggacacagatgtaaagtggattgttttctctaggagaacctcagtcaagatgagattatgtgtctctaaagtgcctttttcaggtcgttaatatgcagcagctaattcttgctgtgtcttctgtttacatggagctagtgtggctggtccaggatggctgtgtcttctgtttacactgagctagtgtggttggtccaggatggaatccattttgctgcacctttcataaaagtctcttgcaatactaaatatctgtaattttttctttttttgagatggagtctcactctgtctcccaggctggagtgcagtggtgtgatctcggctcactgcaacctccacctcctgagttcaagcaattctcctgcctcagcctcccaagtagctgggattacaggtgcccaccaacatgtctagctaatttttgtactttttttgtagagacggggtttcatcatgttggccaggctggtctcaaactcctgacctcaagtgatccacccacatcggcctcctaaaagtgctgggatgacaggcgtgagccgctgcgcctggcccaaatatctggaatttttacacaatgaaaaggttctggattcatatgcaccttgttaggctctttggctttgtgtaatatgaaaagaagaaacagtgtgctggatgattcttcactctgatgaaaataatacatatttattacagaaaatttaaaagaggagaaacgacacctataatttcactctcagaatcaaaggaatagacctgagatttttcttcaactgtttctgtacagtaaaaaccgtggaatcatggtgttacatcctcgccctgctgaacagtgccgggcattttcccgtgttagtaaacattctctgtaaggacccccattgttacggcagtgcattgtcattcacttcacattctcccagtgttgaacattttggttcttttttttttttttttcctcctgagacagcatcttgctctgttgcccagactagagtgctgtggtgcagtcttggcttcctgcagcctcaacctcccaggttgaagcaatcctcccacctcagcctcccaagtggctgggactacaggtgtgccccaccacgcctggctaatttttgtattttttgtaaaggtgggatttcaccatgttgcccaggctggtcttgaactcctgagcacaagcaatcatctgcccgcctcggcctcccagagtgctaggattacaggcatgagccaccgcgcctggcctcccttcgtattatcacaaaccctgaaaggaatattttgtgtttaaatctttctgtgcctttcagactgtttccttaagccagaaattaactttggaaaggctcttaaaggtgcaataacactttaagtagcaaggttgtatcagcttaagagttcaaggctgcttgtttgatgaaattggatgtgtgcgtctgttccctgggatctctatgtttgggtgcagggtggattgtgcagcccctcagcctaagacttggggtctatactcttcttttgtgccttggtttatgctgatcaaggcctgcaagtatgagtctaaaacctgatccttgtgttctaaaaacctcacaggggcagatgccattgccacaggtcactatgcaagaacttccctggaagatgaagaagtctttgagcagaagcacgttaagaagcccgaagggcttttcagaaatcggtttgaagttagaaatggtaagttcatgtgcccaggtcagagccaaattcttgtgaacagattgaaatctttggaggaatgacagtgggttgtgcctgaggatcactgccacccctccctctgtgctccagagtagcttgtatgggattcacatttgaaaaggtgcagttaccaagaggacattttcccggagggcctgtgattgggtagtaaacagtgtccctgccggccatggtgagggctggtggaaagtgacatcagatactgataatccagctctcgacactgtgtggtgatttgaatgttccaaaaatatctgggtaaatatttgacagtgataattggggtgctgtcagtctagccaaggacctgtacttagcaacaagttctcaagggcgtgcggttcaggcagactttcaacgtgctgtgagcacaggacctgctgtggatcgcatgggctcagcagtcaggctttgtagccgtatttacacgttagtttatgcgtgttagggagccaagtttcacctttctagaaaaaagtcaatggcagacagtgagctgggaagctgctggcctgtcctggtgtacattcgtgtgtagaaaagaggaattccctgtattgttgagtgaaaaaccaagtggggctcagagccgtgtttccgcacggagcgtccgtccatcagtggggacccctgaagggcagccttgctcttttgtccggaagttcagatgttggagggagccttgtcccgccatctggggaataggggtctctggggctggggcagggctttacatacacacatttcttttttaattattattattaattttatttttttgagagaggatctcactctgtcaaccgggctggagtacagtggcccgatcttggctcgctgcagcctccacctcctgggctcaagtgatcctcccacctcagccccaccaagtagctgggaccacaggtgtgcgccactatgctcggctttttcattttttgtagagatgaggtctcgttaatgttgtccgtgctggtcttgaattcctgggctcaagcgatcctcccacctcggcctctcaaagtgttgggattacaggtgtgagccaccaagcccggcctcacacgtttcacatcactcctcttagcagtccatgaggtgtatgctctcatcccgtttcacagatgaggaaaccgaggcccggatgaagccatctgacctgggtccctcgggtggcagagctggatttcagtgcacttccgctcactccccagcccctgctgcttctgctgggtcaggccccagctgagttctttcctcagcgttgctgagcccatcctgaaggctgcagtgatggggcagggccgtgcttggtcaagggagccctgagtgtgccaacagtcgtctgccgccctctgttccctcctcgccttccttccttatgccacagggtgatcaggtaactgtactgacttgagcccagagaagagcagcccactcccgtaagacagccccccatttcaggaagacatgggtttgaatgcagataagacagccccccatttcaggaagacatgggttggaatgcagagtcctgccacttgggaactccagggtggaattcaccaagtaattgtgcatttacggggcctgaggagatggagggttaatttccatgttgaatagatgcgcctgcttacctcctagaacattacctcctagaacactgtgtgccctgcagagccatcgacctttattataggccacgtgccctcggaaacttgggacagtactgatgcgttctgttgagtgcgtttggcatgtgggaattgtgatggtgcacagtgtcttggccttcactgggttttgtaggcacactaaggtttccatttcattcttcttcagttgccctggcccagcctgggtctctgggtagagcacctgcaggggcagtggacggcctgggctcagggtcggtcagcacctgagaccagcgctcctaggcctggcctgtgactgggctgattttcccccacacagcgtgctaccaccggcctggcagagccagcacggcagccggcgtgtcagtgaggctccagcacaggcagcctcctccaaatgttgttcattcctttctgtgctttttcctctatagcagttcagttagggtcgccagcttgcttttttgaaaatcatagatttttagtttgttttaaaatgacgcagaactaggagaaaatgcaaatggctcctagttttctgaggcttttacacacatgcagtgtttgactgcagttagtttgggattgaaagtggactctgaggccaggtgcggtggctcatgcctgtaatcacagcactttgggaagccaaggcaggcggatcatgaggtcaggagttccagaccagcctggccaacatggtgaaaccccatctctactacaaatacaaaaaaaaaagttagccgagtatggtggcacatgcctgtagtcccaggtactctggaggctgagacaggagaatcacttgaacccaggaggcggagattgccgtgagccgagatgtgccactgcactccagcctgggcgacagagcgagactccatctcaaaaaaaaaaaaaaaagtggactctggaaagtgctctgcttccgtggcgactggtcggctgaacttggtctcacttgtcactcagttctgctgtttgtacctgccaagtaagggagggggactcgggaggctgggcagcctccagccccaccgcctccacctgcatcactttgggcgagtcatatgtgatgaactgggccggctccagtctcccctctgtaacgtggggagaattctccctctcacggctaacgtgggaatcggcagatggaaaacactagctacgcagagtgtgtactgtacacgtggctctgccaagccaggaagggtaggtgtgctgtctgaccgtcacggcatgtggcgtgctctgagtgtaactcgaaaggagaagtttatgagaaagattgaaagaagccagaaaactgacgttcgtcttagttttttgccattgatcattgaactcgagagtggagaactggacggttctaagccaggtttactcacacctctgctccgttgccttaaagccagaaatggttctttacaatcacatagggaatgtcggaggaactgcagggtcacctaacagatgtcagctgagactctcaacaaaaaaacgtttttaccaagaaagctaatgccttcacaggtagggcgctgctggaggcatgtgctggccgccgggcagtgaacctggaaagtgtagagtccttgaaaccactgtggcacgaacacatcctgtggttgttggaagaaggcacagctgacactatatcagtggaattttctgccagcaactagcttactccattttccaagatttggctgaatttattttaggtgtttttttttttttttcttatcacttgagaacattttttcatgtgatgtttcatctttgaaaatattataatctgaagtatgagctggaataatttctttgtcatgtaaaatccttgtttttttttttggaggtgcgaatttttcttacattaacccgtggtggtcttttccctagtagttgctattgagtgttgatgtctgcctctgacaggctaggggtagtctgtctaagtgaacagaaggacattgttgaaagtgaagtatcattatttttattcctgcatcgtcttttgttctttattcttggcagcggtaaaactcctccaggcagctgacagctttaaagaccagaccttctttctcagccaggtttcccaggatgccctgaggagaaccatcttccctctggggggattaacgaaagagtttgtaaagaaaatcgctgctgagaatagacttcatcatgtgcttcagaagaaagaggtacgagtgagcagttgcctttgattagtgcctgtttccctttcccgactgcatggcacggagcagctggacctgtgggtcccgcaccacttccccttctccaggacctaacatcaaaggcgggccttggagcaatagatggaggagtttgctgaggcgcacggtacagggctctgctgacatcgggagcagcctatacgagactccttgcttttttcctctcctctgcccctatgtggtaggcagctttccccacagccttagcagctggtggggtgctcttgggatggcctgcctgccaggtgagtgccaggcagtgtgatgcagccccgagacccctggaggggcaggtgctgtgccgccgtctgcacactcatgtgccctgtcacccgcttgcccggcacagactcgttcggtgccatctgttcgggcgctgtgctgctgggccgcgaggaattggtgacgcgcacacagttccatcttcgcctccatggagcccgcccgcgagtgggggacacaggcaggaggccaatcagtgtaaacctagaaaatgtctacggagggaggtgtaggaccctgggtgggaagcaccagtggggtctgagagtagggaatggagatgccaaaaacggcctcaaaagaagtcacatggaacctgagacctgaaggaggagaggatccggtgtcccagagagggctgggaaagtccagatgagggaacggcagtgcaaaggccttgaggcgaggagaagccagggagccgctgtgggggtgcctgcctgtggccccagctcctcaggaggatcgagcgcacccaggagtttgaggacagcctgggcaacacagcgaaactcgtctcaaaaagagagaacccggagtgttggcggaactaggatgaagcccgtgggagggccttggggatggagggcgagggcgctgtgggatgagcctcacctcttcaggggccagtgcggtgggagctgttgctccttcgtgtctcttcctggtaatggaaacggccatacctttcatcagagccatcttccctgaagagcacgcccaccgcccgtcctcctctcctcttgttttccgtttccggtgtcgctctgtggtgggagccgcagggatggaagggcagtcttgagagacacaaaccagagtaaacgatgcagcccctgatggggccacggtggagagcgcacgccacccaggctccccagctagggcagatgtgcttgaggaaggcgcctctctcctctgactcccctggagccctcccctaaggccttagcttcaggcctggctttcctgctacctgccccttctctggtccctgtctctcccccactcctcgcaggacagtggcctgaaggacctgaccgggttctgctttcttccccggggcagctggtgtgagggtctcccgcgcagggtcagaccccgcgggccgagacaatgaggcgttctctaaggctctggcatcgtgtgcgccggctgtgactggcggccgagggtgccggtgggcagccgggcccctaccctggaagcaaagtgtggggtgaggccgggaggccccagggcccgctcaggacgtctgggtacagcttgggccaccgccacttctgctcctctcacggctgccgtcttctcatttcagagcatgggcatgtgtttcatcgggaagaggaattttgaacatttccttcttcaggtgcgtgctgctctttgacacaaagagatggggctgcgtgtctgccctgggcctagatctccgtcggtaatgacatgtttgttttccagtatctgcagcctcgacctggtcactttatttccatagaagacaataaggttctgggaacacataaaggtgaggtgcagactctgccacttgtcatctgaaatgcctagagctgtggcgtttcagctctgggagactagaccagagttcctgtcgtcccttccacttggctggagaattgtagaaggctctgtggggcggccgggggcgggcacggcctagggtggaacagttgccttgatggtggctgggtgcacttccagatgtggcctcagctgagatgctggagttcatgaaaagcgcgcctctgacttggaaggactatactctgtgagttacgtatcaagtccctgtaaaaagaatgatttccttcctgtgtaaggaaaatgttaaactacacaaaactccactctgattcagggagtaaggtggacgtcccggcatggtgtgaatgattaaggaccacatgcagcgatgggatcaggcgtccgcgctggccagagtgctgctcgctcatgtgcagacccttactgcggtgaggcctgcgtgagcctgtgctgtgcctggtgtcaggggacaggctccgagtcagtcacagtgtgcagtcctgctgtggggacagagtgcagccattgttgggttagtacagtggcggggatgtgcctgccggcgtgatgatcaggcaggtcttgacacagcacagacctgagctgtgggactggccaggagagccaggctgcagctcaggtgtagggcgtcttgcagtgaattgcacttggagatcttccacctcttgtggaggggagacggcaggcggagccggggctaggcattcctgagacaggtggaggtgacagctttgcttgggacagaactgccagacaggattgcccatgtatctgccagccctggccccagcaggagccagttggatgactcatggcttccacctgcagttcacttcactgaagaaggctgccggcccaggccacgtggtaaatcccatgaggttctctctgcctgtgtgccccactgcaggggagggaggcagtgagtttgccatctgctgtgtgacattgtgagggtgcgcagagcagctgggggtagccctgatgcagttactgcattagatggacactgtgaagacgtgcagctatgtcatgggctcagcaagaagggcccctggcgtcacacagggcacccagccgcatcctgggcctagggtcaggggctcctacagctggaacctgcaccttctggggcacaaggtgccttctttgtggccaccacaccccatgtccagcccaggcctggacaatgatgagatgtgctcaggtgcttggtcagggctggctttggtggttggagaatcgtatcttcctagtgagttacaccattgctgggcctgctctgggctgccctcccagcatctgccttcatgatgaggcgtgacatgtgggctgtaacttgttgcccagcctcatggagaaactgtctttctgtaggttggttcctgtataccttgggccagagagcaaacataggtggcctgagagagccctggtacgtggtggagaaggacagcgtcaagggtgacgtgtttgtggtgagtgggccggcctctgagacagcactggggctggttctggcagggccagcagtgcttccagaccagggcttgagaaggcctccagcagccgtggcttcctggaggctgtgactaactctgttcctgtccttggtcccctgcctttcctgggactggccatggtggcaggagagttttaaggtattcattaggctgagttgtatgctggtctcttaatcatccctgaaccccgatacacagatacagtttctccaattttatgaaagaggacagcgacgcccagagcttgggtggctcatccggtggagagggcatggcctcagtgccaaggatggtgcccaccatggtaggatccagtgagttgttgtcaggcaggtgcagatggccaagccaggatcaaaccaagccttccaccacagtggggaccttaccactgtgaccctggcctcaaagcagggccgctcagtggcggcaagctcaccccaccttcaggggaccttgccagtgtctagaggcatttttggttgtcacagcttgggtggaaaagcaaggacgcgggtgctgctgcatctgtgggtcaggccggggatgctgcttgccgtgttcagcacagcctcttccctgagtgacccggcctccaccttggcgcgtggagctgagaaggcccactctcagcaccctggctgccggctcatgttctggcacgaatgctggggcgccttctcttagacggaggcgggggccagcaggccccacccaccgattccaggacatctccttactaggaagacctgtggggagaaaagcctggctgcgaatgaattaaatgatctagatttcagtttgctgtgagaagaccagaagggttaaccaacggcctcctgtccctggacgggtcttggtgcctgcttagaacccaaagcccttaacttcatgctcctcgtcctgcttcaggggcggggcttggcacaatcccaggaggtgccaggtctcaatggcccgaggccatgggtgggtgacagggagcaggggcctcagaaccaacctagggtatctggggccccccagaccagggccagtcctggggcacctgtgggaagccagcagctaccagtccctcctttctcctcagccatttggtgtgtggaggaattcctggggtggccttgagagaagagcccgtggtgtggctggcccctgtccctgcgaatagaaaaaccagtcctcgaggggggccgtgctgctgccccacaggtggttgcaggtagagggcctgagtcagacttgaacctgcagcattcactgtcatgggctcggatctcacccctgcctcttgcccactctgacatggtacttccttcctgggccttagtctcctcatctgtaaaatggggattcaaaggcccggcgggtgatgagatgaatttctgtgggtagaacacttcgagcggtgccagcaccgttacctgtgtgtgtgtgtgctggtaggacagttgttcccagggaccacactgaggccggccttggggccaggtgcccctcggcgtccccaccttcacattccattctgcaggccccccggacagaccacccagccctgtacagggacctgctgaggaccagccgcgtgcactggattgcggaggagcctcccgcagcactggtccgggacaagatgatggagtgccacttccgattccgccaccagatggcactaggtgactgacgggagggctcctgaggacgggccccttgaagctgagcttcctgaggccagatttgggccagggatgggagaccctggggtaggaaagtcccgttgtggagatcatttggagattacctaaagtatttagaactcccgtgtcctgtgcctgccctgagcgaggcctgggggtgctgggagcagatgcaggcaggccccggcgtgttgggctgaagcaagtgtgtacactgccccgcagtgtcctgctgcgtccagggcccaggctggtgccctgcccttcccctctaagcaggggtttttgaccccgtgggctggtgctcctttctccctgggggcctgaggtcgaccaggaaaggcctgtgccccctccaagggcccctctcttctacccagtgccctgtgtgctgaccctcaatcaagatggcaccgtgtgggtgacagctgtgcaggctgtgcgtgcccttgccacaggacaggtgcgtggggtgtgggggtgagcccggggaggactgtactgctctgcaccctgccagggcacccgggttacagaggaaggggctgaggcccaggagtagggtgtgctcgggtcacacagctggtgagggcagagtgccaccagccctgccctgggggctcctcccacagtgacaactgtgagaggatttccactctggtgtcaccaaccagccagttcctgctcgggccctgagaggctcagctgctgcccgggccccagaagcgaggacagaaaatggaaggggcatgaggacagtgctcaaagaggcagagggtcggggcccctgtgggccgagtgtgcaggagctcccagggtgggcgcctggtgggtgtaggcctgaggaatctccaggggcaggtggtgggagggaacctggggtgagggaagcggaagcatcctctggctgccaccatgctccttcctgtcacagctccacattcccaaggggtgcagagacctgccagtcccttggagtcccaggagaggcccctgtgactgtcccactcagggagaggtaccctgaagaccctccctagtgaagccactgggtgccccaggcctctcctctcctgttcagcagcagcagcagcagcaaaaccctgctcccctgggagctcagtgcctggtgctccgagcacaggccaggccccataggggagcactctgcccctgcctgccctcggctggctccctgtggcacccctgatgccagggtctctcccctacagtttgctgtgttctacaagggggacgagtgcctgggcagcgggaagatcctgcggctggggccgtctgcctacacgctccagaagggccagcgcagagctgggatggccactgagagccccagtgacagcccagaagatggtccaggcctgagtcccttgctctgacagagatggatctgctagaaggaacctggagagcaggacccatggctgggcggctggtgagcagtccaggtgcccaagggccagcttgctgctgcccaaagcagaggaagccgggctggctgagggtccgaaaagcctgcaggggcccggcgagccccaggaagagcctcagctccaggctggggctctggctgctggagcatctgctggctggtggggtggcccgagttccccttcaccgcccccagggagggtttcccacctcagagtacaccgaggggacctgcagagggggctgtcgggacagcgtggaataaacattatttcaa

SEQ ID NO: 14675 - DNA, 1793 bp, Homo sapiens
gccgagaggaggcctccaatggctggctggggggcttagaattttatttttggtttacagcgcagaagaagagcagtgaggccggggcgcgggtggggagggcaaggcggcggctcaaaaaaaaagccagcccctcgcggcccgacagagtctcggcgccccgcgggtcggtggagcctcaggggtgagcgcaggccggagacaggggaacccgccgcgggacaggggaaggccggacggaacgcgggtaagctgccgcagcttccggccgggccactagcgcggaccctacggccggggcgggacttccggcaaggcgcggaagcggcggtagctgcagctggcgaagttgggcgactggcggatgcaggccttgcggcacgtcgtgtgcgccctgtccggcggcgtggacagcgccgtggccgcgctgctgctgaggcggagaggttaccaggtgacaggggtgtttatgaagaactgggactcactggatgaacatggggtctgtactgccgacaaagactgtgaagatgcttacagagtttgccagatcttagacatccctttccatcaagtgtcctacgtaaaggagtattggaatgatgtgttcaggggcagatgccattgccacaggtcactatgcaagaacttccctggaagatgaagaagtctttgagcagaagcacgttaagaagcccgaagggcttttcagaaatcggtttgaagttagaaatggtttcccaggatgccctgaggagaaccatcttccctctggggggattaacgaaagagtttgtaaagaaaatcgctgctgagaatagacttcatcatgtgcttcagaagaaagagagcatgggcatgtgtttcatcgggaagaggaattttgaacatttccttcttcagtatctgcagcctcgacctggtcactttatttccatagaagacaataaggttctgggaacacataaaggttggttcctgtataccttgggccagagagcaaacataggtggcctgagagagccctggtacgtggtggagaaggacagcgtcaagggtgacgtgtttgtggccccccggacagaccacccagccctgtacagggacctgctgaggaccagccgcgtgcactggattgcggaggagcctcccgcagcactggtccgggacaagatgatggagtgccacttccgattccgccaccagatggcactagtgccctgtgtgctgaccctcaatcaagatggcaccgtgtgggtgacagctgtgcaggctgtgcgtgcccttgccacaggacagtttgctgtgttctacaagggggacgagtgcctgggcagcgggaagatcctgcggctggggccgtctgcctacacgctccagaagggccagcgcagagctgggatggccactgagagccccagtgacagcccagaagatggtccaggcctgagtcccttgctctgacagagatggatctgctagaaggaacctggagagcaggacccatggctgggcggctggtgagcagtccaggtgcccaagggccagcttgctgctgcccaaagcagaggaagccgggctggctgagggtccgaaaagcctgcaggggcccggcgagccccaggaagagcctcagctccaggctggggctctggctgctggagcatctgctggctggtggggtggcccgagttccccttcaccgcccccagggagggtttcccacctcagagtacaccgaggggacctgcagagggggctgtcgggacagcgtggaataaacattatttcaa

SEQ ID NO: 14676 - DNA, 21913 bp, Homo sapiens; identical to SEQ ID NO: 14672

SEQ ID NO: 14677 - DNA, 1775 bp, Homo sapiens
ggctggggggcttagaattttatttttggtttacagcgcagaagaagagcagtgaggccggggcgcgggtggggagggcaaggcggcggctcaaaaaaaaagccagcccctcgcggcccgacagagtctcggcgccccgcgggtcggtggagcctcaggggtgagcgcaggccggagacaggggaacccgccgcgggacaggggaaggccggacggaacgcgggtaagctgccgcagcttccggccgggccactagcgcggaccctacggccggggcgggacttccggcaaggcgcggaagcggcggtagctgcagctggcgaagttgggcgactggcggatgcaggccttgcggcacgtcgtgtgcgccctgtccggcggcgtggacagcgccgtggccgcgctgctgctgaggcggagaggttaccaggtgacaggggtgtttatgaagaactgggactcactggatgaacatggggtctgtactgccgacaaagactgtgaagatgcttacagagtttgccagatcttagacatccctttccatcaagtgtcctacgtaaaggagtattggaatgatgtgttcaggggcagatgccattgccacaggtcactatgcaagaacttccctggaagatgaagaagtctttgagcagaagcacgttaagaagcccgaagggcttttcagaaatcggtttgaagttagaaatgccaggtttcccaggatgccctgaggagaaccatcttccctctggggggattaacgaaagagtttgtaaagaaaatcgctgctgagaatagacttcatcatgtgcttcagaagaaagagagcatgggcatgtgtttcatcgggaagaggaattttgaacatttccttcttcagtatctgcagcctcgacctggtcactttatttccatagaagacaataaggttctgggaacacataaaggttggttcctgtataccttgggccagagagcaaacataggtggcctgagagagccctggtacgtggtggagaaggacagcgtcaagggtgacgtgtttgtggccccccggacagaccacccagccctgtacagggacctgctgaggaccagccgcgtgcactggattgcggaggagcctcccgcagcactggtccgggacaagatgatggagtgccacttccgattccgccaccagatggcactagtgccctgtgtgctgaccctcaatcaagatggcaccgtgtgggtgacagctgtgcaggctgtgcgtgcccttgccacaggacagtttgctgtgttctacaagggggacgagtgcctgggcagcgggaagatcctgcggctggggccgtctgcctacacgctccagaagggccagcgcagagctgggatggccactgagagccccagtgacagcccagaagatggtccaggcctgagtcccttgctctgacagagatggatctgctagaaggaacctggagagcaggacccatggctgggcggctggtgagcagtccaggtgcccaagggccagcttgctgctgcccaaagcagaggaagccgggctggctgagggtccgaaaagcctgcaggggcccggcgagccccaggaagagcctcagctccaggctggggctctggctgctggagcatctgctggctggtggggtggcccgagttccccttcaccgcccccagggagggtttcccacctcagagtacaccgaggggacctgcagagggggctgtcgggacagcgtggaataaacattatttcaagg

SEQ ID NO: 14678 - DNA, 21913 bp, Homo sapiens; identical to SEQ ID NO: 14672

SEQ ID NO: 14679 - DNA, 1688 bp, Homo sapiens
ggctggggggcttagaattttatttttggtttacagcgcagaagaagagcagtgaggccggggcgcgggtggggagggcaaggcggcggctcaaaaaaaaagccagcccctcgcggcccgacagagtctcggcgccccgcgggtcggtggagcctcaggggtgagcgcaggccggagacaggggaacccgccgcgggacaggggaaggccggacggaacgcgggtaagctgccgcagcttccggccgggccactagcgcggaccctacggccggggcgggacttccggcaaggcgcggaagcggcggtagctgcagctggcgaagttgggcgactggcggatgcaggccttgcggcacgtcgtgtgcgccctgtccggcggcgtggacagcgccgtggccgcgctgctgctgaggcggagaggttaccaggtgacaggggtgtttatgaagaactgggactcactggatgaacatggggtctgtactgccgacaaagactgtgaagatgcttacagagtttgccagatcttagacatccctttccatcaagtgtcctacgtaaaggagtattggaatgatgtgttcaggggcagatgccattgccacaggtcactatgcaagaacttccctggaagatgaagaagtctttgagcagaagcacgttaagaagcccgaagggcttttcagaaatcggtttgaagttagaaatggtttcccaggatgccctgaggagaaccatcttccctctggggggattaacgaaagagtttgtaaagaaaatcgctgctgagaatagacttcatcatgtgcttcagaagaaagagagcatgggcatgtgtttcatcgggaagaggaattttgaacatttccttcttcagtatctgcagcctcgacctggtcactttatttccatagaagacaataaggttctgggaacacataaaggttggttcctgtataccttgggccagagagcaaacataggtggcctgagagagccctggtacgtggtggagaaggacagcgtcaagggtgacgtgtttgtggccccccggacagaccacccagccctgtacagggacctgctgaggaccagccgcgtgcactggattgcggaggagcctcccgcagcactggtccgggacaagatgatggagtgccacttccgattccgccaccagatggcactagtttgctgtgttctacaagggggacgagtgcctgggcagcgggaagatcctgcggctggggccgtctgcctacacgctccagaagggccagcgcagagctgggatggccactgagagccccagtgacagcccagaagatggtccaggcctgagtcccttgctctgacagagatggatctgctagaaggaacctggagagcaggacccatggctgggcggctggtgagcagtccaggtgcccaagggccagcttgctgctgcccaaagcagaggaagccgggctggctgagggtccgaaaagcctgcaggggcccggcgagccccaggaagagcctcagctccaggctggggctctggctgctggagcatctgctggctggtggggtggcccgagttccccttcaccgcccccagggagggtttcccacctcagagtacaccgaggggacctgcagagggggctgtcgggacagcgtggaataaacattatttcaagg

SEQ ID NO: 14680 - DNA, 21913 bp, Homo sapiens; identical to SEQ ID NO: 14672

SEQ ID NO: 14681 - DNA, 1882 bp, Homo sapiens
ggctggggggcttagaattttatttttggtttacagcgcagaagaagagcagtgaggccggggcgcgggtggggagggcaaggcggcggctcaaaaaaaaagccagcccctcgcggcccgacagagtctcggcgccccgcgggtcggtggagcctcaggggtgagcgcaggccggagacaggggaacccgccgcgggacaggggaaggccggacggaacgcgggtaagctgccgcagcttccggccgggccactagcgcggaccctacggccggggcgggacttccggcaaggcgcggaagcggcggtagctgcagctggcgaagttgggcgactggcggatgcaggccttgcggcacgtcgtgtgcgccctgtccggcggcgtggacagcgccgtggccgcgctgctgctgaggcggagaggttaccaggtgacaggggtgtttatgaagaactgggactcactggatgaacatggggtctgtactgccgacaaagactgtgaagatgcttacagagtttgccagatcttagacatccctttccatcaagtgtcctacgtaaaggagtattggaatgatgtgttcagtgactttttgaatgagtatgaaaaaggaaggactcccaatcctgacatagtttgcaacaagcacatcaaatttagttgcttttttcattatgctgtggataatcttggggcagatgccattgccacaggtcactatgcaagaacttccctggaagatgaagaagtctttgagcagaagcacgttaagaagcccgaagggcttttcagaaatcggtttgaagttagaaatgccaggtttcccaggatgccctgaggagaaccatcttccctctggggggattaacgaaagagtttgtaaagaaaatcgctgctgagaatagacttcatcatgtgcttcagaagaaagagagcatgggcatgtgtttcatcgggaagaggaattttgaacatttccttcttcagtatctgcagcctcgacctggtcactttatttccatagaagacaataaggttctgggaacacataaaggttggttcctgtataccttgggccagagagcaaacataggtggcctgagagagccctggtacgtggtggagaaggacagcgtcaagggtgacgtgtttgtggccccccggacagaccacccagccctgtacagggacctgctgaggaccagccgcgtgcactggattgcggaggagcctcccgcagcactggtccgggacaagatgatggagtgccacttccgattccgccaccagatggcactagtgccctgtgtgctgaccctcaatcaagatggcaccgtgtgggtgacagctgtgcaggctgtgcgtgcccttgccacaggacagtttgctgtgttctacaagggggacgagtgcctgggcagcgggaagatcctgcggctggggccgtctgcctacacgctccagaagggccagcgcagagctgggatggccactgagagccccagtgacagcccagaagatggtccaggcctgagtcccttgctctgacagagatggatctgctagaaggaacctggagagcaggacccatggctgggcggctggtgagcagtccaggtgcccaagggccagcttgctgctgcccaaagcagaggaagccgggctggctgagggtccgaaaagcctgcaggggcccggcgagccccaggaagagcctcagctccaggctggggctctggctgctggagcatctgctggctggtggggtggcccgagttccccttcaccgcccccagggagggtttcccacctcagagtacaccgaggggacctgcagagggggctgtcgggacagcgtggaataaacattatttcaagg

SEQ ID NO: 14682 - DNA, 2497 bp, Homo sapiens
gccaggtttcccaggatgccctgaggagaaccatcttccctctggggggattaacgaaagagtttgtaaagaaaatcgctgctgagaatagacttcatcatgtgcttcagaagaaagaggtacgagtgagcagttgcctttgattagtgcctgtttccctttcccgactgcatggcacggagcagctggacctgtgggtcccgcaccacttccccttctccaggacctaacatcaaaggcgggccttggagcaatagatggaggagtttgctgaggcgcacggtacagggctctgctgacatcgggagcagcctatacgagactccttgcttttttcctctcctctgcccctatgtggtaggcagctttccccacagccttagcagctggtggggtgctcttgggatggcctgcctgccaggtgagtgccaggcagtgtgatgcagccccgagacccctggaggggcaggtgctgtgccgccgtctgcacactcatgtgccctgtcacccgcttgcccggcacagactcgttcggtgccatctgttcgggcgctgtgctgctgggccgcgaggaattggtgacgcgcacacagttccatcttcgcctccatggagcccgcccgcgagtgggggacacaggcaggaggccaatcagtgtaaacctagaaaatgtctacggagggaggtgtaggaccctgggtgggaagcaccagtggggtctgagagtagggaatggagatgccaaaaacggcctcaaaagaagtcacatggaacctgagacctgaaggaggagaggatccggtgtcccagagagggctgggaaagtccagatgagggaacggcagtgcaaaggccttgaggcgaggagaagccagggagccgctgtgggggtgcctgcctgtggccccagctcctcaggaggatcgagcgcacccaggagtttgaggacagcctgggcaacacagcgaaactcgtctcaaaaagagagaacccggagtgttggcggaactaggatgaagcccgtgggagggccttggggatggagggcgagggcgctgtgggatgagcctcacctcttcaggggccagtgcggtgggagctgttgctccttcgtgtctcttcctggtaatggaaacggccatacctttcatcagagccatcttccctgaagagcacgcccaccgcccgtcctcctctcctcttgttttccgtttccggtgtcgctctgtggtgggagccgcagggatggaagggcagtcttgagagacacaaaccagagtaaacgatgcagcccctgatggggccacggtggagagcgcacgccacccaggctccccagctagggcagatgtgcttgaggaaggcgcctctctcctctgactcccctggagccctcccctaaggccttagcttcaggcctggctttcctgctacctgccccttctctggtccctgtctctcccccactcctcgcaggacagtggcctgaaggacctgaccgggttctgctttcttccccggggcagctggtgtgagggtctcccgcgcagggtcagaccccgcgggccgagacaatgaggcgttctctaaggctctggcatcgtgtgcgccggctgtgactggcggccgagggtgccggtgggcagccgggcccctaccctggaagcaaagtgtggggtgaggccgggaggccccagggcccgctcaggacgtctgggtacagcttgggccaccgccacttctgctcctctcacggctgccgtcttctcatttcagagcatgggcatgtgtttcatcgggaagaggaattttgaacatttccttcttcaggtgcgtgctgctctttgacacaaagagatggggctgcgtgtctgccctgggcctagatctccgtcggtaatgacatgtttgttttccagtatctgcagcctcgacctggtcactttatttccatagaagacaataaggttctgggaacacataaaggtgaggtgcagactctgccacttgtcatctgaaatgcctagagctgtggcgtttcagctctgggagactagaccagagttcctgtcgtcccttccacttggctggagaattgtagaaggctctgtggggcggccgggggcgggcacggcctagggtggaacagttgccttgatggtggctgggtgcacttccagatgtggcctcagctgagatgctggagttcatgaaaagcgcgcctctgacttggaaggactatactctgtgagttacgtatcaagtccctgtaaaaagaatgatttccttcctgtgtaaggaaaatgttaaactacacaaaactccactctgattcagggagtaaggtggacgtcccggcatggtgtgaatgattaaggaccacatgcagcgatgggatcaggcgtccgcgctggccagagtgctgctcgctcatgtgcagacccttactgcggtgaggcctgcgtgagcctgtgctgtgcctggtgtcaggggacag

SEQ ID NO: 14683 - DNA, 557 bp, Homo sapiens
gccaggtttcccaggatgccctgaggagaaccatcttccctctggggggattaacgaaagagtttgtaaagaaaatcgctgctgagaatagacttcatcatgtgcttcagaagaaagagagcatgggcatgtgtttcatcgggaagaggaattttgaacatttccttcttcagtatctgcagcctcgacctggtcactttatttccatagaagacaataaggttctgggaacacataaagatgtggcctcagctgagatgctggagttcatgaaaagcgcgcctctgacttggaaggactatactctgtgagttacgtatcaagtccctgtaaaaagaatgatttccttcctgtgtaaggaaaatgttaaactacacaaaactccactctgattcagggagtaaggtggacgtcccggcatggtgtgaatgattaaggaccacatgcagcgatgggatcaggcgtccgcgctggccagagtgctgctcgctcatgtgcagacccttactgcggtgaggcctgcgtgagcctgtgctgtgcctggtgtcaggggacag

SEQ ID NO: 14684 - DNA, 16990 bp, Homo sapiens
gtgcacgtctcctccctccctgggccgctggttgcgcgcgggtcggcaggaggataccccgtcctctgactttggttcggaggctcctcgccctccacctgtgtagtcggaggtgtgcgcgactgcagctccgactacctgggagcagttccgcgcccctctccacccacgcgcgcccacccacagtgagaagccggcgggccggggtggggtggggagggaagggtttctcacggatctgcggcgtccacattcacctgtgagaccgtggacactggtgaggggagctgggatcgccgggccgggggcctgacctctgcacacgctgtggccgcccggtgggaggtccttgtcctccccactcagcagactggacaactgccgcgcggcgggtctgcttgttcagcgtctcctgtgttctccgctcgctggaggacaaagttttctccaggagcatttgcatttcttccggcatctaaacggagccccacgggtgcttagcattcctcgggcccggcgctgaaatgagcacttgtttaacttcacctgtgtggctccccgcgggaggcctcattcacagagtcacgtttgtggagctctgctttgcgccatctttggctcctgaccttgggcaagtgaattaagccgtcccctgtaaaattcggctaacacctgcctcacggggtgactggagggattagatgacatagtacatactgatgagtacgtgctcagcacatacgaggtacgcagaaaacagtagtggctattagtttatattgttaataaccatagctattatggtaggtacagtaagtgccaaagagaagggtaggcggaccataagcagaaatagttgtgaggaagggagagtggaggaaagcatcctagagatggaggtgctcagctgagtcgaaagaagagtaggatgtcactaagcagagacttggaggtggaggcggccctcccggcacagtcagcagtgcaagcagaatcacagaggcctgcaagtgtgggctggttctggccagatggagatggaaggagaggagcctggagcacgtttagccctgattatggaagatgctataccaggggctttagactgttaggtagacattagtctggttgatctgggataggggtggtctttcgcgtgtggtggtgtagttttgacaaagctttgtcatcaaatttctgttgttttgggtactatatgaagccttcttcagcagtcatttgccctgtctttcattacattcagcctacctaaacgaaccagctttctcatacagggtctgcacctgtgtagtttgctaaggtggtgtagggctaaagttggcctttccaatatttgggtgaatattttgttacaatcgaaaaggtagaaaataggtcataaactaggtggtacagctcttacaaaatatcgaaaattttaattatctttatatctgatcacttagaatctaagtcttagatagtaactagaaataacttttgaaaagagtttccttttttgataactgaatggtgctttgaaaaattttgttgagtttcgactattccttcgtgtattccacacacactggctgatcccctcctgctaggtattgtgctgatacatagatggggacacaaagatgagaaaataccacctcgttaatcttggggactcaggcaccaagatggaaaccggatccctgaagccacatggcaaagcagggactgcccggcaggccaggcacagaggcacaggagcacagcgtgtggggaacttctcagagctcagaaatcactgccgttttaccgaaggttgatttatgtattctctttaattgaccttcccgcccgcaggttaccaggtgacaggggtgtttatgaagaactgggactcactggatgaacatggggtctgtactgccgacaaagactgtgaagatgcttacagagtttgccagatcttagacatccctttccatcaagtgtcctacgtaaaggagtattggaatgatgtgttcaggtgagtgcgggtcacagcacaaaggaagcttcctcacactgtggatccttgcagtggaaggatccggtaaccagccagaccgacgcctgtgctgcagcccagcgctctccctccacggtggtgctgaagactgcaagaggcctcagccaccctcggggctctgtgttagaggcgaggcctggaccccacagcacacccagctctctcactcctgtcattttgccacttgcctgaagtctctttaatgctttcttggaccttgagctgtttctgttgcccagttaggataggggagctaaggctgagggctcccctggaaggtgagcaccaatgcctgtgtgctatgtgggtcagcgattaggggatttctgagaaagaggtgatacatggcctgtgcctctgaaaacaagaaacaaacaaaaacttttctaaaatccaatataatctcaataattaagtgctgtgtgctaggcgtgtgccacatctaggaacattaagatgtcttcactgtgacctggctctgtaggagtttgcggtctagttgggaggacattatcttcacaagaggtgacagtgatgcgtggcacgcaggaagtaccagtgatgctatcagtcactgaacccagaggagggagaaacttgcagtgtggagtaatcaagaaggcttcaccggagaggaggggttgcaaacaaagttgtagagaagggactccaaatggggtaacgagagcagcgtgaaggggagaagaaatgctgattgtgtatttcaggaccgttgtaaagtttggctggacttttgttcctgcagtggaaggagtgtagggctcatcctctggtgagccctgactgtgatgaatgtcgggcagttgtcgaaggcgtctgacacagcaggccatgtgcgcgggacaggctgcccctgcctgagtgggctttaggggcagaagagccttgggttgagtcctgactgtagcttattatatgaccttgggcaatttacttgactttgtttttttaattgaaaaaaattctctttttttcctgccaacaaagacccagaagagatacttgacttttctaagccccaattttctcatctttaaaatgaggataacactgatgcctcacagggttatgaaagaattgagattaggttctagtatgtatgcctggtatattagtaagcagtcaataaacatagctgtttttcttttctatttttttttgagacagagcctcgctctgttgcccaggctggagtgcagtggcgcaatcttggctcactgcaacatctgcctcccaggttcaagcgattctcatgcctcagcctcccaagtagctgggattataggcatgcaccaccacgcccggataatttttgtatttttagtagagacagggtttcgccatgttggccgggctagtctcagactcctgacctcagaagatccactcgtctcagcctcccaaagtgctgggattacaggcgtgagccaccacgccagcctgctatttttattttcattattaaaaagatgagtctggggagctaagctatgaggacgcaaaggcataaaaatgatataatggactctggggtgagggataaaagactacacatcgggtacaatgtccactgcttgggtgacgggtacaccaaaatctcagaagtcaccactgaagaacttatccatgtgaccaaataccagctgttgcccaaaaaaccattgaaataacaataaaacgaaatttagagagattaagtaaattgactatggtcacctaaataatcaacggaagagcttgaatatgaaccctctgtgactctatgctataacatatgggtgtcgtatatattaacaacatggacaaaactgatggctgaattttcctggggaaagttacctgtagaatgcatgataaatgcattaaaaacttatctgtagaatgcatgataaatgcattaaaaacttctgcagttttctcggggacataagaaaaaaaaaagagtgtggcggccaaatacaggataaatctgggggaagaccaaaggcagagagtctcaggaagtgctgttgctggagatttggacttcatggggagggagtgtgggagtggaaggtgagggctggcttgttggacccagaggacaagtccaccgggcagtagatctgaggtgcttgttaaacacagacctggaccgaggtctgggggcggccctggaatctgctttaataagcacttcagctgtgctggtggtgtggggggttgtcagggtctttctttgagaaaaggtgtgatgcggcttagggactgatgtgtgtgggagaccagagaggagaggagtcagcagtagtttcaagatcaaggctgggtggctggggaaagctggtttaggggattcctcatgagtactgtagagtttgaggggacaacagggaatccaagtgagcttacacttcacctgccagcacagctttttcagaacgtacgagtggatgcgatttttgaagtttagctcagctgaggccagataggaagagtgacttgaatagtatggcaaattaggagcggagctgggattaaaccccagaattaggagcggagctgggattaaaacccagaattaggagcggagctgggattaaaccccagaattaggagcggagctgggattaaaccccagaattaggagcggagctgggattaaaccccagaattaggagcggagctgggattaaaccccagaattaggagcggagctgggattaaaccccagaattaggagcggagctgggattaaaccccagaattaggagcggagctgggattaaaacccagctttccaggccagtgcttgctgccgccttctggcgctgcttgatagggactgagagaaggaggcggccgggtagagtcttttcccatctctggggctgcccccgaggtcgcccctggctccagccagcctgccctctgccctcgcccagtaccagctgcccgtggaggcattggtctttccgctgaagactcacttctctagtagggctctctagctcagagatttcttttgcattctttcattcaagacccactggccttcaaggatcagagtccagatacgttttagctgctgagtcttttaaatctgtctccctcccgaggcacatgaaaggcttctcttctttccagttagagaagaggctgggctactccattgtttttgctaatgccaaaacacacgccttcccatctgctgtttacgaaagggttaacagtgtgtcttttcagaaactgattttaatgttcagcctcttcaacatttattgatgactgtgatatagaaagtttgttgggtctaggacacagacacagattgcaccttaagtagtttatagtttaatgagcttcctggtaactttctaataattaaagcaaaatggaaagagtgtaataatatcaagtgttgttgcaaatgtggaaaaacatgagtttttatgaacttctagggggactgagaagtaggaaaacagtttggtgcctgctaaagtggaagatatccaaggaacctctgaccctgtgcagatctgtgatatgtctgcaaaacacaaacctcttgatcagcactggttttttttttaacccttgttgattaatagagagttttaggttaaatgaaaaaaatcacttataccaaaaatacacccatttttaaactcccaaaataggcatcataaccctcttgaagtgaatcctcgaagactatgaaattcttggtaagttttgctggtatcatggcatctttttcccatgttcagtcagtctgttagagcagaagttcactgaattaggatagcctgatccactttaagcacccaagagtttgctagttctcagaagtgtgtgtttgtcacctgaggatagtatttttggtatatttgcccagtgacgcagcattccaggctgagattgcagaatggctcatggagcccttgtgtagggaagcctctgactgtgtttctcctctgttctcatcacggcagtcatcctcacggaagaaggcttctgtgacaaaggtgtggggggttttccccatacagcaagcagtggacaccgactgggtgtcctctgattcagttccgataccatctacttggagatagtgctggatcccaaaggttgggggttcagtcccccagacggactccccccacaacagcagtcgaaagtatgggcctctagaacttatgaccaactggcttccagttgggattcccataacttcctctttgggttcaattattaataatttgctggagtggttcacagaactcagaaaaacacatttaccagtttattataaaggatgttgcaaaggatacagatgaagagacgggttgggtgaggtatggggaaagggtcatggagtgtccacaccctccctggggaccaccctccaggagcctccacaagtgtagctgtgcagaagctctctgaacccagtactcctgggtttttatggaggcttcatgacatcgccattccttcccccaggatatacagtgggactgtgtctggggagggtcttaagacccacagtcagaaaggtagacgcttgtaatcctagcactttaggaggctgaggcaggagacttgcttgaggcctggagttcagtatcagcatgggcaacatggcaagacctcatctctataaaaaaagaaaaggttgcagtgggccaggtgcggtggctcacgcctctaattccagcattttgggaggctgaggcgggcagatcacttgaggccaggagttggagaccagcctggccaacatggtgaaaccccgtctctactaaaaatacaaaaattatctgggcatggtgctgcgcacctgtaatcacagctattcggaaggctgaggtgggagaatctgcaagggaagtctaaaggatttcatttccactgtcactcaggcatcttctcttcctcacctaagccctgctgtgttggaggagtcccagaggcagggttttagtgagaccctcacggccactccccactcctgaccccataagccctgtgagcctacacagagacggtggctcctgagccgtagtggcagagaataacaccttgtcgggtggcccatgcagcaggttataaacaaatgttcgatgactgacgttctcctgttttgcagaaaattatagttttggtatgacaaggggaaattacattaaacaagcaatttagtgaactttttttttttttttgaggaatgtttcacacttggaactgaagtcattttcttttattctagtgactttttgaatgagtatgaaaaaggaaggactcccaatcctgacatagtttgcaacaagcacatcaaatttagttgcttttttcattatgctgtggataatcttggtaagtaatttgggtttaaaacatttttttttttaaagacagggtctcgctctgtcacccaggctggattgcagtggtgcgatcatgactcactgcagcctcgacctcctgggctcaagagattctcccaccccaggctcctgagtagcttggaccacaggcatgccaccatggtggctaattttttgtggagatggtgtcacaactgtattgtccaggctggtctcagatttctggccttaagcagtcctcctgcctcggccttccaaagtgctgagattacaagcgtgagcccctgtgcctagcctgtttcttcttgtggaacctcctgatactgaattgcttgcttagaccacctcttgatgtctgtggctatgctttatgaattttaggttcttcttcctgtcccctgccattggggtcaccataatgagtttctgaagttctggctcaggcttcttggtttgctctgtcccactgcagctcaccctgttgtgtgttgctacgagataccattgtaagccaggggcccagtagtgtcggcactttcagcaatgatgtagattaggcttgcagattcaatatgtcagcaacctaaagctgagttgatgataatgatgaaagttagtttgtggagttaggaataaacaaatgcctacaaaaacaaaaaatcaaaaagaaaaatcttaaatttcaacattgggctaacaccaaaaacatgaaacttaatagagataaatgcaaagtttgctaactaggttcagtaattctcctaggacaagattggaaagacctagcttggttgccattgaatcttctgccattggttgcagaaaatctgggggatttaggtgcccccaggctgactgagccagtagtgtgatgtcttttgtcagagccagcacagacggagctcaccttgatgatcatagaatgtctaggaaggggtgatgcgtcccctgtggtccgtcctggttagaccgtattagttattcaggaaaagagtgatagactgatagaatgtgaattgatttttattttcagggtatctggaaatatgtcctccctgaactgttgaaattactttgggtcgtagtggcagtggtcaagcgtgtgagttaggatgacattctttgtgtgacaccagcagacagttaggactggcaggagaaagagttccctgaggtggaggcgcaggcagctgttcaggaagggaaggcttgcctttggagagcattaagctgtcacgaaagctttttagggagcccctaggtggctggctgtcaggcacgctgtggaaggaacttctgcagtgaatgtttccacacctggaagaaaggcatgaaccgtgcagcacaggatgagaggacatgacgcccagacttctgaactcaccgcgcttctcagaggcatcctgcgctttttctagtataagtgctgttctttgaggacacagatgtaaagtggattgttttctctaggagaacctcagtcaagatgagattatgtgtctctaaagtgcctttttcaggtcgttaatatgcagcagctaattcttgctgtgtcttctgtttacatggagctagtgtggctggtccaggatggctgtgtcttctgtttacactgagctagtgtggttggtccaggatggaatccattttgctgcacctttcataaaagtctcttgcaatactaaatatctgtaattttttctttttttgagatggagtctcactctgtctcccaggctggagtgcagtggtgtgatctcggctcactgcaacctccacctcctgagttcaagcaattctcctgcctcagcctcccaagtagctgggattacaggtgcccaccaacatgtctagctaatttttgtactttttttgtagagacggggtttcatcatgttggccaggctggtctcaaactcctgacctcaagtgatccacccacatcggcctcctaaaagtgctgggatgacaggcgtgagccgctgcgcctggcccaaatatctggaatttttacacaatgaaaaggttctggattcatatgcaccttgttaggctctttggctttgtgtaatatgaaaagaagaaacagtgtgctggatgattcttcactctgatgaaaataatacatatttattacagaaaatttaaaagaggagaaacgacacctataatttcactctcagaatcaaaggaatagacctgagatttttcttcaactgtttctgtacagtaaaaaccgtggaatcatggtgttacatcctcgccctgctgaacagtgccgggcattttcccgtgttagtaaacattctctgtaaggacccccattgttacggcagtgcattgtcattcacttcacattctcccagtgttgaacattttggttcttttttttttttttttcctcctgagacagcatcttgctctgttgcccagactagagtgctgtggtgcagtcttggcttcctgcagcctcaacctcccaggttgaagcaatcctcccacctcagcctcccaagtggctgggactacaggtgtgccccaccacgcctggctaatttttgtattttttgtaaaggtgggatttcaccatgttgcccaggctggtcttgaactcctgagcacaagcaatcatctgcccgcctcggcctcccagagtgctaggattacaggcatgagccaccgcgcctggcctcccttcgtattatcacaaaccctgaaaggaatattttgtgtttaaatctttctgtgcctttcagactgtttccttaagccagaaattaactttggaaaggctcttaaaggtgcaataacactttaagtagcaaggttgtatcagcttaagagttcaaggctgcttgtttgatgaaattggatgtgtgcgtctgttccctgggatctctatgtttgggtgcagggtggattgtgcagcccctcagcctaagacttggggtctatactcttcttttgtgccttggtttatgctgatcaaggcctgcaagtatgagtctaaaacctgatccttgtgttctaaaaacctcacaggggcagatgccattgccacaggtcactatgcaagaacttccctggaagatgaagaagtctttgagcagaagcacgttaagaagcccgaagggcttttcagaaatcggtttgaagttagaaatggtaagttcatgtgcccaggtcagagccaaattcttgtgaacagattgaaatctttggaggaatgacagtgggttgtgcctgaggatcactgccacccctccctctgtgctccagagtagcttgtatgggattcacatttgaaaaggtgcagttaccaagaggacattttcccggagggcctgtgattgggtagtaaacagtgtccctgccggccatggtgagggctggtggaaagtgacatcagatactgataatccagctctcgacactgtgtggtgatttgaatgttccaaaaatatctgggtaaatatttgacagtgataattggggtgctgtcagtctagccaaggacctgtacttagcaacaagttctcaagggcgtgcggttcaggcagactttcaacgtgctgtgagcacaggacctgctgtggatcgcatgggctcagcagtcaggctttgtagccgtatttacacgttagtttatgcgtgttagggagccaagtttcacctttctagaaaaaagtcaatggcagacagtgagctgggaagctgctggcctgtcctggtgtacattcgtgtgtagaaaagaggaattccctgtattgttgagtgaaaaaccaagtggggctcagagccgtgtttccgcacggagcgtccgtccatcagtggggacccctgaagggcagccttgctcttttgtccggaagttcagatgttggagggagccttgtcccgccatctggggaataggggtctctggggctggggcagggctttacatacacacatttcttttttaattattattattaattttatttttttgagagaggatctcactctgtcaaccgggctggagtacagtggcccgatcttggctcgctgcagcctccacctcctgggctcaagtgatcctcccacctcagccccaccaagtagctgggaccacaggtgtgcgccactatgctcggctttttcattttttgtagagatgaggtctcgttaatgttgtccgtgctggtcttgaattcctgggctcaagcgatcctcccacctcggcctctcaaagtgttgggattacaggtgtgagccaccaagcccggcctcacacgtttcacatcactcctcttagcagtccatgaggtgtatgctctcatcccgtttcacagatgaggaaaccgaggcccggatgaagccatctgacctgggtccctcgggtggcagagctggatttcagtgcacttccgctcactccccagcccctgctgcttctgctgggtcaggccccagctgagttctttcctcagcgttgctgagcccatcctgaaggctgcagtgatggggcagggccgtgcttggtcaagggagccctgagtgtgccaacagtcgtctgccgccctctgttccctcctcgccttccttccttatgccacagggtgatcaggtaactgtactgacttgagcccagagaagagcagcccactcccgtaagacagccccccatttcaggaagacatgggtttgaatgcagataagacagccccccatttcaggaagacatgggttggaatgcagagtcctgccacttgggaactccagggtggaattcaccaagtaattgtgcatttacggggcctgaggagatggagggttaatttccatgttgaatagatgcgcctgcttacctcctagaacattacctcctagaacactgtgtgccctgcagagccatcgacctttattataggccacgtgccctcggaaacttgggacagtactgatgcgttctgttgagtgcgtttggcatgtgggaattgtgatggtgcacagtgtcttggccttcactgggttttgtaggcacactaaggtttccatttcattcttcttcagttgccctggcccagcctgggtctctgggtagagcacctgcaggggcagtggacggcctgggctcagggtcggtcagcacctgagaccagcgctcctaggcctggcctgtgactgggctgattttcccccacacagcgtgctaccaccggcctggcagagccagcacggcagccggcgtgtcagtgaggctccagcacaggcagcctcctccaaatgttgttcattcctttctgtgctttttcctctatagcagttcagttagggtcgccagcttgcttttttgaaaatcatagatttttagtttgttttaaaatgacgcagaactaggagaaaatgcaaatggctcctagttttctgaggcttttacacacatgcagtgtttgactgcagttagtttgggattgaaagtggactctgaggccaggtgcggtggctcatgcctgtaatcacagcactttgggaagccaaggcaggcggatcatgaggtcaggagttccagaccagcctggccaacatggtgaaaccccatctctactacaaatacaaaaaaaaaagttagccgagtatggtggcacatgcctgtagtcccaggtactctggaggctgagacaggagaatcacttgaacccaggaggcggagattgccgtgagccgagatgtgccactgcactccagcctgggcgacagagcgagactccatctcaaaaaaaaaaaaaaaagtggactctggaaagtgctctgcttccgtggcgactggtcggctgaacttggtctcacttgtcactcagttctgctgtttgtacctgccaagtaagggagggggactcgggaggctgggcagcctccagccccaccgcctccacctgcatcactttgggcgagtcatatgtgatgaactgggccggctccagtctcccctctgtaacgtggggagaattctccctctcacggctaacgtgggaatcggcagatggaaaacactagctacgcagagtgtgtactgtacacgtggctctgccaagccaggaagggtaggtgtgctgtctgaccgtcacggcatgtggcgtgctctgagtgtaactcgaaaggagaagtttatgagaaagattgaaagaagccagaaaactgacgttcgtcttagttttttgccattgatcattgaactcgagagtggagaactggacggttctaagccaggtttactcacacctctgctccgttgccttaaagccagaaatggttctttacaatcacatagggaatgtcggaggaactgcagggtcacctaacagatgtcagctgagactctcaacaaaaaaacgtttttaccaagaaagctaatgccttcacaggtagggcgctgctggaggcatgtgctggccgccgggcagtgaacctggaaagtgtagagtccttgaaaccactgtggcacgaacacatcctgtggttgttggaagaaggcacagctgacactatatcagtggaattttctgccagcaactagcttactccattttccaagatttggctgaatttattttaggtgtttttttttttttttcttatcacttgagaacattttttcatgtgatgtttcatctttgaaaatattataatctgaagtatgagctggaataatttctttgtcatgtaaaatccttgtttttttttttggaggtgcgaatttttcttacattaacccgtggtggtcttttccctagtagttgctattgagtgttgatgtctgcctctgacaggctaggggtagtctgtctaagtgaacagaaggacattgttgaaagtgaagtatcattatttttattcctgcatcgtcttttgttctttattcttggcagcggtaaaactcctccaggcagctgacagctttaaagaccagaccttctttctcagccaggtttcccaggatgccctgaggagaaccatcttccctctggggggattaacgaaagagtttgtaaagaaaatcgctgctgagaatagacttcatcatgtgcttcagaagaaagaggtacgagtgagcagttgcctttgattagtgcctgtttccctttcccgactgcatggcacggagcagctggacctgtgggtcccgcaccacttccccttctccaggacctaacatcaaaggcgggccttggagcaatagatggaggagtttgctgaggcgcacggtacagggctctgctgacatcgggagcagcctatacgagactccttgcttttttcctctcctctgcccctatgtggtaggcagctttccccacagccttagcagctggtggggtgctcttgggatggcctgcctgccaggtgagtgccaggcagtgtgatgcagccccgagacccctggaggggcaggtgctgtgccgccgtctgcacactcatgtgccctgtcacccgcttgcccggcacagactcgttcggtgccatctgttcgggcgctgtgctgctgggccgcgaggaattggtgacgcgcacacagttccatcttcgcctccatggagcccgcccgcgagtgggggacacaggcaggaggccaatcagtgtaaacctagaaaatgtctacggagggaggtgtaggaccctgggtgggaagcaccagtggggtctgagagtagggaatggagatgccaaaaacggcctcaaaagaagtcacatggaacctgagacctgaaggaggagaggatccggtgtcccagagagggctgggaaagtccagatgagggaacggcagtgcaaaggccttgaggcgaggagaagccagggagccgctgtgggggtgcctgcctgtggccccagctcctcaggaggatcgagcgcacccaggagtttgaggacagcctgggcaacacagcgaaactcgtctcaaaaagagagaacccggagtgttggcggaactaggatgaagcccgtgggagggccttggggatggagggcgagggcgctgtgggatgagcctcacctcttcaggggccagtgcggtgggagctgttgctccttcgtgtctcttcctggtaatggaaacggccatacctttcatcagagccatcttccctgaagagcacgcccaccgcccgtcctcctctcctcttgttttccgtttccggtgtcgctctgtggtgggagccgcagggatggaagggcagtcttgagagacacaaaccagagtaaacgatgcagcccctgatggggccacggtggagagcgcacgccacccaggctccccagctagggcagatgtgcttgaggaaggcgcctctctcctctgactcccctggagccctcccctaaggccttagcttcaggcctggctttcctgctacctgccccttctctggtccctgtctctcccccactcctcgcaggacagtggcctgaaggacctgaccgggttctgctttcttccccggggcagctggtgtgagggtctcccgcgcagggtcagaccccgcgggccgagacaatgaggcgttctctaaggctctggcatcgtgtgcgccggctgtgactggcggccgagggtgccggtgggcagccgggcccctaccctggaagcaaagtgtggggtgaggccgggaggccccagggcccgctcaggacgtctgggtacagcttgggccaccgccacttctgctcctctcacggctgccgtcttctcatttcagagcatgggcatgtgtttcatcgggaagaggaattttgaacatttccttcttcaggtgcgtgctgctctttgacacaaagagatggggctgcgtgtctgccctgggcctagatctccgtcggtaatgacatgtttgttttccagtatctgcagcctcgacctggtcactttatttccatagaagacaataaggttctgggaacacataaaggtgaggtgcagactctgccacttgtcatctgaaatgcctagagctgtggcgtttcagctctgggagactagaccagagttcctgtcgtcccttccacttggctggagaattgtagaaggctctgtggggcggccgggggcgggcacggcctagggtggaacagttgccttgatggtggctgggtgcacttccagatgtggcctcagctgagatgctggagttcatgaaaagcgcgcctctgacttggaaggactatactctgtgagttacgtatcaagtccctgtaaaaagaatgatttccttcctgtgtaaggaaaatgttaaactacacaaaactccactctgattcagggagtaaggtggacgtcccggcatggtgtgaatgattaaggaccacatgcagcgatgggatcaggcgtccgcgctggccagagtgctgctcgctcatgtgcagacccttactgcggtgaggcctgcgtgagcctgtgctgtgcctggtgtcaggggacaggctccgagtcagtcacagtgtgcagtcctgctgtggggacagagtgcagccattgttgggttagtacagt

SEQ ID NO: 14685 - DNA, 1401 bp, Homo sapiens
gtgcacgtctcctccctccctgggccgctggttgcgcgcgggtcggcaggaggataccccgtcctctgactttggttcggaggctcctcgccctccacctgtgtagtcggaggtgtgcgcgactgcagctccgactacctgggagcagttccgcgcccctctccacccacgcgcgcccacccacagttaccaggtgacaggggtgtttatgaagaactgggactcactggatgaacatggggtctgtactgccgacaaagactgtgaagatgcttacagagtttgccagatcttagacatccctttccatcaagtgtcctacgtaaaggagtattggaatgatgtgttcagtgactttttgaatgagtatgaaaaaggaaggactcccaatcctgacatagtttgcaacaagcacatcaaatttagttgcttttttcattatgctgtggataatcttggggcagatgccattgccacaggtcactatgcaagaacttccctggaagatgaagaagtctttgagcagaagcacgttaagaagcccgaagggcttttcagaaatcggtttgaagttagaaatgccaggtttcccaggatgccctgaggagaaccatcttccctctggggggattaacgaaagagtttgtaaagaaaatcgctgctgagaatagacttcatcatgtgcttcagaagaaagagagcatgggcatgtgtttcatcgggaagaggaattttgaacatttccttcttcagtatctgcagcctcgacctggtcactttatttccatagaagacaataaggttctgggaacacataaaggtgaggtgcagactctgccacttgtcatctgaaatgcctagagctgtggcgtttcagctctgggagactagaccagagttcctgtcgtcccttccacttggctggagaattgtagaaggctctgtggggcggccgggggcgggcacggcctagggtggaacagttgccttgatggtggctgggtgcacttccagatgtggcctcagctgagatgctggagttcatgaaaagcgcgcctctgacttggaaggactatactctgtgagttacgtatcaagtccctgtaaaaagaatgatttccttcctgtgtaaggaaaatgttaaactacacaaaactccactctgattcagggagtaaggtggacgtcccggcatggtgtgaatgattaaggaccacatgcagcgatgggatcaggcgtccgcgctggccagagtgctgctcgctcatgtgcagacccttactgcggtgaggcctgcgtgagcctgtgctgtgcctggtgtcaggggacaggctccgagtcagtcacagtgtgcagtcctgctgtggggacagagtgcagccattgttgggttagtacagt

SEQ ID NO: 14686 - DNA, 2629 bp, Homo sapiens
cagtttgctgtgagaagaccagaagggttaaccaacggcctcctgtccctggacgggtcttggtgcctgcttagaacccaaagcccttaacttcatgctcctcgtcctgcttcaggggcggggcttggcacaatcccaggaggtgccaggtctcaatggcccgaggccatgggtgggtgacagggagcaggggcctcagaaccaacctagggtatctggggccccccagaccagggccagtcctggggcacctgtgggaagccagcagctaccagtccctcctttctcctcagccatttggtgtgtggaggaattcctggggtggccttgagagaagagcccgtggtgtggctggcccctgtccctgcgaatagaaaaaccagtcctcgaggggggccgtgctgctgccccacaggtggttgcaggtagagggcctgagtcagacttgaacctgcagcattcactgtcatgggctcggatctcacccctgcctcttgcccactctgacatggtacttccttcctgggccttagtctcctcatctgtaaaatggggattcaaaggcccggcgggtgatgagatgaatttctgtgggtagaacacttcgagcggtgccagcaccgttacctgtgtgtgtgtgtgctggtaggacagttgttcccagggaccacactgaggccggccttggggccaggtgcccctcggcgtccccaccttcacattccattctgcaggccccccggacagaccacccagccctgtacagggacctgctgaggaccagccgcgtgcactggattgcggaggagcctcccgcagcactggtccgggacaagatgatggagtgccacttccgattccgccaccagatggcactaggtgactgacgggagggctcctgaggacgggccccttgaagctgagcttcctgaggccagatttgggccagggatgggagaccctggggtaggaaagtcccgttgtggagatcatttggagattacctaaagtatttagaactcccgtgtcctgtgcctgccctgagcgaggcctgggggtgctgggagcagatgcaggcaggccccggcgtgttgggctgaagcaagtgtgtacactgccccgcagtgtcctgctgcgtccagggcccaggctggtgccctgcccttcccctctaagcaggggtttttgaccccgtgggctggtgctcctttctccctgggggcctgaggtcgaccaggaaaggcctgtgccccctccaagggcccctctcttctacccagtgccctgtgtgctgaccctcaatcaagatggcaccgtgtgggtgacagctgtgcaggctgtgcgtgcccttgccacaggacaggtgcgtggggtgtgggggtgagcccggggaggactgtactgctctgcaccctgccagggcacccgggttacagaggaaggggctgaggcccaggagtagggtgtgctcgggtcacacagctggtgagggcagagtgccaccagccctgccctgggggctcctcccacagtgacaactgtgagaggatttccactctggtgtcaccaaccagccagttcctgctcgggccctgagaggctcagctgctgcccgggccccagaagcgaggacagaaaatggaaggggcatgaggacagtgctcaaagaggcagagggtcggggcccctgtgggccgagtgtgcaggagctcccagggtgggcgcctggtgggtgtaggcctgaggaatctccaggggcaggtggtgggagggaacctggggtgagggaagcggaagcatcctctggctgccaccatgctccttcctgtcacagctccacattcccaaggggtgcagagacctgccagtcccttggagtcccaggagaggcccctgtgactgtcccactcagggagaggtaccctgaagaccctccctagtgaagccactgggtgccccaggcctctcctctcctgttcagcagcagcagcagcagcaaaaccctgctcccctgggagctcagtgcctggtgctccgagcacaggccaggccccataggggagcactctgcccctgcctgccctcggctggctccctgtggcacccctgatgccagggtctctcccctacagtttgctgtgttctacaagggggacgagtgcctgggcagcgggaagatcctgcggctggggccgtctgcctacacgctccagaagggccagcgcagagctgggatggccactgagagccccagtgacagcccagaagatggtccaggcctgagtcccttgctctgacagagatggatctgctagaaggaacctggagagcaggacccatggctgggcggctggtgagcagtccaggtgcccaagggccagcttgctgctgcccaaagcagaggaagccgggctggctgagggtccgaaaagcctgcaggggcccggcgagccccaggaagagcctcagctccaggctggggctctggctgctggagcatctgctggctggtggggtggcccgagttccccttcaccgcccccagggagggtttcccacctcagagtacaccgaggggacctgcagagggggctgtcgggacagcgtggaataaacattatttcaagga

SEQ ID NO: 14687 - DNA, 1860 bp, Homo sapiens
cagtttgctgtgagaagaccagaagggttaaccaacggcctcctgtccctggacgggtcttggtgcctgcttagaacccaaagcccttaacttcatgctcctcgtcctgcttcaggggcggggcttggcacaatcccaggaggtgccaggtctcaatggcccgaggccatgggtgggtgacagggagcaggggcctcagaaccaacctagggtatctggggccccccagaccagggccagtcctggggcacctgtgggaagccagcagctaccagtccctcctttctcctcagccatttggtgtgtggaggaattcctggggtggccttgagagaagagcccgtggtgtggctggcccctgtccctgcgaatagaaaaaccagtcctcgaggggggccgtgctgctgccccacaggtggttgcaggtagagggcctgagtcagacttgaacctgcagcattcactgtcatgggctcggatctcacccctgcctcttgcccactctgacatggtacttccttcctgggccttagtctcctcatctgtaaaatggggattcaaaggcccggcgggtgatgagatgaatttctgtgggtagaacacttcgagcggtgccagcaccgttacctgtgtgtgtgtgtgctggtaggacagttgttcccagggaccacactgaggccggccttggggccaggtgcccctcggcgtccccaccttcacattccattctgcaggccccccggacagaccacccagccctgtacagggacctgctgaggaccagccgcgtgcactggattgcggaggagcctcccgcagcactggtccgggacaagatgatggagtgccacttccgattccgccaccagatggcactaggtgactgacgggagggctcctgaggacgggccccttgaagctgagcttcctgaggccagatttgggccagggatgggagaccctggggtaggaaagtcccgttgtggagatcatttggagattacctaaagtatttagaactcccgtgtcctgtgcctgccctgagcgaggcctgggggtgctgggagcagatgcaggcaggccccggcgtgttgggctgaagcaagtgtgtacactgccccgcagtgtcctgctgcgtccagggcccaggctggtgccctgcccttcccctctaagcaggggtttttgaccccgtgggctggtgctcctttctccctgggggcctgaggtcgaccaggaaaggcctgtgccccctccaagggcccctctcttctacccagtgccctgtgtgctgaccctcaatcaagatggcaccgtgtgggtgacagctgtgcaggctgtgcgtgcccttgccacaggacagtttgctgtgttctacaagggggacgagtgcctgggcagcgggaagatcctgcggctggggccgtctgcctacacgctccagaagggccagcgcagagctgggatggccactgagagccccagtgacagcccagaagatggtccaggcctgagtcccttgctctgacagagatggatctgctagaaggaacctggagagcaggacccatggctgggcggctggtgagcagtccaggtgcccaagggccagcttgctgctgcccaaagcagaggaagccgggctggctgagggtccgaaaagcctgcaggggcccggcgagccccaggaagagcctcagctccaggctggggctctggctgctggagcatctgctggctggtggggtggcccgagttccccttcaccgcccccagggagggtttcccacctcagagtacaccgaggggacctgcagagggggctgtcgggacagcgtggaataaacattatttcaagga

SEQ ID NO: 14688 - DNA, 2825 bp, Homo sapiens
aaggctactatctagactcgaatgctttcatacaagtgattttcaaaaattagtcaataaaaattgatgtcagtgcaggcccaggcccgcccccagatacactagtttctaggtctggggccagcctagtaattgttactaggcacacaggtgatgctgactcgatggcctgagacacaccccttgagaagaagctgctctggggagacgagggtatgagtggaaagaggatgggcgaggaggccgggcttacctggacactaaggtgatggacggcgtctgctgggcaggcctcggggaggacccctcagctttgctctcagcaggggcccgacaagctcagtgggcagtggcaggaactgagtgccactggaaagcccattccctttatttagaaaacgagctccaggaagccgctactttgtgtccatttctcttgaggaaacttaccaccttggttgagcggcttcatggcagacagcagcgagccagcggccggactctgtatttcggaccccactccagtgctccctgggtcataccaggatctgcctctgtccacaaagatgagggaaaatgatgactgtgctgtgctctctacttcctgcggttactgcgtgattctaaagctgccactcggaacagcgagtcctctgccgtcgagagcagggaggggtagggtggacaggcgatgccgtggaaagacgtctcggtggaaactgccatggtggaaaggtggcgcgcttctcacggctgagttgctgcgcctgcagacggaagctccccacaggcagagctgcttggatgtgtgagtcatgaagccagagaagccccgctccatgagcagtgactccccaggtaagactttcagccagtcctgcgctggccagagtcgccgggcccgtgggaatcacggcggctccacgtctccgggacagcagggaatcccaggggcctggtagtgacaccggagggtcctcagggaacctctggtctggccctcatttcccaggggtagaaaaggaaatctgaaattggattaaaccatgcagcaaatatttactgaggctctgctatgggtcaggctgttttctgctgggtgcagcggggtgcagcgctcaggtaccccttccctcttagggcttcccactgggtagaggagggagatgttcagctcccagctcatctgtaaccaagctgtgcctcagttgtctccattcaggccctgggggtgagcccagcctttggcctgtggccccaatcccgctgctggggctcctcccccctgtgcccttcccctccccggtgcggcttcagtgcagccaggctctccttggtacccaggccagacagagtgatctgactttaactctctacagacagacaggaagagggcccaggagcaggagctggacagagcagagctgctcctgtcctgaggctccaggcccattcctttctgtctgggtttctccactgggctcttcctgccgaagccacccagtctgagctcccccactccctctcctggtacacaggcccttggttcacccctcagagggctccgggtgggaagatgcacagttagttggagactgaagggctccgtggccccaggagggccagcccctttctccataggatggcaccgaacacctcagctgccactggagggccaccctcccaggtccaagacgtccaacttcatgtgattttttaccacatttcattaattttgtggagcaaatgtcttcccattttacatctctgaaatccacgtctctgacattgctgttggcaggcggcacctgggatgtcgtcatcctggccataactagcctgtagtggacctgggtgatacacaggggcctcttggagctacggagtacctaaaataccatatagttaaccaaaaagtagcagaaaatatgtgagcatggatctcagccattttgcgggttggctgcaactgggacttaacctgccataaccttagatcagcctgccacacccaaggagggcctgcccccagacccagactcaagtttagacacagcctaaacgtgtacctctaaatctgcacaaactcagctgcccagatactggatttccttatctcttccgggaaatgcaagatgaaattgccctcctgttgggtattttcctgatcctttattctgaaaaagtggtcatccttttccccacaggccctgtgacctccctcctgtcttgcagctcctcctggcaccagtccccagggctctcctgttggtagttcctgcttttcttcttggaaattcctcgtggacctcgagatctttaccctaaaatagttctgttgaatttcaccctggcaatgtaaattgatagcttatcttcacagatgccagacaatggacaactcaccatcagtcctctgctcacctgagacaaatgcatgtctgattgcttcctctgccctattgtttatgtgaaaatgcagattcactgagccagactaaggcatcagtgactgttcctctacctgcctctcacatggagattgtgtattcagtgaaaggctgatcaaagacccaaaggaatgcaacagtttatctcttatctacctatgacctgcgagctgcccaccacccccagttgttgcgcctttccagacagaaccagtgtacatcttacacgtattaattgatgtcctgtgtctccctaatatgtatcaaagcaagctgtgcctcgaccaccttgggcacatatcctcaggacatcatcctgaggctgtgtcactggcatgtccttaaccttggcaaaataaactttctaaattgaaa

SEQ ID NO: 14689 - DNA, 1476 bp, Homo sapiens
aaggctactatctagactcgaatgctttcatacaagtgattttcaaaaattagtcaataaaaattgatgtcagtgcaggcccaggcccgcccccagatacactagtttctaggtctggggccagcctagtaattgttactaggcacacaggtgatgctgactcgatggcctgagacacaccccttgagaagaagctgctctggggagacgagggtatgagtggaaagaggatgggcgaggaggccgggcttacctggacactaaggtgatggacggcgtctgctgggcaggcctcggggaggacccctcagctttgctctcagcaggggcccgacaagctcagtgggcagtggcaggaactgagtgccactggaaagcccattccctttatttagaaaacgagctccaggaagccgctactttgtgtccatttctcttgaggaaacttaccaccttggttgagcggcttcatggcagacagcagcgagccagcggccggactctgtatttcggaccccactccagtgctccctgggtcataccaggatctgcctctgtccacaaagatgagggaaaatgatgactgtgctgtgctctctacttcctgcggttactgcgtgattctaaagctgccactcggaacagcgagtcctctgccgtcgagagcagggaggggtagggtggacaggcgatgccgtggaaagacgtctcggtggaaactgccatggtggaaaggtggcgcgcttctcacggctgagttgctgcgcctgcagacggaagctccccacaggcagagctgcttggatgtgtgagtcatgaagccagagaagccccgctccatgagcagtgactccccaggccctgtgacctccctcctgtcttgcagctcctcctggcaccagtccccagggctctcctgttggtagttcctgcttttcttcttggaaattcctcgtggacctcgagatctttaccctaaaatagttctgttgaatttcaccctggcaatgtaaattgatagcttatcttcacagatgccagacaatggacaactcaccatcagtcctctgctcacctgagacaaatgcatgtctgattgcttcctctgccctattgtttatgtgaaaatgcagattcactgagccagactaaggcatcagtgactgttcctctacctgcctctcacatggagattgtgtattcagtgaaaggctgatcaaagacccaaaggaatgcaacagtttatctcttatctacctatgacctgcgagctgcccaccacccccagttgttgcgcctttccagacagaaccagtgtacatcttacacgtattaattgatgtcctgtgtctccctaatatgtatcaaagcaagctgtgcctcgaccaccttgggcacatatcctcaggacatcatcctgaggctgtgtcactggcatgtccttaaccttggcaaaataaactttctaaattgaaa

SEQ ID NO: 14690 - DNA, 663 bp, Homo sapiens
acggtggagagcgcacgccacccaggctccccagctagggcagatgtgcttgaggaaggcgcctctctcctctgactcccctggagccctcccctaaggccttagcttcaggcctggctttcctgctacctgccccttctctggtccctgtctctcccccactcctcgcaggacagtggcctgaaggacctgaccgggttctgctttcttccccggggcagctggtgtgagggtctcccgcgcagggtcagaccccgcgggccgagacaatgaggcgttctctaaggctctggcatcgtgtgcgccggctgtgactggcggccgagggtgccggtgggcagccgggcccctaccctggaagcaaagtgtggggtgaggccgggaggccccagggcccgctcaggacgtctgggtacagcttgggccaccgccacttctgctcctctcacggctgccgtcttctcatttcagagcatgggcatgtgtttcatcgggaagaggaattttgaacatttccttcttcaggtgcgtgctgctctttgacacaaagagatggggctgcgtgtctgccctgggcctagatctccgtcggtaatgacatgtttgttttccagtatctgcagcctcgacctggtcactttatttccatagaagacaataagg

SEQ ID NO: 14691 - DNA, 574 bp, Homo sapiens
acggtggagagcgcacgccacccaggctccccagctagggcagatgtgcttgaggaaggcgcctctctcctctgactcccctggagccctcccctaaggccttagcttcaggcctggctttcctgctacctgccccttctctggtccctgtctctcccccactcctcgcaggacagtggcctgaaggacctgaccgggttctgctttcttccccggggcagctggtgtgagggtctcccgcgcagggtcagaccccgcgggccgagacaatgaggcgttctctaaggctctggcatcgtgtgcgccggctgtgactggcggccgagggtgccggtgggcagccgggcccctaccctggaagcaaagtgtggggtgaggccgggaggccccagggcccgctcaggacgtctgggtacagcttgggccaccgccacttctgctcctctcacggctgccgtcttctcatttcagagcatgggcatgtgtttcatcgggaagaggaattttgaacatttccttcttcagtatctgcagcctcgacctggtcactttatttccatagaagacaataagg

SEQ ID NO: 14692 - DNA, 16372 bp, Homo sapiens
cgcgggtcggcaggaggataccccgtcctctgactttggttcggaggctcctcgccctccacctgtgtagtcggaggtgtgcgcgactgcagctccgactacctgggagcagttccgcgcccctctccacccacgcgcgcccacccacagtgagaagccggcgggccggggtggggtggggagggaagggtttctcacggatctgcggcgtccacattcacctgtgagaccgtggacactggtgaggggagctgggatcgccgggccgggggcctgacctctgcacacgctgtggccgcccggtgggaggtccttgtcctccccactcagcagactggacaactgccgcgcggcgggtctgcttgttcagcgtctcctgtgttctccgctcgctggaggacaaagttttctccaggagcatttgcatttcttccggcatctaaacggagccccacgggtgcttagcattcctcgggcccggcgctgaaatgagcacttgtttaacttcacctgtgtggctccccgcgggaggcctcattcacagagtcacgtttgtggagctctgctttgcgccatctttggctcctgaccttgggcaagtgaattaagccgtcccctgtaaaattcggctaacacctgcctcacggggtgactggagggattagatgacatagtacatactgatgagtacgtgctcagcacatacgaggtacgcagaaaacagtagtggctattagtttatattgttaataaccatagctattatggtaggtacagtaagtgccaaagagaagggtaggcggaccataagcagaaatagttgtgaggaagggagagtggaggaaagcatcctagagatggaggtgctcagctgagtcgaaagaagagtaggatgtcactaagcagagacttggaggtggaggcggccctcccggcacagtcagcagtgcaagcagaatcacagaggcctgcaagtgtgggctggttctggccagatggagatggaaggagaggagcctggagcacgtttagccctgattatggaagatgctataccaggggctttagactgttaggtagacattagtctggttgatctgggataggggtggtctttcgcgtgtggtggtgtagttttgacaaagctttgtcatcaaatttctgttgttttgggtactatatgaagccttcttcagcagtcatttgccctgtctttcattacattcagcctacctaaacgaaccagctttctcatacagggtctgcacctgtgtagtttgctaaggtggtgtagggctaaagttggcctttccaatatttgggtgaatattttgttacaatcgaaaaggtagaaaataggtcataaactaggtggtacagctcttacaaaatatcgaaaattttaattatctttatatctgatcacttagaatctaagtcttagatagtaactagaaataacttttgaaaagagtttccttttttgataactgaatggtgctttgaaaaattttgttgagtttcgactattccttcgtgtattccacacacactggctgatcccctcctgctaggtattgtgctgatacatagatggggacacaaagatgagaaaataccacctcgttaatcttggggactcaggcaccaagatggaaaccggatccctgaagccacatggcaaagcagggactgcccggcaggccaggcacagaggcacaggagcacagcgtgtggggaacttctcagagctcagaaatcactgccgttttaccgaaggttgatttatgtattctctttaattgaccttcccgcccgcaggttaccaggtgacaggggtgtttatgaagaactgggactcactggatgaacatggggtctgtactgccgacaaagactgtgaagatgcttacagagtttgccagatcttagacatccctttccatcaagtgtcctacgtaaaggagtattggaatgatgtgttcaggtgagtgcgggtcacagcacaaaggaagcttcctcacactgtggatccttgcagtggaaggatccggtaaccagccagaccgacgcctgtgctgcagcccagcgctctccctccacggtggtgctgaagactgcaagaggcctcagccaccctcggggctctgtgttagaggcgaggcctggaccccacagcacacccagctctctcactcctgtcattttgccacttgcctgaagtctctttaatgctttcttggaccttgagctgtttctgttgcccagttaggataggggagctaaggctgagggctcccctggaaggtgagcaccaatgcctgtgtgctatgtgggtcagcgattaggggatttctgagaaagaggtgatacatggcctgtgcctctgaaaacaagaaacaaacaaaaacttttctaaaatccaatataatctcaataattaagtgctgtgtgctaggcgtgtgccacatctaggaacattaagatgtcttcactgtgacctggctctgtaggagtttgcggtctagttgggaggacattatcttcacaagaggtgacagtgatgcgtggcacgcaggaagtaccagtgatgctatcagtcactgaacccagaggagggagaaacttgcagtgtggagtaatcaagaaggcttcaccggagaggaggggttgcaaacaaagttgtagagaagggactccaaatggggtaacgagagcagcgtgaaggggagaagaaatgctgattgtgtatttcaggaccgttgtaaagtttggctggacttttgttcctgcagtggaaggagtgtagggctcatcctctggtgagccctgactgtgatgaatgtcgggcagttgtcgaaggcgtctgacacagcaggccatgtgcgcgggacaggctgcccctgcctgagtgggctttaggggcagaagagccttgggttgagtcctgactgtagcttattatatgaccttgggcaatttacttgactttgtttttttaattgaaaaaaattctctttttttcctgccaacaaagacccagaagagatacttgacttttctaagccccaattttctcatctttaaaatgaggataacactgatgcctcacagggttatgaaagaattgagattaggttctagtatgtatgcctggtatattagtaagcagtcaataaacatagctgtttttcttttctatttttttttgagacagagcctcgctctgttgcccaggctggagtgcagtggcgcaatcttggctcactgcaacatctgcctcccaggttcaagcgattctcatgcctcagcctcccaagtagctgggattataggcatgcaccaccacgcccggataatttttgtatttttagtagagacagggtttcgccatgttggccgggctagtctcagactcctgacctcagaagatccactcgtctcagcctcccaaagtgctgggattacaggcgtgagccaccacgccagcctgctatttttattttcattattaaaaagatgagtctggggagctaagctatgaggacgcaaaggcataaaaatgatataatggactctggggtgagggataaaagactacacatcgggtacaatgtccactgcttgggtgacgggtacaccaaaatctcagaagtcaccactgaagaacttatccatgtgaccaaataccagctgttgcccaaaaaaccattgaaataacaataaaacgaaatttagagagattaagtaaattgactatggtcacctaaataatcaacggaagagcttgaatatgaaccctctgtgactctatgctataacatatgggtgtcgtatatattaacaacatggacaaaactgatggctgaattttcctggggaaagttacctgtagaatgcatgataaatgcattaaaaacttatctgtagaatgcatgataaatgcattaaaaacttctgcagttttctcggggacataagaaaaaaaaaagagtgtggcggccaaatacaggataaatctgggggaagaccaaaggcagagagtctcaggaagtgctgttgctggagatttggacttcatggggagggagtgtgggagtggaaggtgagggctggcttgttggacccagaggacaagtccaccgggcagtagatctgaggtgcttgttaaacacagacctggaccgaggtctgggggcggccctggaatctgctttaataagcacttcagctgtgctggtggtgtggggggttgtcagggtctttctttgagaaaaggtgtgatgcggcttagggactgatgtgtgtgggagaccagagaggagaggagtcagcagtagtttcaagatcaaggctgggtggctggggaaagctggtttaggggattcctcatgagtactgtagagtttgaggggacaacagggaatccaagtgagcttacacttcacctgccagcacagctttttcagaacgtacgagtggatgcgatttttgaagtttagctcagctgaggccagataggaagagtgacttgaatagtatggcaaattaggagcggagctgggattaaaccccagaattaggagcggagctgggattaaaacccagaattaggagcggagctgggattaaaccccagaattaggagcggagctgggattaaaccccagaattaggagcggagctgggattaaaccccagaattaggagcggagctgggattaaaccccagaattaggagcggagctgggattaaaccccagaattaggagcggagctgggattaaaccccagaattaggagcggagctgggattaaaacccagctttccaggccagtgcttgctgccgccttctggcgctgcttgatagggactgagagaaggaggcggccgggtagagtcttttcccatctctggggctgcccccgaggtcgcccctggctccagccagcctgccctctgccctcgcccagtaccagctgcccgtggaggcattggtctttccgctgaagactcacttctctagtagggctctctagctcagagatttcttttgcattctttcattcaagacccactggccttcaaggatcagagtccagatacgttttagctgctgagtcttttaaatctgtctccctcccgaggcacatgaaaggcttctcttctttccagttagagaagaggctgggctactccattgtttttgctaatgccaaaacacacgccttcccatctgctgtttacgaaagggttaacagtgtgtcttttcagaaactgattttaatgttcagcctcttcaacatttattgatgactgtgatatagaaagtttgttgggtctaggacacagacacagattgcaccttaagtagtttatagtttaatgagcttcctggtaactttctaataattaaagcaaaatggaaagagtgtaataatatcaagtgttgttgcaaatgtggaaaaacatgagtttttatgaacttctagggggactgagaagtaggaaaacagtttggtgcctgctaaagtggaagatatccaaggaacctctgaccctgtgcagatctgtgatatgtctgcaaaacacaaacctcttgatcagcactggttttttttttaacccttgttgattaatagagagttttaggttaaatgaaaaaaatcacttataccaaaaatacacccatttttaaactcccaaaataggcatcataaccctcttgaagtgaatcctcgaagactatgaaattcttggtaagttttgctggtatcatggcatctttttcccatgttcagtcagtctgttagagcagaagttcactgaattaggatagcctgatccactttaagcacccaagagtttgctagttctcagaagtgtgtgtttgtcacctgaggatagtatttttggtatatttgcccagtgacgcagcattccaggctgagattgcagaatggctcatggagcccttgtgtagggaagcctctgactgtgtttctcctctgttctcatcacggcagtcatcctcacggaagaaggcttctgtgacaaaggtgtggggggttttccccatacagcaagcagtggacaccgactgggtgtcctctgattcagttccgataccatctacttggagatagtgctggatcccaaaggttgggggttcagtcccccagacggactccccccacaacagcagtcgaaagtatgggcctctagaacttatgaccaactggcttccagttgggattcccataacttcctctttgggttcaattattaataatttgctggagtggttcacagaactcagaaaaacacatttaccagtttattataaaggatgttgcaaaggatacagatgaagagacgggttgggtgaggtatggggaaagggtcatggagtgtccacaccctccctggggaccaccctccaggagcctccacaagtgtagctgtgcagaagctctctgaacccagtactcctgggtttttatggaggcttcatgacatcgccattccttcccccaggatatacagtgggactgtgtctggggagggtcttaagacccacagtcagaaaggtagacgcttgtaatcctagcactttaggaggctgaggcaggagacttgcttgaggcctggagttcagtatcagcatgggcaacatggcaagacctcatctctataaaaaaagaaaaggttgcagtgggccaggtgcggtggctcacgcctctaattccagcattttgggaggctgaggcgggcagatcacttgaggccaggagttggagaccagcctggccaacatggtgaaaccccgtctctactaaaaatacaaaaattatctgggcatggtgctgcgcacctgtaatcacagctattcggaaggctgaggtgggagaatctgcaagggaagtctaaaggatttcatttccactgtcactcaggcatcttctcttcctcacctaagccctgctgtgttggaggagtcccagaggcagggttttagtgagaccctcacggccactccccactcctgaccccataagccctgtgagcctacacagagacggtggctcctgagccgtagtggcagagaataacaccttgtcgggtggcccatgcagcaggttataaacaaatgttcgatgactgacgttctcctgttttgcagaaaattatagttttggtatgacaaggggaaattacattaaacaagcaatttagtgaactttttttttttttttgaggaatgtttcacacttggaactgaagtcattttcttttattctagtgactttttgaatgagtatgaaaaaggaaggactcccaatcctgacatagtttgcaacaagcacatcaaatttagttgcttttttcattatgctgtggataatcttggtaagtaatttgggtttaaaacatttttttttttaaagacagggtctcgctctgtcacccaggctggattgcagtggtgcgatcatgactcactgcagcctcgacctcctgggctcaagagattctcccaccccaggctcctgagtagcttggaccacaggcatgccaccatggtggctaattttttgtggagatggtgtcacaactgtattgtccaggctggtctcagatttctggccttaagcagtcctcctgcctcggccttccaaagtgctgagattacaagcgtgagcccctgtgcctagcctgtttcttcttgtggaacctcctgatactgaattgcttgcttagaccacctcttgatgtctgtggctatgctttatgaattttaggttcttcttcctgtcccctgccattggggtcaccataatgagtttctgaagttctggctcaggcttcttggtttgctctgtcccactgcagctcaccctgttgtgtgttgctacgagataccattgtaagccaggggcccagtagtgtcggcactttcagcaatgatgtagattaggcttgcagattcaatatgtcagcaacctaaagctgagttgatgataatgatgaaagttagtttgtggagttaggaataaacaaatgcctacaaaaacaaaaaatcaaaaagaaaaatcttaaatttcaacattgggctaacaccaaaaacatgaaacttaatagagataaatgcaaagtttgctaactaggttcagtaattctcctaggacaagattggaaagacctagcttggttgccattgaatcttctgccattggttgcagaaaatctgggggatttaggtgcccccaggctgactgagccagtagtgtgatgtcttttgtcagagccagcacagacggagctcaccttgatgatcatagaatgtctaggaaggggtgatgcgtcccctgtggtccgtcctggttagaccgtattagttattcaggaaaagagtgatagactgatagaatgtgaattgatttttattttcagggtatctggaaatatgtcctccctgaactgttgaaattactttgggtcgtagtggcagtggtcaagcgtgtgagttaggatgacattctttgtgtgacaccagcagacagttaggactggcaggagaaagagttccctgaggtggaggcgcaggcagctgttcaggaagggaaggcttgcctttggagagcattaagctgtcacgaaagctttttagggagcccctaggtggctggctgtcaggcacgctgtggaaggaacttctgcagtgaatgtttccacacctggaagaaaggcatgaaccgtgcagcacaggatgagaggacatgacgcccagacttctgaactcaccgcgcttctcagaggcatcctgcgctttttctagtataagtgctgttctttgaggacacagatgtaaagtggattgttttctctaggagaacctcagtcaagatgagattatgtgtctctaaagtgcctttttcaggtcgttaatatgcagcagctaattcttgctgtgtcttctgtttacatggagctagtgtggctggtccaggatggctgtgtcttctgtttacactgagctagtgtggttggtccaggatggaatccattttgctgcacctttcataaaagtctcttgcaatactaaatatctgtaattttttctttttttgagatggagtctcactctgtctcccaggctggagtgcagtggtgtgatctcggctcactgcaacctccacctcctgagttcaagcaattctcctgcctcagcctcccaagtagctgggattacaggtgcccaccaacatgtctagctaatttttgtactttttttgtagagacggggtttcatcatgttggccaggctggtctcaaactcctgacctcaagtgatccacccacatcggcctcctaaaagtgctgggatgacaggcgtgagccgctgcgcctggcccaaatatctggaatttttacacaatgaaaaggttctggattcatatgcaccttgttaggctctttggctttgtgtaatatgaaaagaagaaacagtgtgctggatgattcttcactctgatgaaaataatacatatttattacagaaaatttaaaagaggagaaacgacacctataatttcactctcagaatcaaaggaatagacctgagatttttcttcaactgtttctgtacagtaaaaaccgtggaatcatggtgttacatcctcgccctgctgaacagtgccgggcattttcccgtgttagtaaacattctctgtaaggacccccattgttacggcagtgcattgtcattcacttcacattctcccagtgttgaacattttggttcttttttttttttttttcctcctgagacagcatcttgctctgttgcccagactagagtgctgtggtgcagtcttggcttcctgcagcctcaacctcccaggttgaagcaatcctcccacctcagcctcccaagtggctgggactacaggtgtgccccaccacgcctggctaatttttgtattttttgtaaaggtgggatttcaccatgttgcccaggctggtcttgaactcctgagcacaagcaatcatctgcccgcctcggcctcccagagtgctaggattacaggcatgagccaccgcgcctggcctcccttcgtattatcacaaaccctgaaaggaatattttgtgtttaaatctttctgtgcctttcagactgtttccttaagccagaaattaactttggaaaggctcttaaaggtgcaataacactttaagtagcaaggttgtatcagcttaagagttcaaggctgcttgtttgatgaaattggatgtgtgcgtctgttccctgggatctctatgtttgggtgcagggtggattgtgcagcccctcagcctaagacttggggtctatactcttcttttgtgccttggtttatgctgatcaaggcctgcaagtatgagtctaaaacctgatccttgtgttctaaaaacctcacaggggcagatgccattgccacaggtcactatgcaagaacttccctggaagatgaagaagtctttgagcagaagcacgttaagaagcccgaagggcttttcagaaatcggtttgaagttagaaatggtaagttcatgtgcccaggtcagagccaaattcttgtgaacagattgaaatctttggaggaatgacagtgggttgtgcctgaggatcactgccacccctccctctgtgctccagagtagcttgtatgggattcacatttgaaaaggtgcagttaccaagaggacattttcccggagggcctgtgattgggtagtaaacagtgtccctgccggccatggtgagggctggtggaaagtgacatcagatactgataatccagctctcgacactgtgtggtgatttgaatgttccaaaaatatctgggtaaatatttgacagtgataattggggtgctgtcagtctagccaaggacctgtacttagcaacaagttctcaagggcgtgcggttcaggcagactttcaacgtgctgtgagcacaggacctgctgtggatcgcatgggctcagcagtcaggctttgtagccgtatttacacgttagtttatgcgtgttagggagccaagtttcacctttctagaaaaaagtcaatggcagacagtgagctgggaagctgctggcctgtcctggtgtacattcgtgtgtagaaaagaggaattccctgtattgttgagtgaaaaaccaagtggggctcagagccgtgtttccgcacggagcgtccgtccatcagtggggacccctgaagggcagccttgctcttttgtccggaagttcagatgttggagggagccttgtcccgccatctggggaataggggtctctggggctggggcagggctttacatacacacatttcttttttaattattattattaattttatttttttgagagaggatctcactctgtcaaccgggctggagtacagtggcccgatcttggctcgctgcagcctccacctcctgggctcaagtgatcctcccacctcagccccaccaagtagctgggaccacaggtgtgcgccactatgctcggctttttcattttttgtagagatgaggtctcgttaatgttgtccgtgctggtcttgaattcctgggctcaagcgatcctcccacctcggcctctcaaagtgttgggattacaggtgtgagccaccaagcccggcctcacacgtttcacatcactcctcttagcagtccatgaggtgtatgctctcatcccgtttcacagatgaggaaaccgaggcccggatgaagccatctgacctgggtccctcgggtggcagagctggatttcagtgcacttccgctcactccccagcccctgctgcttctgctgggtcaggccccagctgagttctttcctcagcgttgctgagcccatcctgaaggctgcagtgatggggcagggccgtgcttggtcaagggagccctgagtgtgccaacagtcgtctgccgccctctgttccctcctcgccttccttccttatgccacagggtgatcaggtaactgtactgacttgagcccagagaagagcagcccactcccgtaagacagccccccatttcaggaagacatgggtttgaatgcagataagacagccccccatttcaggaagacatgggttggaatgcagagtcctgccacttgggaactccagggtggaattcaccaagtaattgtgcatttacggggcctgaggagatggagggttaatttccatgttgaatagatgcgcctgcttacctcctagaacattacctcctagaacactgtgtgccctgcagagccatcgacctttattataggccacgtgccctcggaaacttgggacagtactgatgcgttctgttgagtgcgtttggcatgtgggaattgtgatggtgcacagtgtcttggccttcactgggttttgtaggcacactaaggtttccatttcattcttcttcagttgccctggcccagcctgggtctctgggtagagcacctgcaggggcagtggacggcctgggctcagggtcggtcagcacctgagaccagcgctcctaggcctggcctgtgactgggctgattttcccccacacagcgtgctaccaccggcctggcagagccagcacggcagccggcgtgtcagtgaggctccagcacaggcagcctcctccaaatgttgttcattcctttctgtgctttttcctctatagcagttcagttagggtcgccagcttgcttttttgaaaatcatagatttttagtttgttttaaaatgacgcagaactaggagaaaatgcaaatggctcctagttttctgaggcttttacacacatgcagtgtttgactgcagttagtttgggattgaaagtggactctgaggccaggtgcggtggctcatgcctgtaatcacagcactttgggaagccaaggcaggcggatcatgaggtcaggagttccagaccagcctggccaacatggtgaaaccccatctctactacaaatacaaaaaaaaaagttagccgagtatggtggcacatgcctgtagtcccaggtactctggaggctgagacaggagaatcacttgaacccaggaggcggagattgccgtgagccgagatgtgccactgcactccagcctgggcgacagagcgagactccatctcaaaaaaaaaaaaaaaagtggactctggaaagtgctctgcttccgtggcgactggtcggctgaacttggtctcacttgtcactcagttctgctgtttgtacctgccaagtaagggagggggactcgggaggctgggcagcctccagccccaccgcctccacctgcatcactttgggcgagtcatatgtgatgaactgggccggctccagtctcccctctgtaacgtggggagaattctccctctcacggctaacgtgggaatcggcagatggaaaacactagctacgcagagtgtgtactgtacacgtggctctgccaagccaggaagggtaggtgtgctgtctgaccgtcacggcatgtggcgtgctctgagtgtaactcgaaaggagaagtttatgagaaagattgaaagaagccagaaaactgacgttcgtcttagttttttgccattgatcattgaactcgagagtggagaactggacggttctaagccaggtttactcacacctctgctccgttgccttaaagccagaaatggttctttacaatcacatagggaatgtcggaggaactgcagggtcacctaacagatgtcagctgagactctcaacaaaaaaacgtttttaccaagaaagctaatgccttcacaggtagggcgctgctggaggcatgtgctggccgccgggcagtgaacctggaaagtgtagagtccttgaaaccactgtggcacgaacacatcctgtggttgttggaagaaggcacagctgacactatatcagtggaattttctgccagcaactagcttactccattttccaagatttggctgaatttattttaggtgtttttttttttttttcttatcacttgagaacattttttcatgtgatgtttcatctttgaaaatattataatctgaagtatgagctggaataatttctttgtcatgtaaaatccttgtttttttttttggaggtgcgaatttttcttacattaacccgtggtggtcttttccctagtagttgctattgagtgttgatgtctgcctctgacaggctaggggtagtctgtctaagtgaacagaaggacattgttgaaagtgaagtatcattatttttattcctgcatcgtcttttgttctttattcttggcagcggtaaaactcctccaggcagctgacagctttaaagaccagaccttctttctcagccaggtttcccaggatgccctgaggagaaccatcttccctctggggggattaacgaaagagtttgtaaagaaaatcgctgctgagaatagacttcatcatgtgcttcagaagaaagaggtacgagtgagcagttgcctttgattagtgcctgtttccctttcccgactgcatggcacggagcagctggacctgtgggtcccgcaccacttccccttctccaggacctaacatcaaaggcgggccttggagcaatagatggaggagtttgctgaggcgcacggtacagggctctgctgacatcgggagcagcctatacgagactccttgcttttttcctctcctctgcccctatgtggtaggcagctttccccacagccttagcagctggtggggtgctcttgggatggcctgcctgccaggtgagtgccaggcagtgtgatgcagccccgagacccctggaggggcaggtgctgtgccgccgtctgcacactcatgtgccctgtcacccgcttgcccggcacagactcgttcggtgccatctgttcgggcgctgtgctgctgggccgcgaggaattggtgacgcgcacacagttccatcttcgcctccatggagcccgcccgcgagtgggggacacaggcaggaggccaatcagtgtaaacctagaaaatgtctacggagggaggtgtaggaccctgggtgggaagcaccagtggggtctgagagtagggaatggagatgccaaaaacggcctcaaaagaagtcacatggaacctgagacctgaaggaggagaggatccggtgtcccagagagggctgggaaagtccagatgagggaacggcagtgcaaaggccttgaggcgaggagaagccagggagccgctgtgggggtgcctgcctgtggccccagctcctcaggaggatcgagcgcacccaggagtttgaggacagcctgggcaacacagcgaaactcgtctcaaaaagagagaacccggagtgttggcggaactaggatgaagcccgtgggagggccttggggatggagggcgagggcgctgtgggatgagcctcacctcttcaggggccagtgcggtgggagctgttgctccttcgtgtctcttcctggtaatggaaacggccatacctttcatcagagccatcttccctgaagagcacgcccaccgcccgtcctcctctcctcttgttttccgtttccggtgtcgctctgtggtgggagccgcagggatggaagggcagtcttgagagacacaaaccagagtaaacgatgcagcccctgatggggccacggtggagagcgcacgccacccaggctccccagctagggcagatgtgcttgaggaaggcgcctctctcctctgactcccctggagccctcccctaaggccttagcttcaggcctggctttcctgctacctgccccttctctggtccctgtctctcccccactcctcgcaggacagtggcctgaaggacctgaccgggttctgctttcttccccggggcagctggtgtgagggtctcccgcgcagggtcagaccccgcgggccgagacaatgaggcgttctctaaggctctggcatcgtgtgcgccggctgtgactggcggccgagggtgccggtgggcagccgggcccctaccctggaagcaaagtgtggggtgaggccgggaggccccagggcccgctcaggacgtctgggtacagcttgggccaccgccacttctgctcctctcacggctgccgtcttctcatttcagagcatgggcatgtgtttcatcgggaagaggaattttgaacatttccttcttcaggtgcgtgctgctctttgacacaaagagatggggctgcgtgtctgccctgggcctagatctccgtcggtaatgacatgtttgttttccagtatctgcagcctcgacctggtcactttatttccatagaagacaataaggttctgggaacacataaa

SEQ ID NO: 14693 - DNA, 731 bp, Homo sapiens
cgcgggtcggcaggaggataccccgtcctctgactttggttcggaggctcctcgccctccacctgtgtagtcggaggtgtgcgcgactgcagctccgactacctgggagcagttccgcgcccctctccacccacgcgcgcccacccacagttaccaggtgacaggggtgtttatgaagaactgggactcactggatgaacatggggtctgtactgccgacaaagactgtgaagatgcttacagagtttgccagatcttagacatccctttccatcaagtgtcctacgtaaaggagtattggaatgatgtgttcaggggcagatgccattgccacaggtcactatgcaagaacttccctggaagatgaagaagtctttgagcagaagcacgttaagaagcccgaagggcttttcagaaatcggtttgaagttagaaatgcggtaaaactcctccaggcagctgacagctttaaagaccagaccttctttctcagccaggtttcccaggatgccctgaggagaaccatcttccctctggggggattaacgaaagagtttgtaaagaaaatcgctgctgagaatagacttcatcatgtgcttcagaagaaagagagcatgggcatgtgtttcatcgggaagaggaattttgaacatttccttcttcagtatctgcagcctcgacctggtcactttatttccatagaagacaataaggttctgggaacacataaa

SEQ ID NO: 14694 - DNA, 3823 bp, Homo sapiens
tctggggcacaaggtgccttctttgtggccaccacaccccatgtccagcccaggcctggacaatgatgagatgtgctcaggtgcttggtcagggctggctttggtggttggagaatcgtatcttcctagtgagttacaccattgctgggcctgctctgggctgccctcccagcatctgccttcatgatgaggcgtgacatgtgggctgtaacttgttgcccagcctcatggagaaactgtctttctgtaggttggttcctgtataccttgggccagagagcaaacataggtggcctgagagagccctggtacgtggtggagaaggacagcgtcaagggtgacgtgtttgtggtgagtgggccggcctctgagacagcactggggctggttctggcagggccagcagtgcttccagaccagggcttgagaaggcctccagcagccgtggcttcctggaggctgtgactaactctgttcctgtccttggtcccctgcctttcctgggactggccatggtggcaggagagttttaaggtattcattaggctgagttgtatgctggtctcttaatcatccctgaaccccgatacacagatacagtttctccaattttatgaaagaggacagcgacgcccagagcttgggtggctcatccggtggagagggcatggcctcagtgccaaggatggtgcccaccatggtaggatccagtgagttgttgtcaggcaggtgcagatggccaagccaggatcaaaccaagccttccaccacagtggggaccttaccactgtgaccctggcctcaaagcagggccgctcagtggcggcaagctcaccccaccttcaggggaccttgccagtgtctagaggcatttttggttgtcacagcttgggtggaaaagcaaggacgcgggtgctgctgcatctgtgggtcaggccggggatgctgcttgccgtgttcagcacagcctcttccctgagtgacccggcctccaccttggcgcgtggagctgagaaggcccactctcagcaccctggctgccggctcatgttctggcacgaatgctggggcgccttctcttagacggaggcgggggccagcaggccccacccaccgattccaggacatctccttactaggaagacctgtggggagaaaagcctggctgcgaatgaattaaatgatctagatttcagtttgctgtgagaagaccagaagggttaaccaacggcctcctgtccctggacgggtcttggtgcctgcttagaacccaaagcccttaacttcatgctcctcgtcctgcttcaggggcggggcttggcacaatcccaggaggtgccaggtctcaatggcccgaggccatgggtgggtgacagggagcaggggcctcagaaccaacctagggtatctggggccccccagaccagggccagtcctggggcacctgtgggaagccagcagctaccagtccctcctttctcctcagccatttggtgtgtggaggaattcctggggtggccttgagagaagagcccgtggtgtggctggcccctgtccctgcgaatagaaaaaccagtcctcgaggggggccgtgctgctgccccacaggtggttgcaggtagagggcctgagtcagacttgaacctgcagcattcactgtcatgggctcggatctcacccctgcctcttgcccactctgacatggtacttccttcctgggccttagtctcctcatctgtaaaatggggattcaaaggcccggcgggtgatgagatgaatttctgtgggtagaacacttcgagcggtgccagcaccgttacctgtgtgtgtgtgtgctggtaggacagttgttcccagggaccacactgaggccggccttggggccaggtgcccctcggcgtccccaccttcacattccattctgcaggccccccggacagaccacccagccctgtacagggacctgctgaggaccagccgcgtgcactggattgcggaggagcctcccgcagcactggtccgggacaagatgatggagtgccacttccgattccgccaccagatggcactaggtgactgacgggagggctcctgaggacgggccccttgaagctgagcttcctgaggccagatttgggccagggatgggagaccctggggtaggaaagtcccgttgtggagatcatttggagattacctaaagtatttagaactcccgtgtcctgtgcctgccctgagcgaggcctgggggtgctgggagcagatgcaggcaggccccggcgtgttgggctgaagcaagtgtgtacactgccccgcagtgtcctgctgcgtccagggcccaggctggtgccctgcccttcccctctaagcaggggtttttgaccccgtgggctggtgctcctttctccctgggggcctgaggtcgaccaggaaaggcctgtgccccctccaagggcccctctcttctacccagtgccctgtgtgctgaccctcaatcaagatggcaccgtgtgggtgacagctgtgcaggctgtgcgtgcccttgccacaggacaggtgcgtggggtgtgggggtgagcccggggaggactgtactgctctgcaccctgccagggcacccgggttacagaggaaggggctgaggcccaggagtagggtgtgctcgggtcacacagctggtgagggcagagtgccaccagccctgccctgggggctcctcccacagtgacaactgtgagaggatttccactctggtgtcaccaaccagccagttcctgctcgggccctgagaggctcagctgctgcccgggccccagaagcgaggacagaaaatggaaggggcatgaggacagtgctcaaagaggcagagggtcggggcccctgtgggccgagtgtgcaggagctcccagggtgggcgcctggtgggtgtaggcctgaggaatctccaggggcaggtggtgggagggaacctggggtgagggaagcggaagcatcctctggctgccaccatgctccttcctgtcacagctccacattcccaaggggtgcagagacctgccagtcccttggagtcccaggagaggcccctgtgactgtcccactcagggagaggtaccctgaagaccctccctagtgaagccactgggtgccccaggcctctcctctcctgttcagcagcagcagcagcagcaaaaccctgctcccctgggagctcagtgcctggtgctccgagcacaggccaggccccataggggagcactctgcccctgcctgccctcggctggctccctgtggcacccctgatgccagggtctctcccctacagtttgctgtgttctacaagggggacgagtgcctgggcagcgggaagatcctgcggctggggccgtctgcctacacgctccagaagggccagcgcagagctgggatggccactgagagccccagtgacagcccagaagatggtccaggcctgagtcccttgctctgacagagatggatctgctagaaggaacctggagagcaggacccatggctgggcggctggtgagcagtccaggtgcccaagggccagcttgctgctgcccaaagcagaggaagccgggctggctgagggtccgaaaagcctgcaggggcccggcgagccccaggaagagcctcagctccaggctggggctctggctgctggagcatctgctggctggtggggtggcccgagttccccttcaccgcccccagggagggtttcccacctcagagtacaccgaggggacctgcagagggggctgtcgggacagcgtggaataaacattatttcaaggac

SEQ ID NO: 14695 - DNA, 2653 bp, Homo sapiens
tctggggcacaaggtgccttctttgtggccaccacaccccatgtccagcccaggcctggacaatgatgagatgtgctcaggtgcttggtcagggctggctttggtggttggagaatcgtatcttcctagtgagttacaccattgctgggcctgctctgggctgccctcccagcatctgccttcatgatgaggcgtgacatgtgggctgtaacttgttgcccagcctcatggagaaactgtctttctgtaggttggttcctgtataccttgggccagagagcaaacataggtggcctgagagagccctggtacgtggtggagaaggacagcgtcaagggtgacgtgtttgtggtgagtgggccggcctctgagacagcactggggctggttctggcagggccagcagtgcttccagaccagggcttgagaaggcctccagcagccgtggcttcctggaggctgtgactaactctgttcctgtccttggtcccctgcctttcctgggactggccatggtggcaggagagttttaaggtattcattaggctgagttgtatgctggtctcttaatcatccctgaaccccgatacacagatacagtttctccaattttatgaaagaggacagcgacgcccagagcttgggtggctcatccggtggagagggcatggcctcagtgccaaggatggtgcccaccatggtaggatccagtgagttgttgtcaggcaggtgcagatggccaagccaggatcaaaccaagccttccaccacagtggggaccttaccactgtgaccctggcctcaaagcagggccgctcagtggcggcaagctcaccccaccttcaggggaccttgccagtgtctagaggcatttttggttgtcacagcttgggtggaaaagcaaggacgcgggtgctgctgcatctgtgggtcaggccggggatgctgcttgccgtgttcagcacagcctcttccctgagtgacccggcctccaccttggcgcgtggagctgagaaggcccactctcagcaccctggctgccggctcatgttctggcacgaatgctggggcgccttctcttagacggaggcgggggccagcaggccccacccaccgattccaggacatctccttactaggaagacctgtggggagaaaagcctggctgcgaatgaattaaatgatctagatttcagtttgctgtgagaagaccagaagggttaaccaacggcctcctgtccctggacgggtcttggtgcctgcttagaacccaaagcccttaacttcatgctcctcgtcctgcttcaggggcggggcttggcacaatcccaggaggtgccaggtctcaatggcccgaggccatgggtgggtgacagggagcaggggcctcagaaccaacctagggtatctggggccccccagaccagggccagtcctggggcacctgtgggaagccagcagctaccagtccctcctttctcctcagccatttggtgtgtggaggaattcctggggtggccttgagagaagagcccgtggtgtggctggcccctgtccctgcgaatagaaaaaccagtcctcgaggggggccgtgctgctgccccacaggtggttgcaggtagagggcctgagtcagacttgaacctgcagcattcactgtcatgggctcggatctcacccctgcctcttgcccactctgacatggtacttccttcctgggccttagtctcctcatctgtaaaatggggattcaaaggcccggcgggtgatgagatgaatttctgtgggtagaacacttcgagcggtgccagcaccgttacctgtgtgtgtgtgtgctggtaggacagttgttcccagggaccacactgaggccggccttggggccaggtgcccctcggcgtccccaccttcacattccattctgcaggccccccggacagaccacccagccctgtacagggacctgctgaggaccagccgcgtgcactggattgcggaggagcctcccgcagcactggtccgggacaagatgatggagtgccacttccgattccgccaccagatggcactagtgccctgtgtgctgaccctcaatcaagatggcaccgtgtgggtgacagctgtgcaggctgtgcgtgcccttgccacaggacagtttgctgtgttctacaagggggacgagtgcctgggcagcgggaagatcctgcggctggggccgtctgcctacacgctccagaagggccagcgcagagctgggatggccactgagagccccagtgacagcccagaagatggtccaggcctgagtcccttgctctgacagagatggatctgctagaaggaacctggagagcaggacccatggctgggcggctggtgagcagtccaggtgcccaagggccagcttgctgctgcccaaagcagaggaagccgggctggctgagggtccgaaaagcctgcaggggcccggcgagccccaggaagagcctcagctccaggctggggctctggctgctggagcatctgctggctggtggggtggcccgagttccccttcaccgcccccagggagggtttcccacctcagagtacaccgaggggacctgcagagggggctgtcgggacagcgtggaataaacattatttcaaggac
